United States Patent Application Publication US 2008/0114160 A1 - sequence listing, part 23

SEQ ID NO: 7238 - DNA, 17782 bp, Oryza sativa
acccccctggtttttatataatgtctgaaccatagtgtatttgcatctatgaaatccttatcgcaacaagcaagccacctgattcttttttttttaatgtagcctagtggaagccagtttgtcgttgttatttcatggaaggtagaaaatcatgtctaaatatttagaggtcaactatgaaactaatctactgtgggcgtgttgactgatgataaatctaatgcaatggtgctgataacatattgtcaagttaatgtggtttgttaatttaaggttaacttgttggttcagaaagtacaggataatctgttcaaacaaagcttgttattccaaagtttacttttgcttgagtctagttctgtccaaattaatacagtgaagtactgcatatatatgcttgttgtaatagcttgtaatttctagtcttgttaacttaacatgtttcattttctaggtgctggagaagataaacaacccgcattatctctaccgcatgaccatcctgcaagctatttcattgctggcccctgtcatgggtgccgaaatcacttgtcaacagctgctccctgttgtgattaattcctcaaaggacaggtgaaaaatttgtaatttgtaaatgtatagtttacccatctgatcaaggccttattaacaaatatttttctaaatttcagagtgccaaacatcaaattcaatgttgcgaaggttctgcaggcacttataccgatccttgatcaatctgtgagttgcagtattttttttgccttgattcctttcttcgtaatgctataggacatttacaggttattggggtatattatgaatacttactttgtaggttgtggagaagaacgtgaaaccatgcctcgttgaactcagtgaggaccctgatgtggatgtaagatactatgcaaaccaggcccttcaggcatgcgatcaaatcatgatgtcaagctaactgtcttcctgtccagtatttagaacttgattctcttagtccaaattttggaatatttgtaatttgcactttagtttgaagagttcctttctagccccagtaacagaccaaacacttcccaagatgataatgtatggctccgacccctcgttctctgtgtttgatgttgatgatgttgtaattgagcaagatcggacacattattatgtttgtttacatggtagttttgggccttggtttctgtgattttaatggatgccaacactgcaatgtgatttttgactgtagctattggtaacggtgtagtacttgcatcgtacgagttggctcttgatgtggacaccgatatgttgatatctagaagatcaaattggctttattaaatttaacattaaatatattttgataccatgttttctactccttctgttttataatgtaagactttctagcattgtctacattcatatagatattaaagaatctagacacaaaatgaagggagtatgaactttatcaaagttaaaatttgacttagaaaaaaaaggtaaaacgtctttgatatgaatgaagttctaatataaaatggagggggtactgcctggttcgttcttcattccaactctgtggagtccttgcgtgaatggcctgttcttaatagtctgatggtcttttgtcgtgcacctgtcgtctatggattcaagtgtcggcttatagttactcgttgaatcaagctagtagtactccagctgaatggtctgcatcaaagggtacccatacgggggcaaacatgacaaaattggaggcggggcagatgtatccaagtcataactgaatacaagtatatgggggcatattaatttcttttctatacagaaagaaaacaaaatgtggaatcaaaatagtgtaagtacgtgtgctaccttatagatgatcataaatatgtgaagaacactacaatattgggtcatcatttttgcaggtagatcagttgcgcataggatttctcttgaaaaacatctagctaaaataaattctgatgactaatgcaacatgtctaaccattttttagctttctggctaaagagtgtaaatttgaataggccactaagccagctagtggcgccgttgaatccggacgacggtaacgttttctgatgattaactaatttttataggtattgatggctatctgtagtgaagacaatagcagcagagattggggatcgggcggcgtggccgatcacattatatatgcttaagcaagcattggaaccgacaaagtggcaaagagtgacaaactcaatagttttttttttttttgcctagtattgatatataatttcttaaccaaggatagcatttaatctttttaccaacataaaatgcatttttattcatacaatttgattatataatatttatactatataattattaatttcctagtattttcacttatagttttggacatcaataacgcacacgattttgccaatttttatttctaatttcccaaaaaaatggttactcttggattcaaatttattctgcaaagattatcatgccatatttaaatttctccccattctatcctcatacatcctcccctcaaccatttctcacattctaccatcaacaatcatttcctctcaaccaggagtaataaatcatttaatgcattgcatgtttttttccttgaacattaatccttgcttctaagagaaacctagaataacaatctcttaagaaaggtgatagtagcaataaaattattgaaaatataatgttaattgtcaaaaacttcattttgctattacaaacgaagggactaccttaccttaggctgcgttcggctccttggcacggaaaacggagcaacgattagcacgtgattaattaagtatttgttattttttatttaaaaatggattaatattttttaaagcaactttcgtaaagatttttttttcaaaaaacgcaccgtttagcagtttgaaaagcgtgcgcgcgaaaaacgggtgagggaaggtgggaacctttggtattgaacacagccttaatcagttcccaacatgattatattttgagacttcaaaatcttgtttgagatgcttctaactagcttctatctagacgatatcatgcaacttgaaggtatttaaatatgatttttgatacacgtagcaatttaattatggtcattatgatgaattttgctacaggacatccaaaaaacatgtaattagccgggggacactgtaataacacgtttatgctacagggcactgtaaaaaggtggtaattagttgttggacattcacgatattattttattatacttggaggaattaaagagagaaacagatatgaaaatacagttttacccttcgaacccaataaagtctcactcccactctaggacctacatgtcaaggaatatttcttttcttttatttttctttttctctctccttctctaccccttcccttcttcctgctttcttcttccggttttcgaaagttagcattatattttcaataattttattgctactatcacctttcttaagagattgttattctaggtttctcttaaaagcaaagattaaggttcatgaaaaaaatgcaatgcgttaaatgatttactcctggttgagaggaaatgattgttgatagtagaatgtgagaaatggttgagaggggaggatgtttgagggtagaacggaaagaaatttaaatatggcatgataatctttgtggaataaatttgaatccaagagtaaccatttttttaggatattagaaataaaaaaaatggtaaaatcgtgtgaattatcgatgtccaaaactataagtggaaaaactggaacattaataattatatggtataaatgttatataatcaaattgtatgaataaaaatgccttttatgttggtaatccaaaagattaaatgctatccttggttaagaaattatagtcaataaatacagcaaaagaaatagaaattatcgagtctgtcactctttgtcagttctaaagcctgcttagagcatgtataatagcagactataaacaagctataaacacatattaagaagttagaagaagagagagatgagcagcgggctatagctacagcatgagcatggattttaagacatattgtgtgtatgataggtgagaccagatattaatagtgtagtatatatttatcggtaactattatataaattgactattaaattgattacagatgatttggaatagttagctgtaatcttaaacttgctcttaagcatatgtaaagtgatcggccacgcccgcagatcccaatctcgctgggcttttcgcccctcccaatctcccatagtagccacctcgacgcaaaccctaatcccatcgtctccgcctctccctctccctcctccccgcctccatggatcgcgaccgctcctcccgccgcccccgcgacgacgacgaccgccaccaccgctcccgcgacgaccaccaccgccgccgccacgacgccgacgacgaccaccgccgccacaagcgcggcggcggcggcgacgacgacgacgactgcgaccgctgccgccaccaccgtgacgacgaggaggagagccgctcccgccgccacggccaccatcgcgacggcgggcggcggtccctctccccgtcggagtcccccccgccgcccgccgcgaagcgggagcggtcgtcgagccgcgctcccagggactccgtggagcgccgggactcggccgaccgagaggcaccgccgccttcttcgcggaagcggaagggccacgagggtggtggcaacgagtccgacccggaaggggggaagcgggcgagggcttccgtggagccgcctccgccgaaggaggagaggccgaggcgggagcgacggaggtttgaggacgccgatgcgaatgggaagcatggcgatgagaggggtaagggtgataaggataactcaaaccatggcgctgtaaatggagattcccggagtggtctggtgcccaatgtaagtgttgctactgtctccatatttttcttttctagtgatgaagtcaagaattatctaagaaatgattgctttattttgttttggataacttattaactggatagattacatcttagtcacatttctgtagtttatatggtattatgttggtgaataatctgccaattctttagtaaatatatgggagtgaagggtttttatcaggagtccaggagggttagttctgttcttacgaaatgtttctgttgatagattgatcgttagtgcttttgtccaatttgttcaagttgcacaatactttcaagggataagcttgtattgttggttgacatgagcgatactactggttactaggtggatttttagccttgattaagagagtaatgcagctatggcaatactgcctcctgctttattaggaaaacttgatccaacattaggagccaactagccattagatcttttccttgcattgatgatgaactttggaagtacctgttcagtgtctctgctgatttactgataagaacatgctcaattgtttcagtattgtttgagatgtataagaagttaatatccttcctgtatattctcattggatgcaccttctgtgtttttcaggctggtgctcagcaaccgctcaatgctgcacctgttgtggtgccatcatctgttcctatgccttcaaaggtatcttcgattactaccaccaatgaaaatgagggagttagtattagatctgatgaggttactggaaaatctagtacagatggaagtacaagttcagccgctggcaaaagtagtaatctatctcttgatgctttagccaaagctaaaaaagcattgcaactgaagaaggaactatcagaaaaactcaagaagctacctgtggtaagaaatcacagttgttggtagtcccttgcttctatatttctattttacctttctaacttattgtgttttttggcacagcttaataataaacttggtgttactagtactgatacacaaattcctaagaaagaaacacagcctgtttctagctctggtgcatctgaaatggctgtgggtgcagctcttactgagaagatggcagctacagcaggtgcagttggtattccaggccttgctaacattcccaatttggatgctgtgaagcgagcacaggaacttgctgctaagatgggattcagacaggatccacaatttgcgcctctcatcaatttgtttcctggtacatcctctgaactaactgtgcctcaaaaacctgcgaaggcacctgttctccgtcttgatgctcagggtagggaaattgatgaacatgggaatgttatcaacatgaccaagccaaccaatttgagcactctaaaagtaaatctcttattttactagcatgaatactatgaaatgttatcagtaactcttctgtgcaatgactgtcacttttggttataccttgtaggttaacataaataagcaaaagaaggaagctttccaaataatcaaaccagacttggattcccttgcaaaatcaagtgcacactttgatgaaaggatgggcatcaaccaaaacaagctcctccgccctagaaggcctggatttcagtttattgaggagggaaaactttcaaggcaagctgagctgcagagaattaaggtctgtaaggatcaacttttaagattagttttcaaaatgtatttacttatcatatttccttttacttaccctaataatttgaccttctagaatcaatttggtgaagcacaagctaaagaacttaaagtaaaacaagctcaacttgcaaaggcaaaggcagaagtagtcatgaacccgaacttgattgaagttgctcctgggaggcctccaaagcaaaagcagaaggaagagattcctgaaattgagccatggtttgctgctacaccctttatctaattttatattccatcattaaaatataactactaatgtatgctctttacagggatgcaaaaattttaccttctacaacatacgacgatttctccatggagaaggttaatatggaaaaaatcactatatatgtagagcatccagagccactggagccaccagctgagcctgcaccaccaccgcctcagccacttaagctgactaagaaggagcagaagaaactcagaacacaaaggcgccttgctaaagagaaagacaggcaagaaatgatcaggcaaggcctcttggagccaccaaagcccaaggtcaagatgagcaatcttatgaaagtactaggagctgaagctacacaggatccaacacgtatggagttggaaatacggactgctgctgcagagcgtgagcaggctcatgtagatcgcaacattgctcgcaagctcactccatcagagcgccgtgaaaagaaagagaggaagctttttgaagatcctaacacattggagactatagtttgtgtgtacagaatcagagacctgtcacatccgcagacacgttttaaggtggatgtaaatgcacaagagaaccgtcttactggtgctgcagtcattgcggatgggatcagtgttgttgtcgttgaaggagggaagaagtcaatcaaaaggtacaataagctgatgctgaaccgtattgactgggctgctgcggttgatgatgatgatgatgctgatgaggaatcagacaagcctgtgaatagctgtgcattggtctggcaggggagtgtggcaaaaccctgctttaccaggttcagtgtacacaattgccgtagtgaggctgctgccaagaaggtgtttgcagatgcttcagttccacactactgggacctggctgtcaatttctcagaagattcatcttgagctgagcttctgttcagaacatggaggcgcctgctgttgaaacccctgcctagggattacgatgttcaattctcatgcagtaagtgatgagtagtagctaatttctcaccgtgggtaagtgtcctcttcaagttacgtacaagccttattacttgctctggaagcatttgtggactgagtaatacttcgtactgtcatgaacatacccttgtaagggactgctgatcttttcgttgcgggatttactcatgtgagctagaaactgaatgcatggaggaactgttgaaatttttgcagtataagcttccaactatatctggactgctcaggccttgaatattgttatgggaattgtgttaatgaaagtatgtatgcattttcgtagggttgcagtgctcttgagacggatttcatattttcatttcaatccaacaatatttgaccgattttttccatgattggaaatgttagtagttgcacgtttcagtttgcaactgctgctccggatgtttatccatactcgattcggcatctaatttagaattaaaacaacatattctgaatttattttaccaatgaggcggccagaattttgaagtttgacatatccaaagtagtgtaaaaccaaacttgtggcatttctgttttgtgaattatataagaagaaagattctcgaggtttttacctgtgtgccattaaaaaagatgacccctgtctctgtgccactaaaaagttcgagcctccctctatgccatcgtcgaactttatcgtgtctgtcctccacaccattccgtccgtttttgatcctaacggtgagtaacggcgcagccaaatgacgctcttgcccttagccatgtttcatctagccaaatggcgctgcggcatcatcatcagcatccgccgccgccgcctgagctgcagctcctcccggcatccaccacggcgccgttggccgccgcgtttttgtccaactccaccggttcctcctcccacgagcaacacgtgacgacgctgcgacgacgacggggcggcgccgcgacgacgacgacggggcggcgctgcgcgacgacgacgacggggtggtgctgcgcgacgacgacaacagcggcggcgctgcgacgatggcggcgacggcggcgttgcgatgacgacgatgatgggagcagcgctgcgacgacgatgacgaggcgttcctccgcatgccccctcctcctcctctccgcctagacctcgccgctgtccttccgccgcgggcccagctccgcgtctctcagcgccgcgagcgccgccgccgcctcgtcgaatgcctccttccctccgcctacgccgccggccatcacggccgtcgcctcctcgggcgccgccgccacgggggtcgacttggccatggggttagctgctggtggtggtcgcggtcggccgtcgtgaggatcgaagggcatggacggagagaggggaatcgagggaggagagagagagagagagagcgactgaaagtgaaagggcaatagtgacatttttcctacttgggcccacatgtcagagctgccaaatggttaaacccaaacagaatagcgacggaatggtgtggaggacgcgataaagttcgacaatagcatagagagagactcaaactttttagtggcatagaggcaagggtcatcttttttaatagcacacaggtaaaaaccttaagattctctagcctcaacatgaatgtatctaagggtgtaaatggctaacccatgaaatccacttgtaggttaaaataagttaaaataaacggacttgtaggttaaaataagttaaaataaacgggtttgcggctgatccacttatacccctaaatgcatctagccagtggcaatttcgtttgcttcacaatttttgattttgttccaagcaagagtatgatcggaatgaagtgtcaacattttgtgtattcaaactgaatttatcaaggacgaaaaatgagccgcaaaaaattcatactaaaattacaccgcaaaagttaccaagtaatcagagtccaattccaatctgctgagtgctgaacgcaattcatttgaaaccgcatctaattctccaaaacccaaaatttttcagtagttgacacttgaacagtttgcacaatccatatccaagcctgcatcacgtgatcaccatttttctccatctcatacggtatggtgtggctcaggaagagatatggccaatacctctttcaaatttcgtcagagtgaacttcaccaaacatgaaggtgcaacacggcccttcattttcgatgctatatacatacccttgaccttaatacagaagatttctaggtgacaacattacttggctccattactgttctcatgatctgcccgacttttgtcaaataaactctttccaaaccaaagattggtgagccaagcagataatacctactcagaatgatttggatgcttcctcattaacagaaatctaaaatctaaatgtctcaagcagagtacatttgatggaatcctgatggttagcacaacatgacagcgataatgatacgattcaaagcgaagctagtaaccaaaacatggaaacagctgatgtagctatgaacgaccatgtgatgaatgccaagataactgaaagctcgtaacgaccacacgaaagctgcgggtacatcctacagaagtgcacgtctctctcaaaaagaatagtgacaccagcagaagcagaagctgctgcaaacgaaagaatcgctgtaacctgcaatacatccaaatataatgttctttaatgtccctcttgctaaattatgttagcacttcaagaaagaagggtcaaacaagtgatcaaacagggaaatgaaaaccttggcatactaccccatctagctacaagtgccacatggatattgacatggcaccggaaatgcagctgattactaatttacggtaatatttcaagaatgaaagggaacaccgaagttataatataatgaaagaagttatcgacagaaacctacacatatgttttgtgtatccattctaaaaaatgtattttactgcacaattctagaccattagttattttttactgaaagggtataaaattgatcgcaaactgacagaaaacaacccatattgccagtgtttcatctctgattccctaaaagatctaatacaatcgcaatttttttcatgtcatactctcatttatgtctgattccctatgtctgattccctatgtctggattggacatgattcatgtagttttcatgtcatattctcgtctagattgcacttcttttctctcatttagattgaattatgactggattggacatttaacaatatgaaaagttcaaactgttcccctaagcatgaaatttaagaattcttgaacaaaaacatatgtactactcccctgttatttttcctttttgatgacttcatttccaaattgaaaaggaaattcatgttgctttttacaaattgaaaagcaattactagagtaatatatgagaaatgaatcacttacccaatcaccaacaacaaacaggcttacaagcactgggttatgaagatctcttttagtttgtaatgaatagatatccagacaagcaagtccaaaactccaaagaagctgtagacccatggaagcaatcaagtagctgaaaatagggagatcacaatatcgtcaattatgtatatagattatatcacgtatgcactgttgagctcctgctcaagcaattctgaatagtagtaaacaattttcatactttgcccaacttggtctcaaaacattaagttaaaaatggcacccatacaataatcaaaggatgtaacatgttgaatgttgacacattcatacacaacatctaatggaaaaattctcataagatgttaagttaaactttaatagtcacaaagaagagaacagataagcacaccaaatcattgggcagtcctgcctttttggtttaagacagataaataaattgtttttggtcccttcctggcatggaactgaattatatcaggaaaaaggccagtaaagaaactgtgagaaaagatcaaaacatcataacatgatacccagaaagctacatgagccaataactggaataaatctactacttgtttctttttagatggaaagaatgcaaaaacactgccacatatcatgcccctcgattcaaatggaatattccagaatgaatgcatttattactcgtgaggaggtaatggtgctcaggaagagaggagagagacttaggacctttttattttttaattttattaagagacctttccaaaaagtatttctgaaaactgaaccttttagcgttgtcttgccacaccagccacggtggcgtggcagaacagcactgccacgccagcctcgcgtggcgtgacaaagttatttggccatgccaggcgggctggcgtggccaaaaggttcagatttggaaatacttttgggaaggtctatcaataaaattaaaaaataaaaaggtctaaaaaataaaaaaaaatccagagggtggggaaggttgatgataaccagtgggaagcttggaaatgtggaggcaagggaaggataggtgtgctagtgcaagttcagtgtggtggatatctgggcagttttcttgtgtcagacaagcattattgaatagtttgattgcagaataaatttatctactcaaacggaaacataccaagaaaacatacacgacaagacagtacagtttagctgaacaactatcgaagagcaacttaggcaagaacactcaccatgctgagtttgtataccagcaggcacacaccagctcatggggaatgcaactactgtacctctatccattgatatttcctgctcatttcagttactacatgcaaactaatccaaacttgtaccatttatgtacaccctatttgcagcaataaccaaaactaaggaagctgagtgagaccatgtactataaggccacttataaaggaagaagagcagaagcaggtttttattttggaagaatagaagcaattaacaaatttaacacagaagcctaccgagtgaaagtcctaaactagaatgtttgctgcaaattagcttcagcaatcggctcatacagagacgtaggtgtccaatgttatttcaagcattccaaaatagcgacttgagcttgaagcatttgcccaagaacccttgaaattgcacatttacgcaataggcgcgcgctggttgaaactcgaccaatccccatgaatttgcaacaaaatacaagaaacatttgacatcaagaaggctaagcctgacacattgcactacaatgaaagttagaactgacatttcagtagacaagaagcgaattagtaaagggggaaagaggaggctagagagagagacgtggaaaggcggtagtagtagggtaccagaaggcggtgtagttggagaagccgtaggcggaggccatggcgacgacggaggcgccggcgaagacgcattgcgacacccgcagcgacatcccgctccatgtccccgggctccccaccacatccttcatcccctcctcctccaactcttccgactgctggatgcgcgcgcggtgcggagggcggcgtgggggtgcagggcggcgccgccgcaccgtagccccttgcccgcggatctgcgcggcggcagcggcggaggaggaggaggtggagtggagtggtggttggagatgggaaaggcgacggagcagcagccagcaagcgaggaatgagttgttgttgctagggaagagagagacgatggcttctacacgttttttttcctttcttgtgttgaataaatgaaattaatcttaactttttagctattaccagtttaatcttagaaaagtactcgcatgagactacatatacatttgtcgacaaatttttccccaaaaatttaacagatataattatagtacaattatagtgtaattacactgtaacttatatgtaattacactgtaacttgcatgtaactacacataattttgaatcgttagatctattacaagatttgttttggtgaggaagaaaataaatcatagcacacacatatgtgaaataatttgttcccacgacctccattttaccgaaataacatgttacggagagatttttgaaagttacatacaagttatactatagttacagtataattacatgcaagttacagtgtaattacactacgattatactgtaattacatctgtcaaatttttggggaaaaatttgtcgacaaatatatagcaaaatcgataggtaaagggttttcttcctgtaatattgggatccctacatacattataattgaaaaagttaatcaaaattcatccttggttttgggccgaaagctcattctttttactttttagccctagcccagtccactgcctcctaccttcctccacttggccaaaatattgtgatatgacatgattaaaataatatacataattttttttgagaaataaaatacataattgtgcacgtaaataaaattctattcccatagtacgataagacaatacgaaataaaatatcaaaacatgaactaacagttaacgcgcataatttcataacgttataattttatcacaccatggggcaagaaataaagctaagtatcaaaatgtcatcgaaatcatataatcataaaattctacctcataatactgttgaaccaaaataaagcaaaattaacattagtatcaataaattaaatttctagctgaatttcttgttagttccatttagctacacatgatcttcattgcataagaaagtttataatgcaactttatggcatcaaataatggcttaaacggattaaaatgcatttatgtaaaggaaaaatcactaattcggcccgataataagggaaaagtaatttggcccgaagaccagtcacgacccagaggccagagctagcctgtgattgggcggcccttgaggcaagcatagcccattaaccaatcatggcccgtcagtgtagccgtccgattctgatggacggccacgatctctgatgggtggctgatgcggcgtatgagagtcatggtgttatggttacggataaggcggttgtagataaggcatacctcttatatttggggtcgcgaagtgtatgaatacggtatatcctcaagtatatgggaatgttacgttagttttaaggaattcggccaatgcgtaaggaaactaacccccaaataaagggtgttagagtcctattcagagaggatgcaaattatgtgatctcgcgggtagaagattctccccgagttctacttggaagccaaggcaattcggcatataaatacatggtgtccatgggatatgggatcatcgaatcatagaatagccaccaaccatagcagaggcaatccggaggactcgaagccaattcgccggttcgatcttgttgagacgttctcgacaggggtcaggtcggtaactcttcagtttatattgttctctattgtaatctctgtggtttccgtataattcatataaactggattagcactgttaccttgcgaggggcctgaactagtataatccttatctttgtgtgcttgatgtcgtttcgtgttgactcttgttacaatgtaccccaataccctcaaaacatggtctatgattataacccatcgacagtggcacgctaggtagggggacttggtgctcaaggtctcgctgagatggcttcaagctcaagaccttctaacaatgatagctaaaattgtcttggcctgggagatcctacccagccggcgtttgcatggactcaagtcgaatccttctgctttcccatcttcgccgcaactccaatcttgccttccctaataccagtcgggatcgagatcgccgccacgaggatgacggaaaataaccctcaaccgtctcctcctcctgtccaattagaaaagaaggcgctgatgacttcagcttctcggggaactcctaaggtggccaaacccccgaacatctgttaaggatcacgtgccaacaaggaaatcttcgcccaatcaccacacctggtgcttgatccgcaaggcgtctcaacactctctggtcgagtgtggggtgatacttaatgtgaaggctgaacttgatgcttgtaaagatcgagctatccagcacacatctccatacaaggcatggtgcccgatccacaaatcgaaaagttacccccttaccggtagggatggcagtcgggcacgacgggcacgagtagtgactacccatacccgtgcccgcgaggtaattcatgcccgcgggcatacccattattacatgacgggcaaggaacactacccatgcccgttgcccgcgggcgccatgtgcctgcgggcatgcccgtttactcgtcacaaactcacagttgaacatttcaaccacaaatctccacaagcagagagacattatcacaatttaaagaaatggtacagttgtaccaagttcaacaatacaagcattacatgttcatcaatactagatggtggtatttatactaatttgactgagggaccacatgtcagttggtttttgcgggtaaacgaacgaagcgggcatgggtagtgactacccatgtctgtgcctatatgcccgttgggtataggttttgatgcaataaaaaacccatgggtactaaatggggaacaaacccaactctattagggtttttacccacgggtaaacagacaaacgggttaaattgccatccctacttaccggctgtaagatcttctagagattactggatccatgatccatgtcccttgctatccgatccaccaacgccgagagcaaccttgagatgcatccgtggaagatatgcgaaatgggaactgcagatcgcctggtcggattcatcgacatcgatccttccgtccttcacaacttagatgaccaggaatcttcaggatccaactccccatgcgaagtgaatgtgatcgaaagagtcgtcgaggacatacacgaagagggcgagattcgttttggagatgaaccgcgagctcctgttccaccacgtgaaccagtcgagccggttcgaactcctgccaaacacttcaccgtgcgtggtcaactctctactgaggtaaactccgttcgacccagtaaccttcccggaggcggacaactaggtcagacatatatagtcgacaatagccaacctcaactctgcttttttgaccgcagccgaaccaaccccgcaaggtcctgctcgagatccccgacaacataccgatgacagagtaacggagaacgaagttgccgaggacgcccacggtccccaccctagtcgagacctggaccgtactcctcaaaatgcatcatcaagaaggcccatcaacctcatccccgtctagatgaccgcgatcgtcacaaccacttgaacgggaggaggcaggagctcgaggaggaggtctggcgaggagcagtggtaggctctcgctcatgtagtatttttgcagtatgaacacaactcagttggatagagtcatggtatgttaggattaggataaggagttctccatctatataaggagagatcctatcctagatcagttagcattagatcaagatttatcttagtgcccatcaaccctaccttgttggtgtgagggagagcatcgtgctatttaggttcagggccattctctattacttcttctattatgatccaatctattcctcttcacctcttttatcccatataatcctagcacgtgacactttactcttttcggtttcctagtcttctcagagatttgggtatgtctttagtactttactctctttgtaaggctatgagcttagtaataaagttatcttgtttatttaattgtgttcgcagttcatatattgctttgttaagtgtatgctctatgagtagtgggctgcagg

SEQ ID NO: 7239 - DNA, 45111 bp, Oryza sativa
ttgtgaaacggagggagtagtaaagaaaacttggatacatatacacatctcttacaaaaacttagataatgccatcaccatatctctttactatccgatagcacaacacagttgggcttccccatgatcaggggaaaaaaaacaagtgtgtagattttcactatttccagtgaatgccaaaatgccatacccctcaataaaaatgccatcttcttttcaaattccacagccaagtacaaacctctgcttgatgaaattttctaattgaacaaaatcatgcaaacagaaaaaacaaaaccttcactgctgaaatttactccaatcatgaacgacctgaaaccaactttccaatcatgaacgacctgaaaccagtccccaacttttttagtatggctgacaaaactaattttcctttagtatgggatactacagaaatcaagtacgaattacattgtattggagcatgcagattagttatatttcctggtatttgctagcagaacaaacatgtacttagatcagtacatggacatttcagagtagtgatgtaaaatacacaaaactatgaaaatacttacaaaataaacaagtcatacaaaattctggtgtgaaatttagcttctctaccttccgctgagccttagccctttctaatcttgtttaactttatttcaaatttgcaaacaaaactatagaattaaaacaaaaaacatatttcataactagtagataaaaaactgcccatgtttagtagctgataaacctacagaattctggagtgatgcatgctaaacgctgacaaaactacatgtatgaattcagacaaaactaattgcagacaaaatttttaaaaaacaggtattaaatgataataaaactaatgatctacttacaaaactaaactgtatgaattcaggcaatattaactggtgacaaaactaacaaaaccaggtactaaaaatagctgacagaactagaaaaattcacattgttagaagacaaaatagtaagtagctgacaaaaacaaaacaaaactgacagaacccatgtcagtccttcatctgttgctacagaactaatctgcaaaaaagaagagattaataccgtgtaaaatagaagtttaaaaagatatttaaaataggatgttaattaaaaatatataatatatgaacatagataactgtactttaaaaaaaatcaaaaaataagaaaaatccaaaccaggacaacttcttccaggccatattcagaaaaaaaaaaactcaaggctgtaaataaagtagttataggtggcattcctcttcacaacgtcaggcatgttcttcagcaaacaaaatcaaggatcaatactattttcatctggcagcgagccatgcatcagatgtgatttaccagtttgtacatacttatttttgaccatatgtatgcaaacaattctaaattcacaaaactgaaacaatacagcaagaaagtcctcactcctcagcacaatgggatgcgggaagaggatgaaaatcatgaacaaatgcattcaggttgagcagaaaagaaaatatgtagttcttaattttattgctaagtgagacagacaaacagcgagacatgtgcatgctccacaaatccagagaggaagagtaagagagagaaagaagagaagctagtgcccaacacaacttcctctcttggcagtggttgataatatcaattaaaacagaacatgctcagtacatgagaactagtttctgttagttccctttaaccccctttgattcaaaggaaatttataggaattttagaggattttattcctatagaaatttttcctacaaagccctttaaatcaaagtaatgaaccctatggaatcatatgaaattcctatggaatgtctcttcccatataagttttggagaaattttaacaagaggtagaacctcatggaaaaaatcctttgagtctttatctctcctcaaattcctgtgtttttcttatggtccaatcaaacggtcattccaatgtttttcctgtgttttgcaatcctctgttttacacttacattcctgtcagaatcctatgtttttcctattcctccgttttttcattcctgttattcaaaagggcccttaagattataatgataaagtattctctgaatttttgtatacacaagtaaccaagttggtgcaatattacaactaattagatgcttgcttatgaaactagggcctgttcactttgatgaaaaaaaaactgtcggagatatgggcccgggggtatgcgaagtaaagggaagttatcttcccctccagccacgtggctctgcaagctggccccactctcacacctcgcgagttgcgaaagcgacggggggcctcggggtggagcgtcaccccctcgggctctccccctgcttcgctccgaggccctcgcccaactgccatgtggcggggggagagagagaaaaggggacccaggccgaacagccataaatacgcggcgccccaactgtccctcaccgcatttaatttaatgcggtgagggtagacgtgcggtgccacctaactgacccctgtcaatcggatgtgatcggcctgttgccggtcatgtccgattgaacgggcggccgtgcccccacgtcgcctctgtatccggtggagtaggggtaggtatgacccgtcccatcggagcgtcactcgaaggagggctaccacaagtctccactcatttatgaaggaatgatagggctgtccctcgtgtcaggcaggggcagcgctgggtcccactcaagggcgggcttctacttagcttccgggcgaaggcacggattgtggcccggtcaaagtaaagtggggtccccctcctatggaggggtaggtagaggcggcacatgtggtatctccttgagatataaaaagaggacattgcacaccaatacaaggggacgactctcagaaaacctgaactctaggaggagaaaggcgagagcactctccggagtaaaggaacccttgtaatactcatccataatcccaaacacaggaatagggtgttacgctccatagcggcccgaacctgtataatccgattgtgtgtaagctagccagcaatcttagaggcggatacgtgatttctaagaggcgagcctctgcccccggccgaactcacgaaaggggggtctcacgactccccactattgaggtcctttcctcgacgaaaaccttaccaaattttggcattaccaaaattttaacatggttgccaaaattttggcaacttgccaaaattttggtaggatttcttatatagttgccaaattttagcagcaaactaaatgtagccactttttttttcaactttaccaaaatttggtaaggttgaaaatggcatcaaagtgaatatgaatatgcccctaataaaattatttccattcatgcaactcccccttaatgtaactctaatctacatttcttggaaaagaatttctgcttatgaagattcctgatcttcacaacaaatctacacgcagataaagaaaaaaaatgtaaatgctctaaacacatgtcctctagtactgttgctcacaaaacctccccctcaccccactggaaatttcaggactgaaaaaactgcacttatacaatcaacagccacagatcaaagcatttatacagtcaacaaaataacagaccgagaacagcgttaatacattaaacagaaacagatcgggaggggtggtggggaggggcaatacgattgtgattgcatccaactaatatatgtgaaatcgaatcagcaaagcagcagcaacacaaaaaaaaaatttgctcaccatgagccgagttatacagatctcaacgcctgatatatttggattcaaatcagcagcaacagcagccgttttgcgattcgcatccccttgcctgatgaatgccaaaccgccatggatacctcaccgggcgcagccgagtaaggcatggagtcatggacgcctcgccccgaaccttggcgaacccgagcctgcctccgcagtggcaacggagggtgctgcactgcgctcgttggctgagccttgctgcggcaaaggcatcctgctcatggccttgctgcacgagcggcctcctcccgccggtgaggccgccgccggaatcgcctcctcccctcgacgacattgcctttgagcagtggagctggaggaggcaacactgtttcaaaaaaaaaaaaaacgtgttgtgtgagaaatatccagaagccctattcgatcgggcaccaatcttgatgtccatccgacagttaggaatttgagtgcgatttggagacaaaacacgctggtgatgtatagcaaaaaccataaatagaggggtttaataaaatttaaaagaaataaaactgagataaaagaagggttttataaaattaaaaagagatttaaaagagagctcttaactttgcaaacaaaatttaggtccaaagtaaaagagattaaaagaaaacaaggctgctccaatggaaaatcgagaagagtgcaactaaaaacttttcgcaaaaaatttttcttgaaaaattgagtatgttacaatatgtttgggagaggaaagaaatactcagttgcagtaacatagcaaatgcaagttcatatcactacttctgcgctaccagaggtataaagatgaaatcattgatctttacaaattagagcacatagcacaggatgtccatgaacctgcaaatgcgatcatcaaaatgctgccatctactttgtaaagtttaaaaggaacactaatcaaaagctgagtcctgtcaaatttacaacactgaaatttacattgttatcgtcctcgacatgctgtttgctctggttgtgttgctaaatttgcttcttattcagtgcttgagtaaatttatcacaaacaatattctgtatcgttctataattctattggttttcatttctaacaacagaatctcatttcatgataagtgttgaagctcatgtgttttcccctgtctaggattgacttatttgtgctcattgttcgttaaaaataccatttacactggtgagttaacaaatttttatcctatgtatatcactcgcagtggagctttgattttttctattataaacagtgtatggcttcttctttttttctgttgatgtacttttagctttagtaaaatttccatctattgactcatgataatttgatatatgcgataactgcatcttactgttccaaaaaattgtaccaaactcgaaggactatagctttctcttggcccctgtttgcctctttttgctgaggctatgtggcagcaattatatgaactagatactggggcgcgcctattgcacgcctcctgtacgtttttgttttgagtgtgtttatacctttgtgtttagttcacttatgtaatatcacaatgctttggtcagtttagggccatctgttgtgctgacccttgtgaacgttgagtggagcaacgaatcgtggattagtctgttctaccctgctataaaattagtgaacctaaaattgcaaggttgataagcaaaccaacagacagttaaggtagcatgtacattattgcaaccatttcagcagtaagctcacaagcttgtggaataatgatcgacgaaaaggtacaacgcatgtagaaaataataaaatgtgtggtacctggtttcacggttgtacagttgtattactacaacattgaattgtatgatacatttgaattttatctaacttgctatgcaaattcaatagcatagagttggcttagattaaatagaaatgaatatactctatattagactgaagagagaagattaagctaattagaatttgaagatcccttagttgtactaacagggaatagtactgaattcaacaactaaattttctgaagtatcatagaagaatgaaggcatttatacatgctgatctatccagcttatgtttaaaaggggatagtaaactgctgctcagacacaagtgaataacacttcaataacagaagttagactcataggtcatgtatatgtatgaataaactaacgccaaccagtttacaaaacaaatttcagaccacactgtacagatgccacatagatcaatgaaagtggcattgcacaagtatcccaccttccaagcacaacccatgggaatgataatgcacagtgtgcttacggttgggatcatcaggcatgcactggcctcatctactaaacatgggcaaggcaaagagagacattacgagcttagcaatttgcgatgccaacacgttgtagcaggttgttcaagatagtaaaaattatacctccctttaaactcaaaaacagaaactttagtatatactccctccttcccaaattgatcatcatataatggaattcaaaatttatcaaattaatcatcacataaccgcatagacacggatttcatcggaatacaattaatgcagtatggaagaatatgtgcatgctaaggtgtaattagcacggtgttttaattgatgcatgcattgtaggagaatgtgtgcatggtgatatgatttaaattattgatgcataaacatatatgatgatcaatttaggaaggagggagtacaaagttaaccccacataacagcttacaaatatgagccgtaatatttggtttttgttttgcaaaatcacatgaatttataaataattagttggaactatagaccctgatgaacctatgcttccagctaaaggtttgatactatgttcaggattaattttcaatttctggtagaattgaatttgatgaataattagtttctcatgatcgctaataactttgagttaaacatacataatacagtgatagaataatttacagccaaatactaagttcagtaaccatatagaaagtttgaacatgcagacttagtaagtcaaatagctgcttaagatcttagattcctgagttgtttttatcatgtactcacatgtgctcacagaacaacttgatgcttggttgatcacagtagtatagcctcccatctgctgaccatggaaaaacaaatcaagttagacggaggttgatagtttatttgttgaagaagagtcaattcttcaggattgatcatctcgagtcctctgttgaggatggagatttcataataaataagtcttaaccaaacttgtttattccttttttcgaactatatttcgttcatatgatagaatatgtgtttaaataagttggatctttatggagtctttcccaataaatacttaaattcttttattcatatttctcggaagttcgaacagatccagcagtcaggaccccagaacggagcatggcagcagggaaatcctaattcattaggatagcgttggtcacaaacgaaaatattaatatcaaccaaacaaataaggggggagggttagggagggaaaataacattaaacaaacggaaaacaaaataaagacctcaacgtccaaacaacgaagcaatcagcaaatggattgagtgaaaaactgcaagaaatagcagcagacatatatttagtacaagtatactacttcacttgagagggaaaaaaatacgtgtgcggcaaggacaaccgatcccagagaagccgaacgatgaggagtaacatcgagctagcatcttatttctaggaccaaagaatgaaagagagggatatgaaacaagtaagccacaacagtgcacatagaagaagcaacataatagagacgtagcagctgtctccgattgtgtctaataattggcgccaccgaggtgaccgctaattaatatgcgtccatggtcagttgaaaataattagcatccatctagcacgatattgttttagatatcatagtatgtaaatgtatttgcaagaccggagccggccggaccagaaccaattcacacagcaagcaaacggacactaaacatgcaccaaaacaacaagaaggaagtaataaatgttgttggccaccggatggtgccaatgactgcatcagcccaagaatgcatccgcaaacaagcatcaattgggcaacatctttgtgacacacaaacataaaataaacaacactagcaaatcgacacgccattaaatcaagaggagataattttttttttgaaaaaacagagaaaaatgaacccaccgatcttagggaattttatgatttagaacaaggatattactccactcgagagggtaaaaaaataagcatagagcaaggacaactaatcacagtggagccgactgatgaggagtatgctgaagctagcatcttatttataggagccaagaatgagagaaagggcaagaactgaattgaatcctcgtgaatgaaacaagcaaccaacaattgagcacacataggaagcaacctaactgacgcgtgacttaggtcctgtttgtttcagtttaagattattgtaatctagattattaaatcagattactttaagctagattataataagctgacagagaataaactgtgagttgtttgtttctctggattattagaggtatctaagggtagtgggtctttagccactcaataatatggaaaaagctcatctagaagagattattgggttatactagtctagcttatagattataataatctacttgtttgttccagtttactcataataatctatattataataattctaagctgaatcaaacatagccttaataaggagccatctagacgacacgacacgtagcaaaacacagggggaatgaaacatgcacacccatatataacaactcttacagaaccaattttatttttaaaaagataatcaccgagttcatcattggtttataatcattttttttcatgtctatctttctactatttatttttttttggcagagaacacatttgatcctttcaacaattttaataactaatccaatttaaatctagtttccaaccacaaaccacttttgtttttgcataattcagactacccctgatttttttattttagcctactttttcgtatctcctctgttttcccagacagggctacgaatttcaaaccaacttgaaaccgtgtcgaccatccatatcataaaataaacaaatctatccactaacaatttgacatgatattaaatcaaaaggagagaaaacaactcgaaaaaacagggaataaggaaccccaccgatattagggaattttatgatttgcattggtgctgaggtcaaacccatacaacctttgtggttgcatctgacaggccgaatcctctccggatcccggtccatctccaccgtccattctctcccatcgctccacgctccctgcgcggctgcgcctcctctcctttcctctcctcgccgccaccgccggggcgccgccgccggcctagactcccccccccctctctctctccctctccctctctctcccatctcctctccggtcgagcgcgcgtgcggcctcccaatcccgacgccgccaccagcccaaacgcacacgcagacacctcgtccggctcggagactcagccccggctctcgcatcaggcggaggcgggtgttgcggagcttgatccgttgcttttggctattccgctcctcacccggtgccgggaaatcggcgagttgtcccccccttgttcttcttgctatccgggtccgtgtgatgaacggcggcaagaagttcggcggcggccgcccgccgacggggactccgtcgctggcctggtcttccgtcgtcgtggtcgtctccctgcttgctggagcgtccatcgtgcacaacatctacaagcccaacatggtatgccttttgtctacacctcctggccatgcgcgcaacctgtttgacgtaatgcctgctctgttctgctaccggcgtgctcattgtttctgctcttgtagaccattccaccggtggagagcacggatgggggcaagcagagctagacaagttcaaaggttcgtgctcagagtgttagaggtttcgtttctttctcggtatatgcatcctcttgtgagatgaggccgacggtagtcttattctgtcagaattttgagagccaaattaagcctgcagtattgctcgctaagtatttttttaacagactgctgcactgcattttatttattctagtacttggttaattggtgattgtctcccaaaacattatgatcccagtcttgaaggaatgcaactagagaaaggggatgaggcaattttatccattgctttatggaggagaatgcagttgtttgcttttcttttcaacgtgctcattaattcaatgtggaataagtccatttgactctagttggaaatataggacaaaaagttgaactgacaatcaacttggccaggctactggttcggtgatttaggcatttagctgcccgaccggcagttcatcggttcaaccagtggtttttatagatcaatattttatttgtttatattttatgttaaaaatacaagtaaatgttgctgaatattataattaatatatatctctataattctagagggaaaaaaagatgaatttctgataaaataatgaggcataaataaatatatattttttgccgggagagtatttaaatccagatctgataataaaagagaaaccaaacaaattgtttcaatgtaggcaatctcacagatgtacagatgaagcagctcctctgggcataggctcaagtacagccagtgtgcagccctaaccactgggagctttggacctaagcaaaccagtagtcatttcgacatatcggtagaagctgcggcacctcaccttggctgaaattaattttgacaaattgaccctttagaaaaaatatatgaaaaatggacctaggccagaacttattttaaaaatgatacatgaaactctgcctagcttggtgctgacctcccaatctcagcaccaggctcgttggagttgaactaggggacttaacgtcgagttcatttttaaaataggttttctgaaagagtcaaatttgtcaaaatttcggtcaccttggactgagaggtcacaaatgagtgaacggtgggagaggaaccgatgaggtccggaacctcgctggtcgtgctagctgcctcgctgtgacggccatcgcttgggacggtgatctaggccctgtttgggggagcttaagattatgagaatctgctagttggtatccagcttccgagaatctggagaagttaggtttttcagtttttgggttctagttcattttctggagaagctcggcatgtagcttgtcgtggcctcgccaagaagcctgtcaggtgtcagcaatcagcatcttaccagacaagcccatctccactctctacactatgacactctagagcagtgttttggggctctaaaggcaaaaggaaactctaggcaattggcacttatagccctaataactcaaactagatgttacacaaacgcagtcaaaatttacatgggggtaaacggtccgaacctttgtaccttttcaatattatccactgtgcaattagccaattctctggtaatgcatgtgtacattaaaaaacatgtttattcttgaaaaagatcggatggctatttactctgttggcagaactgagaggcatcaagcatgttgcttgctattttcatgaccagaacagggtctaaacatacctgagtaacctcgtttttttttatttcaagtacataaacaatatcgtttatttgcagaactggtaccttttcttccataagacaatggttattgtactcaaaaggttaattttgtagtttgaaatatcactttattaccttgtgaaactacgagaggtagaaccaatgcattattcaagatggcgacatggcgtacctctattaagctaaactgaatggaagttaacatctagagcaaccaaaaataataattatgcactgcaaaaactgttaaatggttcggtatgcagtatcaacagtaacaaggcaactgaatcgaaggactaaataatattgtacattgcatggattgttgggatggtgttacgaaccgactaccgagagagtagtttgggatttgtgggcagaacgagccaaggagaaggaagaacagaggaagaactcgagagagatagttcgggagaggagatagatttcagagatagttgttgtgattacaaattcaatgattctctcttctccccttcgatgcttatatatttgcatcgggtacagctggaactcccacccattcagagccagctaagcgaacatttgcctttgtcacgcgcgtggaacgcagcctctctctgacgggattatccgttgccggatggtgtacagtagccgtaacactcccccgttctttagagccggcttgtccccaagccggggcactgcgtcttcctaagtagcttcagctaggattgtcctgtccacctgaccaagagttgtttaaccgtgccagcgcctttcttggaaactcgccgcgccaaaacttgaactggaccaattgttcctgattggctagaggtacgaacaggatttgatggagttggaggcaatgccttgcggagctgtgacacatgtacaacaggatagatagcacaaccagtaggcaactccaattgatacgccacagtaccgactttgctcacaacctgaaaggggccaaagtaatgaaaagctaacttatgattagctcatgatgccaaggaagtttgcgcataaggttgagccttcaaaaacacccaatctccaacactgaaaccctgtcagagcgatgtatgtcatcttgccatttcatacgttgttgtgctcgcagcaaatgctaacgaagaaggcctgtaatcattcccttctcctgccgccattcctctagatctgaaactgcacaagtagctccatccaacgcaccgaaatgtcgtggaggatgaccatacaatacctcaaacggagatgtccccaaagctgagtgatgtgtagtgttgtaccagaattctgccaaagctagcctccgtgaccatttggaaggacaagcatggacaaagcatcgcaaaaaggtctcaaggcactggttgatatgctcagtttgcccatccgtatgtgggtgataagccgaactcattttcaactgagtatcagcaagccgaaatagttcagtccataatgtgctggtaaagatgcgatcacgatctgaaattattgcttggggcaatccatgaagcttgtagatattgttgagatataccagcgccacatccaaagctgtaaatggatgagctaaagccacaaaatgagcataacgactgaatttatccaccacaaccaaaattcagtcaaatgtagaagatttcggcaaaccttcaataaaatctgagagagaccgtttgccaagcatgatcaggcaccggtaatggttgtaattaacctggatacttcactcgttctgcctttgcttgagaacaaacagcacattcagtcacaaacgtatgcaccgctttcttcaatcccggccaagcaaacaaacgcttgattctgctgtatgtgacctgaattcctgaatggcctccaataacgctagaatgcaaagccatcagaattttatgctgcaattcagagtgaacacctatccaaattcgacccttgtaacgcaaaataccattcaccagagtataattgggatatttgtcaggtgccaacagtatctgcgcaagcaattgttgagtagcaacatccttttttttttgaaaggaacgacgacagaagacctgccggaatttaattaaggaaaaaaaggaaaagtttacaatcccagaaatgggatgtcaagtccaaagacagaagagaacaataagggggcctaaaggccgatcttctaaggtctagatcttccatgacaagatgggctacctgatttactgtacaggaatgattattgaaaattctcctatttctttctagccaaatattccactaagtagttaacagtgctcctctaacgtcctgcttttgatttgtcgatccatcttgatttacttggtcccaccaaatagagatgttcgccggctatagggtagggactaatagatttcgccaggaatgaacgagagtccaaacttcactgacaaacacagtcacagaaaagatgatttgtatcctcgaatgcagacgtgcaaagacaacaaatccagttgcacggccagtgacgccttagcaggttttgggctgttagggttttgtgatggaggatcaaccacccgaaggatcacatttttggctcagctggtgacttccatagggcatcgaaatccaatcgtgcaaaagatcctgcaaattgataggagtaagcttctttactagagtaaaccccagaaggattccagttccatgtaatttcatccggttgctgggagaagtttgatatcttgggtcattccccccaattgcactaggtcgtgcagctcttctactgtcgtgaattgtcgaaaagaaacaatccaattgtttgacgagatttcaacttggacacatcgttgctttagtttgtctaagcgaaaacagagaggggcaacatcctttggacataatccgttaagccagtgatcgttccggaaacttgttcttgccccatctcctaacgtgatcttagttgctgcttggaatagtctcttgtcagaatcgtcgcacggcagagtcattccggcccaaggtttatcagattatttccagttgaaccacaacaagcggaggcaaagggtcctcgagaatttctcgagatcggggatgccaagtcccccaagtgattttggtctgcacactgattgctaattaaccaagcagcttcctgggttggtgtggtcaggatcctctcccttccaaagaaaagatctcctaaaatgatcaatcctcttgaatacccattttggcgtttgtagaactgagagatgatgaattggcatcgaactgagaactgtcttaactaaagtttctcggcctgccgaagtgaaaaaatgtcctttccaggtggggagccttgcaccaattttttcaatcaagggaagaaaatcaatttttctcagtttacggaaatgaaggggtagaccgagataccgacaggggaaggactttgatcgtgccaggaaacatttgtagtagaggagcgaaatcaaagttgtcacacttgattgggtaaatttctgttttactgatgtttgtgtgcaaacctgatacttcagcggagaattttagtaaaagatttaaggcagtgaagctccgaagggtcgggtttggcaaaaaccgctacatcatcagcatataacgaacaacagaacctgttgcgattcccatccattggtggaagaatagatgcattttcggctgctttgatgatgtgatgaaaaggttccatagcaaggatgaacaacatcggagatagcgggtctccctaacgaaggcctctagcgtgaaagatttcttgaccaggcgagccgttaaggagaacccgagagaggatgttgcaaaaagattcgaaatccaatttagccaacgattaccgaaaccgaaatgccgaaggacatcaattaggtgcggccaacataccgtgtcaaaagctttggcaatatccactttgatgaacaaactttccttttttgttctgtgcagcatttgaaccatgttttggacgaaaaggaaattatcatggatcgctcttttacgaataaaagcactttgattatgtgaaaccatctcatttagcctcggggcaagacgatttgccaagaccttagtgattatctttgtgaagctgtgcacaaggcttatagggtgaaaatgttctgcgcctgaggcatcatctttcttcggtatcaggcaaacaaacgcagaattcaagtcctccagttgcaaaatattcatgttgaaaaaatatgatactgctgaaaggagatcctccttgataattccccaggccgccttgaagaaagccccaatgaaaccatccggacctggagccttttcggatggcatggcaaatattgtgtttttgagttcctcttctgagatatcttcttcaagctctgacaagtcgaaaatcgggaattgaaggtttgtccagtttataaccgaagatcttgggaagaaggttcccagcttctcatggaagaaacgaaacaaatcattttctttatcttgagccgagacagcaattcccgtaggggtttgaagagagtgaataaagttctttcttttccttgaattggcttttaagtggaaaaattttgaattgacatcaccttctttaatccatgttagtcttgatcactgtctgatcttgattttattgagaactgacaaacctaacacacgagatttcagattggaaagaagctgccgttcttcatcagataagattcttgattcctgagcaacatcaagctggaagattacttcagtggcgacagcaaattgtagcttaatatcacccacttgagagcggctccatctctttagatcacgagccaatatgcagagtttaagtctgaaaatggcaagtgggttggaggctaggatttgtctttgccaagagtcctgcacaacatctaggaaacctaggatttgtagccagaaagcttcaaaacagaattgcgggggttttgctcgactttcatttccaactagaaaaagaggcgcatggttagaacatgctgaggataaagggtacagatttgagccactaaacaaaacatcccagtcagttgagacaaaggctcgatctattttcgtttgcgtcagggcttcaccatcatcagtccaagtgaaacgtcgtcctgacaaatgaagttccttcacttggatcttatctaacagaccaccaaaacgttgcatcattcttctgtttaggcggtcgttgtttttgtccgaagatttatagatgagattgaaatccctaataatcatccaagccggcttcatagacggtctgagagcttcaatttcagcaagaaaatcaattttgtctccctcaagctgtggaccatacacaacagtaatggaccactgcaggttctcttcacgcatggtgatggtcgctgagacagaatactggccgagagagatgtcagagagagagaagaaattttcatcacaggctaacagtactccaccccttgtagagtaaccattctgaacttcttccacccaagaatgaatacaaacagataatgccgacaattgtagttccccaacatgattacagcaagataaagcatcagccgctttattctccaatccttttctatagaccaagcgataattcaatcccaatagttttgtcatcgcttgttgctgccactgagtagccaatcgctgatcaccaataattttgtcatcgctcgttgctaccactgtgtagccaaacgttgatcaccaagattaattaaactcctttgatccgtctgataacaaattccccaaactgcaaataagaacgccattgatcgactgctaaaagaattgccaagcactccttctcgtatgtggataacctgcgattacgaggccccagtgctttacttaaaaatgccaagggatgtccagcctgcaagagaactgcgccagtctcgatctcgaatgtcttagaaaaatccggtaatgcaagcaccggagctgaggtcagagctgctttgagtgcctcaaaggctgcctgatggtctgacgtccacacaaacactgaatgtttcttaagtaaaccagtcagtggacgcactgattgtaccaaaatgacgcacaaatttgcgataatatcacgctaatcccagaaaaccatgcacttccttgacattggttggtactgcccatcgctgcactgctaaaatattcttgggatcagtcgaaactctagcctcactaatgacatgccccaaataagttgagctggactgagaaaacaagcacttggtttaaccttcaactgatgactatccaatagctgaaacacatgtcgaagcaaagaaacatgctctgccagagtactgctgtagatcaaaatatcatcgatgaacacaagcacaccgtgacgaagtaaaggagccaaaatcatattcatcaatccttggaatatggccggtgctcctgttaacccataggacattacacgaaactcatagtggccattgtgagttttaaacgctgtgttttttgttcatcctctggcctcatttgaatatgatgatacctagcacacaaatcaaaacaggtgaaaataatggtgccggcaagcttgtccagtaattcatcaattattggcaaaggataacgacttttcacagtaatggcattaagatggcgataatcgatgcaaaagcgccatgtcagatccttcttaagaacaagcagcacttgagaagagaacgggctagagttgtgctgaataataccttgctgttgcatttcaaccacttgtcgttcaatttcacccttctgagcaggattatatctatagggtcgaaggttcacaggttttgccccaggtaataatggtatcgagtgctcaaactgttgagcaggaggcaatcctttaggctcatcaaagactgaacagaattcttgcagaagttcagagataggtgctggcaattctgtctgttctacagactcttctagtaaacacaactcaattacttgcatcattgaatcacgatgaaccattcctttaacttgacttgctgacactccagggcactgagaagtatcaccagtttaaacacaccagttgattctgatactgaaactgcaatgttttaccttgccaatccacttgcataggactgaatctttccagccaatccataccaataattacatcataagtacccagagataaaatctttagattagactgaaaagacacaccctgaacccatcatagacaatccacaaattcctgatcacactgcaagattccaccatcagctactttaaccttaactgtcggcattgtctgatagactccggttaactgattagctaaagtggcagagacaaaactatgggtgctccctgagtccaccaacatcagcacttcatgattctgaatcaatccctgaagtctcagagtatgaggagaatcaatgctgcctaacactgcctcccgagaaataacacaaagctcactgtcatgttcagaaacttcagctgactgctcaatctcaggttcagaagacccttcctccagtaaatcccagagctcctcaattacatgcaactgaactgtgggaccacatttatgttctcgattccatcgttcaccacaagtatgacataatcccttagctcgacgataggctcgaagtgccacaagttttgtcctccacaggtgcagctcgagggtcatcagggtgtcctgatgcaccaccgccttgccgagctattatttaccgcttaaaaaatatggtttaggatatggtatgacgactatccatctgaatccgctccgttttcacccctaattactggtatgccagctcgtatgccaccgcgagcaccaccagcaaatgccccacgacgcacttctcgttgattagtctccaaaacttcttcctgcaagcaagcaagcaagctaagtccagggcagtatccaaatcgggatgacaatgtaaaatcactacagatcttatttttgccttcaacccatctacgaactgagtaacaaagaacaccgaattccatgacgggtgatgtgcaccatcgatttaggtatttttttcaccatctcaattaccaactagaaaatttctacatggtaaaatttgtttgacctttaattactagaatgacaaaaaaaatatgcttgtacaaatctacataagtatattatcaactgagtacggaaaaactgagtacatatagccaaaaatactcaaaataattaagtttttacaccacttctcacgttattgtaccaaaatcatacccacctttcaagtagttgtaccattaagctgatttattaagtttttgttctaggttgcgcccacttggcaagttgttgtcctagcatgctcatttctcaagttcctacgctaaattgcaccaacttgctaagttctaagttgatgtaccatgaatgcaatttactcttatttaagaaaaggaaacatcgactttatagcaggtaaccttcatattcctctcagaaatagagagcaacattataagaaacatgttccatgctatcctttatagcaacactgacactgctgcaacctgcaagcacatgcgtcggttgtagcttttcaccttggaaaatactcaaaggttcatattgctacccttagaatatacttgtaggtgaaaagctacgaccgacatgtcttcagattagctccccgtctttaactattccatgtctcaagagagaggccatgatgcaaactctttataatcacactgttggtgtaaatattatgccttcaaactttgcattaaattgcttacagggacaaaccgttggcaccaataaggcaccaataaacaaaaccctccagagcccatctggtcctatcattgaaggttatgggattcttcacagagagctgatccaactcaatggtgtcgaggctatcctggacttccatgttttcgaagtctctgactttgatcttctcataggccatcccatagagaaacttctccttgatgcgccgcatatcggagtcctagacatcaaactcaggaaaatgacgtttttcgtcctgatattgcaataaaaaaaattctttgatggaacccattcccaattccgagccaattaaaaaagtgttggctatctctccttttgagtcccacgaatccctcttcgaagatgatgccagtgcattaggaggaggacgatcttggagaggtgatcgagttacacaaaactgatccaccttcatgacctccaattgagctcaaacctcttccttcaagcctttgctatgccttcttgcacggtgatacagagtcgcccgtcatcataagcgacaagcttttcgatgacaagaccttcaaactcacagctgtgttagaaaagcatcactatgttctaggctagtctcttcaagaccttaagtggatttgtttggccttttgtactcatcatgttcctttagatccttcttgtgcaccctctcgagagctgccatgaagactaaataatgtcatgagggaggtcgtgaaaaaagtggtcttgaaacttctacatgttgggataatttatcccctcctatatagtgagtgggtccaaaggggtgagacaagaagtccctttatctccattactttttaatttagcagtggaagccttaacaaccatgatccaaaggctgagagagagcagttaatacaagggttgggagctaatgctgatagtaacattgtaattcttcaatatgctgatgacacaattttcctgattcaggagaatctagattatgcaagaaatttaaaaaagtgctctgcatttttgagcagttatcaggtcttaaaattaatttcaacaaaagtgaggttttcttcatgggagaagcagcctgaaaacaaaacctatatagttagatctttacctgcaacattggggattttcccatgaggtatttgggctttccaattgaccagaagagactgttgaataaagattggaaacaggcagaagaaaaaattgaaaaaaataggatgctggcaaggaaaccttcagtcaattggggggagggtgactctaatcaatgcatgtcttagtaacaccccctatacatgttatccttctttagagtgcctattggggttagagagaaaatgaatttgtttagaagaagatttctgtggcaggaagatcaggggatcagaaaataccatttggttaattggaacagtttgttcccctagagaaacagggggcttgagcatcctagatttagaattcatgaatattgctttgttggggaagtggatttggaatcttgaaaatactgatggcttgtggcaacagatgatcagacaaaaatatttatccaaaaacatcttggctgccacagaattaagatcaggagcctctcacttctggcaagggataatggaagacctggaggataggatgaatgggaccttctttcttatcctgtgccgatgatagatgtttcttgcttggctcaatgtaatagatgttgggggacaattagaaaaaactagcttgtgcatcaggcatcctgtcattttgttttctgtttcttggtgagcaccagggggggtatcctcttaggttcaagactctgtttttgtaagaatctatacatttctttaatggaaattgagggctttgccctttgctcaaaaaaaatagtgagtgggtcaacctagtccagtttgtgcctaaaaagggagatatgacagtcgttgaaaacacgaaaaacgagttaaccccacaacgtactgtcacgagtaagagaatgtgcatagactacaaaaagctcaacaaggctactagaaaggaccacttcctgctgcccttcattgatgaaatgcttgagcggctggcaaatcactcattttttctatttccttgatggctattctggctatcatcaaattcccatccatcccgacggtcaaagcaagataacgttcacgtgtccttacggaatgtatgcttatcgacggatgtcattcgggctgtataacacacccacgtcattccaactgtgcatgatgtctattttttctgacatgttcgaggaaatcatgttagttttcatggacgacttttccgtcattggaaaaacctttgatcattgtctagaaaactcagtgtttgcctagaccatagtctggacggtctagaccgcatctagatgctagacgatgagttatcatctagtttaggacctaaaccgtgaattagaccgtttgaccgcctagacggtcaaagatggttctagactgtctagaccacacaattaaacaatgagacaagtgtagaccataaaactgttgtttagactattgtctaagtaatggaccaatgcatttttttgtggtaggaactaaaacttcatgtcccaaccaaggtccaattgtcttagggttttgacaccattccaaacccttctcctctgctctaaacttcacactgccatgaagtcgcgtcacctcttctctgctagttgccgctatggaccttgcttcctcctctctctggtccgcgaccctatgtgagtagttgcacctatcccagtgccaacagttctccaatattatatgaaatatgttaagtgtatttacatgtgtgccaaatatgatcatcatggctaaatatgtttacaatggacagtccttcatggaaaagtttcttttaggggcttggaatatttggaaataaaggaattgtttcattttttagaataggttacctttgttttcttcctggaagcaagtccttaaaggagacttccttcttatgttgtttcggctgaatgtgcatgatcaaagtcagggattggattcttttgctgtaattttctctttttttactttctttccttttattaataaagttttttttatagcggggccttcctgttgtgtacctttcttatgtgtgccaaagctaacatgcatgctgtgtatctttcttatgtgtgccaaagctaacatgcatgctgcaagcaagtagcaagttgctaactctaatcaacaaaacccaattgttcttagcagcggctaaaagtaaaagaagagggggagaacgaccataggaatgtgagggtcgtgctctaaccctaggacacgtccctaatggacccaacttgatacacagccgattgggtccaaataaggtgacgcaataccgtggacagaatagatatggacataaggacggatggatttgaaagtagacttgataagctttccataaagtacttgcatgcccaaatcggagttcacatgaagtcgtggcggtcgtcacaagttgacgctgttctgtagtccgaatccagcttccgcgaatcctctcccattttgatcctctctatcattcctaagtaaaacaagagtacatacgtctccagggtataaataatatgaacatgaactcaaaaatgaactcacctgatagttaactcaaaaatatgcaggcaggtcaatcttatatgcattttcattaatctttgccaacaatttaaatggtccatcagctctaggcatcattttagattttctcaagtcaggaaatctatcctttcttaaatgcaaccaaacaaaatctccatgttcaaaacttagctcccttctacctttgtcaccagcaagcttatatttagcattcatgcgctctatgttttctttagttgtttcatgtagttttcacatcaattcagcacgttgtttagcatcaaaatttagtttttcaaaagatggcaaaggcattaaatcataggagcatggggcaataacccataaacaatctcaaaagggcacatctttatagtagaatccagctaatgattataaacaaattcaatatgagacaaacattctttccatatcttaatatttttctttaaaacaacccttaacatagtatacaaggttcgattcacaacttcagtttgaccatcaatttggggataggtaataaaaaataaaagcttagtcctcaatttagcccactacgttctccaaaatggctaagatatttagtgtcacgatcagaaacaattatgtttggtacaccatgcaaacgaacaatttctcgaaagaacaaaacaacaatatgtgaagcatcattagctttatgaaatggtaagaaatgtgtcatttttgaaaatctatccacaataaaaacaaatgctatcacggcccctcttggtccgagacaatcccaaaaccaaatctattgaaatatcttcccaaggaacactaggaacaactagaggcatatacaaaccatgtggatttaagtgggacttagccttttgacatgtagtacagcgaccaataaatctctccacatctctcctcatctttggccaaaagaaatgaccaacaagtatgtcctccgtctttttgatccaaaatgccccaatcaactcacctccgagcgctttcaacgataacaacaaaggaacagagctggctagaatgcatagcttgttagctctaaaaacaaacccatcgttgaagacaaatttgttccatgtatttccatccttacaatgcagcaatacatctttaaaattatcatcatacatatattggtctttaattgtttctaagctagagattttgtagtcaagttgtgttaacaaagtatatctcctagacaatgcatcaacaatggtattatccttccctttcttttgtttgataacataaggaaaagattcaatgaattcaacccatttagtatgtctgcagttcagtttgccttgactacgaatatgcttcaaagattcatggtcagaatgtatgacaaattccttgggccacaaataatgttgccatgtttataaagttcgcacaagagcatacaattctttatcataagtagaataattcagaacagactcactcaatttttcactgaaatatgcaacaggttttccctcttgaaacaaaacatcacccaatccaatcccactagcatcacattcaagttcaaaagtcttataaaaatctggaagttggaggagaggtgcatgtgtcaacttatctttcaacatgttgaaggtgttctcttgtgtggtgccccaagtgaaaagcacaccgttcttagtaaactcattcaatggagcaacaatggtgctgaaatccttcacaaagcggcggtaaaatctagcaaggcctaaaaacttcacacttgtgtgatagtcttcgggacatgccatccttgtatagcttctaccttaacttgatcaacctcaattccctacggagtgactttatagccaagaaaataagctctatctgtgcaaaaggttcacttctcaaggttaccaaataaacgtgcatcacgaagagcattaaaaacaacacggaaatgatcaagatgttcacccatagacttgctgtaaatcaatatatcatcaaagtatatcaccataaatttaccaatgaaagcacacaaaacctcattcatcaatctcatgaaagtatcaggtgcattatttaatccaaagggcatgactaaccactcatataacccaaacttagttttgaaagcagttttccattcatcccctagtttcatgcgaatgtggtggtatccactacgcaaatcaactttcgaaaacacaacaacagcactcaactcatcaagcataccatccagacgtggaatagggtgacaatatcgaatggtgatatcgttaatagctccacaatcaacacacatacgccatgatccatatttcttaggcactagaattaccggaagagcacaaggactaagagactcacgtacataacctttatagagtagtttttgcacttcgcattaaatctccttagtttcttccggattcgtcttatatggcgcacggttgggcaatgaagcaccagggatgaggtcaatctggtgctcaatccctcaaagtggtggcagccccggtggtaacgcacttggaaaaatattagagttctcctagcagcaggaggaggcaaataatattgcatatcgtgaagtaaaatcagagcatccttgcataccaaagcataagcaacaaaggtgatgcaatcaattcattaatatcagatatagtagcaagtaagcattttcctttcaaaatgatctcatttttcttatcagcaacagattgggcatttttattattctcacttttggatttggcagctttagcaacatcaacatagaccgacagattgccaaggtctatgttgatatttcttaacgacataactagtaatataattcctagcaatggcgcctgaaacattattcggtatttcttatggttacagatgtaaatccgcaagcgcacagatatacgttgtagcatttcacctgggagtattccaaggtatcgtatttctttaatcccaagggaagatatggtaagagaatactttgttattaatacgcatcacacttatgtagatcaaagtctataaggtaaatggtaggttgacacacagaaggaacaatataagaatactctcactaaataataaatctaggctacatggagaggagtaaagaaaagcctcatttccatacttctagtatataatcattttagtatacacttgctagtgtacaactatatggctataactccctaactatgccctcttagtatatcgagaaaccacccttgattgtcgagttctttacgacaatccggcatgaccatccaaccagttatagataaggagtacctgcaccaggaaccttacttagccctatatacgcacgtggaggaatacccatactgggctgtcaccaccagcggcctatctttacagtttcgtggcatatagtaccacttcatgatattcaataatctaagcaccgcgcttacattactaaatattactctatatctctgcagatgacataaagcaatcatacgaatgaacactaagccaataccactacatatctccagtaagctagccatataactaatactaagcaagtataaaccaaaggtggtactcgaataatggtgcaaataaagtaaaggaccaaaactatataaagaagaatatttcattatagaataaagtcttacaagagggatagaagctactagaaccatatctgaattctccggaagacttgaagaactcaagagctattctatttctaactccactagcacttgaacaaaatataaaccactaaggagatcttcttctttttattccttcttggtgtgttgtgaatgaaggagaagaggagtatttatagggcgaggttgcttggaaggatagagatgctccatggaatccaaagggcatatttcttcccctcttgtcaaatgtcctcctaatgatggttggagcgcaggaaatggtaacaaccatcattggaggtcggtaattaccaacctggagaatttctgggccaactgggctgggcctcggtcggccgagtttcattgggtttgtgtgcccttccgtacatttattcgccacttgttaacctctggctgattgaacgggtgttttccaccatttctcctccatttatatggtgatctcctgtaagcaaatataatgccaagtataagtggtcagctgcaagcaaagcaagtgtatcttcatcgaaatcactagccgacgaatactcgccatctttttttaccaccaaaacatgcttgctagggcagtcacatatgcttgttgcttgtgaacacatatctataggaacacatgttatctaaataattgataaatgagagattacctggtaaaacaaacctttgctcttctctgttgagtccttgggaaattttatgaaagaaaatgtggtgtaactttacatactccgaatcgatgctatattcctaccaaaactatatgtcgatcatattgataaaccttatacatatgatgcttgttattactttgagtttggtcaaattgttgtgacccttgttagattcttttcatacattcatgatcaagatctcacacacacaaacacaggattttgctcaccctctacaccaaaccagaggttagtaaaaatatttcttctaccaattatgctatacttctcactggaagccagtatacatcatccacccattaaataagggttaattggatccatgccattataacttttgcggttttgaaatatgccattgatatttgtctatttgaaaccatgccaatataatttcacacctatctattatatgccattgcttacccattcagcacattttctaaacttataggaccaaattgtccctgccttcttcctcatcctcttcctctctatcctgttcatcttccatctccttctcttgctaaggtcgaggtgtggggaagtgagaaagggaggaagacgagagaacctgacatgtgggcccatagatgttttaaataaaagttggttgactggactgtcacgtgtatgccacgtaggaccaaaattgcactggattaagttagggaggtaattatttcggcataaaaagtttagggtgtaaaatatctgattttgtagttttaggggataaatcggaccgacacaatagttcaggggtaattcagactttttcctaaaaataagtaacaatatgttcacaaattattgttattagagatcatgataccttcaggcacctcactcattgcttgcacacatagcatgtatttgttttgggggaccaagtgggaaggattagacttatctatatttttagtacgagatggtcgcatccatatgggatggatgcatccgtttggtatgagggatgtaatggtcttaaaaactttttaagaaatggcccacacatcattgagaaagaaaagtaggtgggatttgtccgccagtttttgagggtacaaggttaaagtgaatcttagaaaagtattcttttttaggaacatctcatcccactgtctcaaaccaaacaccttaaaaaataggttcaacctaatccgaatccatccaatcccttgaacacatatagtggattctccgtgcacaagttaggaacatctacatctatataggatacttcatgagatttcctcacatggcaccttttccacatgatccaagagtcctgcagtacctctgctgcctgctggtgggcagtcaacatcaacattgctgaattatgacttgactgcaggtcatttgccaaggccatgggtgggtgagaatgtaaacacaccataagagtggtttggaatataggaatgactagtattttaacacaatttgtaacactagaactataataaataacttataaaataaagggagtactgttcggccggcttaaaataatatataagagtgtcgtttgcaatgccatcgatcaaggagagattttagtgctttccagcctgcctaatctacagctttgagatgtggaaaagcacaaccaggaatcatgttccgaaggctgatttgtgagcatgatcactcagggctcaatcgtgagatcagatcagatcagaagcatataatgtcgatcgtctgatctgggtgctgctttgcacaaccaagtccaaccaccgagctagcaagcatggggctggtgacaggggcgatggggagcctgctcccaaagatggggaagcatataatgtcgatcgtctgatctgggtgctgctttgcacaaccaagtccaaccgccgagctagcaagcatggggctggtaacaggggcgatggggagcctgctcccaaagatggttcagctgctcaaggaggagtacaacctgcagataggtgtgaggaagaagatcgagtctctcttgcgggagctcgacagtgtatacgcggtccttcgagttgttggcgaggtgccaccagagtagctcgatgtgctagtcaagctctgggcgcgcgatctcagagaggcatcctatgaaatggaggacatcgtcgacatctttcttgtacatgttgagtccatggaacctgccagcccacacatgctccggcgcctcagaaagaagattggcaaattgttcaagaaagtcaaggttcgccgcaagatcgctggagccatccaagacatcgataagaagctcaaggaggtggctgcaaggtgtggacggtatacggtagatgacattgtcgtcgcaaaacctgagtaccaagcaaccatcgatcctcgactcctgaatctattcagaatggccacagagcttgttggaattgatgggccaatggatgagctcattgagatgttggcccttggggatgatattcatccatctatgaacaaaccaaaggttgtttctatctttggatttggaggtctagggaagacaacccttgccaaagcagtctacaacaagtttaaaccggggtttgattctggagcttttgtgccgattggtcagcatcctgacatgaagaaagtccttagggatattctcattgatcttgacaagcaaaggtacatgcattcgattatgatgttgctggatgaaaggcagctcatgaatgaactccaggaattcatccagaagaagaggtatgtctttcgtcttggcagctgtaccacatatattttttgaagtgctttaatttacggtggactctattagtagtatcaccagtacaaattaaacgatgttagccgttaatttttatattctactaccagtatttgagatgcaagtataaatagatacaaaccgctagattagaaagaaaaatactttacataccaccaatagagaccccataaatagcatatactttttatataccactttatgcagctatgcgcacttcgaccggcgattgtaccacatatattgctcttagtgttaaagctaatattaaccattaatatgatatcaaatccaaaattccggtggcaaaaccattagcaaaaatatcatgtaaaccattttatagtgcttcaggtataagatgccctagggcgtctttgtaaaaggaaaaaaaaactaaagctgttgatcaaagtattctcaaccattatacatataaaactcaactccttgttcttctctgattcagtagctcacctttgcatgtgttaaattcagaaatatacgcaaaccttgtgagagtgtagtcggcaacggaagtcaagtatgatattgagctccccgcctatacattggcaatttcttgaatggtcccatacatgatagtgagcagtactccagctctccaaatctatacttaggatataggactagcaaaaattcaaatcacaagtttaagtactgccaagtggtctattattcttatgatcctgccatcccttgtatgctttgtctcctcttgagtccatgtagagttgattccatctccaatagtagtagttaattttaattcctataacccccaggtgtgaagtgacgctaggcctaacacaactcgtggataggccacaccaacaaccttttgcttccatcgtcgttttgtggaaaaagtttgaaccggagttattaaacattaggaatctcccggcgaaaaaaacattagaaatcaaatcagtccaactctcatatatacaactgttagtgtggtactaaacttgggatgctatatggttccatttgcaatataaatcagtaaatcacatgtgtatatttggttgcccttaaaactctaggctggactatatgatcgaaccatccaggatgactactttggtcttgctgagtggatatagtggacttgtttggtaggtcgcattgtttggatatgtatataaaacagttgagagcagcagcagcagcagcagcagcagcaccaataataataataggctataagcaatgtggagaagatagaaaaaaaagaggagtgttgcctcttgtgcaagagctagatttacacgtgcttgaaatgcattaaataatataagtgagagaaagagacctaaacaaaaaaaaatgaaggcagccttatagctaatgcttcaatatggccatataggcatagctagtaattagctctgtgattaaacttggagatggtatttggttagttgcatggtcagtaggatcatttgtctggctgagttatcatgatggtcctttcgctttatcatagtttttcatcaataatcacatttaatcttttaggataaagagatagcttaatttattaatgacgaaaatactgattacttttctagttattagataagtccacaattcttacataagcacacaacatccactccacacaaggccttacactcatggtccattgggcaaagagtacttgctaacaacagaaagtcctttacagtctgtgataataattcataaaatatttgtggatgaaagtggggagcgagatttagagagcccactgaagtgcgcagtgaaaatagggagtcggtttggaaaggtggctccctattcccattggagatactctatccttgaatttaacaacaaatgaagcaaggtgattaaaagctacagtggtaaaacatggtcatctttgattgcaatttaagttaacccagtggttatatattggtgctatcaaactaaaagtgtgatctttcggtgctacataactagttttgctaattaaatataccatatctgtttgatacatgtttctgattcctagcacgactgttcttcatccttccatgttatgtgtaaatataagaataaacactaatgttttttttttttttgctgtttgacagtttttcatattgatgtgcttctttcttttgtatgttcgtcaattaattttagtcactaacttgttttcactgtcgtgtgggtatatatacaggtgttttatcattattgatgacatatgggataaaaaatcatgggagttaatcagatgtgttctgcaaaatagtaattgcggaagtagagtagtcgcaactactcacatttttgaagttgcagcatatgtcagtgacgtttacaaaatgaaagtgacgtttacaaaatgaagccactttcacatgaagactccaaaaagttattgtatacgagaatagttggtggtgaagataagtgtttggatagtgatccatcagttgatgcatgtgagaaaattttgaagaaatgttgcggtgttccattagctatcattacaatggctagtttgttagccaataaaccaatggaggactggcccgtagtatacaaatctattgtctggggcatggaggcaatgacaatgtagataatactagaaatatattatctttgagctattatgatctacctttgcatctgaaaccttgcttattgtatctaagtatatttccagaggattactatattgagaaaaatatgttaatatggaaatggataaccgagggtttcgtacacgaagagaaagcagctgggatagggttatttgaactcggcgagggatacttcaacgagttgattaacagaagcttgatcctgccagctgaggctgaagacaaagggtacatagatggttgccatgttcatgatatggtgcttgatctagtccgtttgttgtcagctgaagaaaactttgtcactgtattggatggcaatgaggaactggtacttctatcgagaaattcccgcagactagctctgcagtgtaagagttctgagccaaacgttgaatgtcccctgttagctaataagggtgtggagcaactgaggtcctttgttgtgactgagtgctgtgatataagcatggcatccacaggctctcatgttatacgtgtattggctctacaaaattgccttattctggaccattgcagtaaacacagtctgcagcatgtttggagtttacttcacctgaggtaccttggactacagtacattgattctattgagatccctgaggatgtaggacatctgaagtttctacaagtacttgatctgttgggaactcaaataaaagagctgccagagtcaatgggcctgctgacaaagctggtgtgtctacgtgccaataggatttacaaggtatcagctggtttgattggagagctgacctctcttgaagagatatggatagaggctgaaaatgatgacagaatacagtttatgaaggcactaggcaagctgagtaaactaagggtgctgtggattaggctttctacttacgaaccagatgagaggccgaacagagatttgttggattgcctacacaatctgcacagcatccagactgtggatatttatgcctcatccggaaagaagagcgtaatgtgggaagaagggcacgcttcccctcaatgcctccggcacttgtgcttgcaaaccttgaaattctgcaggtttccgatgtggttgaactcatcatttcttccaaacctctgttatctagaattgcaggtgatggctttgaaggaacaggacatagaaacacttggaaggttaccagagctcaactacctcaaactggattccaattacactgcgacaataagcatgggggggacatctggtgatgtttactttcagaaattgagaatttttaaggcaccccgttcactcgtgtggtttgatctacataacatcatttgcaacgagaaggctattatgccaagcctcgaatcccttaagttcactgtccatgtacggttcctaaaagataccaacctactttgtttcgagaaccaacttggtttcaggaaccttggaagaacatcgcttcaaagagttgaagctgacatctattgtgctggtgctcataccaaagaggtggaggaagcggaggcggcactggcgcaagctgccgccgtccatcccaaccatcctacacttaaaatagtaagaatatctgaggataggttgctctcaccttacaaagaggtatgtgcacacaaacttctcctcctccactaatctagctaagctagaacgagcttgttttagtccaatccaatgtgttttaatatgtttgaggacattctcaccccaattcttttaagatccactcctcctccactaatctaactagaacgggcttgtttctcttggctttaataagggtccaatgataataatagccacctcaaacacctataactcatgacgatgatgtgacacatgtttcaagcactaaatattccaattttatacttcatcaagaaaacataaacatcattgcatgtcaggggtggagctagagtattgaggggggtgcccagtaacccgatcaaaaaaaatttgtagctatacctgacctcttttcaccatgtgtgtaccccccccccctcaatacaaatttagacaccctagcttaaacttgatataaagcaaagtaaattaaataagtggcacccccctacatctcgctctaactccgcccctttgcatcaggacgcactaatgttcataagcttaaacaaagtgctgcaaccattgcagttgtcggttgctaataagctcctcttaatctcatataactctagccggccacgattgatagtgaggaataatagctcttctgttgtggatagagatcaccggccacgatatgaatgagtaaagcataatacagttgacaccttttacaatgatgtgtaaaatgtgtggcattaagtgaaaagtggtaatagcattgctttattgtgcaactttagtctatatagattatacatagttcaaaatgatatctaatctttatttaatgccatttctagttcgaaggcctcattataggtttaacattggggcctttaatttgtagatatagttttatgttaaggcttctttatcaaattaagctagtgtattgtgtatgttaacttttatttgatagctagtagaagatgttgataagattgaatgtagcaatcacctctctattaaagagttaaatgggtcgttggtatcacaacttgcaagacgtgtgcaatttagtcatttatcttataaattgctcaaattgatcactcaatttgtttgggagtgcaaatctagtcaaaacagcagccactcatattgtttatgccgagttggacgctgcgttggcaaacatggcaatgagttagcgaaagcaatatatattttgtagaaaaaccgttctactcttcattctcttcgctaatttagttagtatatttagatcgatttgttatgctcatgtgctatgccacgatcttaagtttgatggcatgtctgaccgaacggtgctggatctagcgagtcacaatcatcaacgcttgccacaaccgcaagggctctgtttgttgtcatctttgttgctttcatagtctaggaagctaacgtggcattcaccttgacataaataatacgcatggcatatttttttatagatttgtatcctaaataaattgagtaatcaatttgatcgatatataagatgactgactaaatttcatctagctcacaagttgtgatacctacggcatattttactcattattaaatctactgttgatacttaccagttcattcgttcgtaatttctcatttcgcagcccgatagaaacatcacttataaaactgctttcaaaaatgtcaaagcgcgggtggtgaaggatgatgttggttactttgacttccactggctgctgcataatccaaacatcagaaaattcgaggtctacatcgactgtgaggatgctacgcttgaggaagtggaggaagcagaggcagctgcgtggtgtgcagccaatgaccatcccaacagacccgcccttgaaatcataagacgtgatgaagataagatgatgctgtttgacatacatcaagaggtatatctcttctctgcgaagtctgataacaaagccattcggtgaatttaagcctcttcttagcgcaagtttaataatatagtcaaccactaacgtcaaatcacttgtaatcaatttaagttttaatagcatagccgactactagctttaaatcatctatattcaatctaatagccaatcttggaatctgcgttaccattgactatatggatctatagcccacttcttctctctctaggcactagccggacggttacccccggtctagagtctagccagtctatacgatacgccatacttatactaccggcatattttttttacatatatgtaaatacacttagcaagtcaaaagttctagagaatatttgagagcaacaaaagatggtatttaatgtttaccttattttgcaagaatgaatcttcaattagcttcaaattcaaaccttgcacatcctcaaactcatcctaacattttaaattgtgttcccgaaacaagaaaatgtcacatgttactaactttgtattgcgggtggtgtggttgtggcggttgttggtggaatgggggaaaaatgagatttactccatccaaaccctaacctaaaccatctgagccttggcgggccagaaaatttgagctcctgcacgtcaaatgttttgggtccatcgcctagaccatggtctacacgtcatttttttggtctagactcagctaggcgtggtctaattacttggtctagacgatcttcgaccgtttttgactgtctagacaagaaaatggtctagagcacagtttaggccctaaacgagacgaaaacctgtagtagtctcgcgtctagacgtggtctagacggtctagaccatggtctaggctttatttgaccaatgggagaaagagaaagatcgttcctacagcttttggttgagaagaaccaactgagaaatgccccgaaatctagcctcccacacacgaaatcacccccatgtggatcgatattaaccgtgctttgaggtctctacccgctacacgagagctcatcctcaacaggtcaattcttaacacgtgtttttatgagggaccagtgaccgactatttttaaccaagcctcaattcacctacatgaggagtcgaaccagaacctaaaggcacaacttaagcttgaaatatcagacaaaagttgaagaaattatggtaatttttcgctaaattcaagaaaaaatgagcattttgaccagaagaaactcctacatgtccaccggtaagcccgatatcagaaattccaaaccaaaattgtaaaccttgtatacacatcgcatataggtatttaaacatatattgatgttcaagtttttaagtttgacttgaaacttatcccaaatggcatgttctcatgatcgggtggaatagtttacgtacaagataacacacgtacgcaattctagctttattcttcttttcatctatatattcatggtgtttcttcgtgtaaatcttatattgattttctcattctcagcctgaagttgttcatcgtgatgtcaatgtgcgcaagacaaaggattctcttggctgtattggaatctatatattcagaagttcagcgtctcgatcaactatgagaatgctagtcttgaagaggtggaggaggcagaggcagctgcaagatatgcagtcgacgtccatcttaaccgtccaacactagaactaaagagatacggtgaaaaaaagatggcgttatctgaccaagaccaaacagagcagaagccttgtaccactctgtaatatctacacggttaaggacagtctatagattttaactggatattggcaaggggtatttaaattagaattggccattaacttttaatatcatgttgaatcactagttttattaaaaaaatagagtaagtatgaaaaatataagttagacttaaagttttcttaaatgataaaacaaatcataataaaataaataatactatattataccatctattaaaatatggtggaagtaaaggatgcgagtccctaacaaacgagattcacactcataagacaacacgttaaagcctcgtcggaagagacattatacttgaacccagggtgctcctgccaccacgcttcgtctaagtacactgaaatattttcatgggccaatttaccattccaggtgaaaatcgtctcacttgatatctggggtgacactttttagtacataccaaaacatacaaattcttaattggatgtgcatattaataaaatgcatttcttttgtgtgctaatttattatgtgtgtttctggatttttcttgtatggcatatttgtgttatggcaacaagcaacgttgcataacaatgatcacatgttatatcaattcatccatttaatttaattccaacttcatattcaacaaacgaagggtcggcagaatagagctcagcagatacggatcaattctcgactggagtcaatcggaaaatatcatacctttgattcaaaggatgaacaaacatgatgctttgtatcaagtgcgtagttaataggctgttgtattagtgggagcgtgttttcccatgttcaaaagcaagaacatgaaagctaaggaacgacaaattgttgtttactacacatcttatcatgaccgatttcatcggtagaatgtcatcttacagagactacatatacaaactctggtgtcaagcagaataatggaagaaaaggtgcactgaggttatatctttgatgttgcgtctttgatctcctccaaggttatagcctgcaatatgcatagagtatatataaggaaaaataaaattactttgaggaatttgtagaaatgacgttcatgcaatgacaacggagagctagatggtatctgtgaagaaaacattgtgaaaaaggagcatgcctggtcttgtccagcaaagtcattgtcgggggtaagaaaaagcatgcaatggcattccttcctgcaaaagttgatcaaccaattgaaaacagatgggtccaacagctcatcatattcattatttcatttatatctatgtccattataacaaaaaaataagggccagaagagactatgttcctaagtcatcggtatatatgtaggacacatggtttcaaaagtcatgatgatattactgaggaacgtctttatcaaaacatctatgcttctcactttgggcaatcagcaataatctacagcagattcgtttgtgctctcttagaaatgcatatgcctccacaaatactatgaaatcggaacaaagaaacagtgaaacctcaccatgttccgcgcctataactaaaccacaaatagcatcacaacattatttatgcactatcatagttgttaaaacaagagttataaagaactggacctctcacgcatgggaacacaagggcagttccaaaatccttgtgctacctcagcagctttgtcatcataatgcctgatttaaatttacaccgtgaaaagcaggaacagtaagtaactgtcgtaatcaacccgaagaagaattagagagtggacacagcacgtaagataaattacctacaagggcatagaggagctccaagttgatccttgtgatcagcaagtccctgcaaaaatatttttagttgctattcagaatcaagaagacacagaaggcaatccttaattttatactttttaccaagaaagggctggaacaatgacaacagtccacagtttatattaaaataaaaacaagatgacttctctcctgtgattaaaccagagtagaggagctgattgtcaagctgatggagttttatcagttggtatcaaggaatggccccagtggttccaagagttagctaaagggattgtgaatagtggtagattgtgattcccttttattatcatttgcgctcatttaccatgtcctttatacattggcttgctggtttacaacattgatggatcatttgttcccctcaattgacactatggccacaatgcaagagcttaatcatgccctctaagcattcaccagtttactaaccccttggagtgtcactgacaagaaaatcctacataacactcataacttttttgaccttctcgcccatacccaaacactgtctgatgatcggctgtgtctttgaccaagttacaggtatgatttccatggtcaacacacaactacttagtcttgttagtgactcagtgtccgcaatgtaccaaatcagtcactgcaatgaaagcgaaaagaaattatgtgccaacggataacaacagttcaagaatatcaaggtctcagtccacagagaggcacatgaggcaataaatcaatgtaatattgttttctcgatgctagctgtatgagattagaagaaaagctctaatgtgagaacaaatttcctttttggttaaccttgatacatcttagcaaaatatgacttaaatactccattgagattgtaggcaaatcaaaagtaacaggtacatgaggactcctagtctagacaaaaactacatggtcataaaactcattctagtaatactcataggatcccaccagaacagatcccaggtatgaccttaatcatccaatagcccaaatactatgcagaaaagttaaaacacgatttttgagttacatatgatcctacaatacgaactgtcaactcaaaaggcataaagagatccactatgcaaccaacaaaaagattatccatgatttaaaatgcatgtatacccacctccaacaactcaaccaaccatatcatctattcgtatatagaccttgtatcatagcaatcgccttgatctgttttctactcacggatttgtcaccatctgaggtaattattcctcgctgcttgagatccacgatttcggactatcaattggagtactcttttcttactcatgtttgggcaattgttgatttcttctcctttggcagttatcagaggaaataccatttgctattatttatgtctctattctagcaatgtaatttaacagggagatgctgtcaaactttacctgggaatggtaaactattttgagatttgggcacttagacaatgcagtaatatgattgattatctagaggatggggctcaaatatatgccttttattatgttggacttgggttttctattttttttcatgaagagattgctgtgaatacactcttcatatacattttagttcagtaatcagcattcagctggcatgcttcactgtttctgctctagttgtttcatatcccaaacagcactgggaaagaaatacatgttgcattcaaagttccttttgtgctctgaaaatctcaggcagtacgcagcactcaccttctacatcaatgcaacctaggatacttaaaactgtgtgttaacttagcgtgttgaaccaatgaggtgtatggaaggccttgctaaccaatggaaaatcaggggcatactggcaggttctcttctacctaagattgaagcctactgcatcaactttcaacagcagcaatagggcgtaataatcttcttatcaagctgcaggtacagaacacatgaaatagcagcatagaagaatttgtttgtggctaagatgatttttgctagtatttgatttgtatgtgcacgcagtgagatttttttaaaagtaaagtttaacgaggattcaagagagaagtagaaaatagatttggttccattaccttgataacaacggcggtgacggacttctcggaacagaagaaggtgttggagcggcgggcgtactgctcagagaatttgcgcataatctcgagcgacttatcagatgcatccgctccggcagctccagctgtgtacccccaaattaagcaaaagaaatcagaaatcgatcagattacagagtactgcatagattgagtagacggataccttgaactcgaactgtgcatttgcgtcctctgggcatgggtgaagggcaaaaggggctggcggtggtggaggccatcgacatcattgctggacagcagcccaccgatctgcgagatgacaaaggtgtatgttgtaaaaaactaatgttgctcattgatcactcttaagaaacatcttgtagttgcaaaaattatgtgggttatacataccctttctaatactactgggttgcgatgtaattatactaatggtatgtttagatgtaatgatcctcaacacctcttcaaaagggaacctaaattaaaaacttggggaggcgcagcgctgacgatgaccaacacgataacatcacctcacctcccaacacgatagcaactagcaagcaggtacgatggagcgccatccctaactaaatcaaaccccccgacagaaatagatcgagaaaaaaacatagggaggaagaggagagcacatgtgcatacataccctgcttctcggattgggaggggctgaaagggagtgaggagaactcctcgtcggcacgcgcgcgcggcggacgaggggggcgggcggtggcggcggcggcggcggcggcacgcgcgggagggagggagcgagagagagagagacagaggaggatggggaatgaaaggaggaggggcgtgagaggagaggagagccggtaaactgggagtggtggagactggagacgtggtggagtgtttgcctttttcgcgagaacgacctcgttctctcacgtttttagatcatagtcttgcgaaacttgatttgtccttatattttcggaaagtataggggtgttttgaataaacttctctgatgatgaagggtttttttttttttttgcaaaagttgaacatcggtttaggcatgttcactttgatgccaaaaaaatattaaattttggtaacttgccaaaattttagcaggatttcttatatagttatcaaaatttggcagcaaactaaatgtaaccactttttttttggtaactttactaaaacttggtaaggttaaaaatgacatcaaagtgaacaggcccttagttggggaaaatttttgggtttggttgtcacataagatatacagacacacatttaaagtattaaacgtaatctaataataaaacaaattaaagatttcatcaggaaactgcgagacgaatttattaagcctaattaatccgtcattagcaaatgttactgtagcaccacattgtcaaatcatgccgcaattagatttaaaagattcgtctcgcaatttatatgcaattctgtgtaattaggttttttttcctacatttaatactccatgcatgtgttcaaacattcaatgtgacagctgtttacacccaaatttagcacctatgtaacgccccgatttttgttcgggattaaaaatcattaaataatgtattttctagaaattaaataaaatttaaagcaatttaatcaagtgaattattgagggaattaaaaatttcctttaaaaattattggccgagaatattttgtaatattctttgtgccttaaaatactctctgaaatttcccgcgaattttcggagctcgagaaataatttgaatagtacaaagttcatttaaccaattaaataaaatgaaaaacaaattaaaaacctcctctctcccttttgggccactcccggcccaatccccctttctctcccggggcccgcgcgcctttctcccttcctccccggcctcccctctcctctcttgggccgtcggcccgtttccccttcccctcgcgcaaagt

SEQ ID NO: 7240 - DNA, 30718 bp, Oryza sativa
aatacagttgagttccaaacttccagtagagctacatcacaaaaaagtcagcttgcttaaggatttcacaaatgcaaatactgactagggttcaaatattttataaataacctgagggattatatgctgcatcgcccattctggaccaaactcctcagctaggcgcttcaagttgtttgcagcagcatctctgattgagaagacctaaaattaaagatccagttaaaaacatcttaaatagcaggttataaataccacttgtccattctgcattaaaaaaaaactatataatcactgaacacaaaagcatgatatagtttctatgaactaaatgaacaataacaaaacttgtctttcagaacaatgacaaacctattttagtaagtcataaatgtcggagatattcaaatgtgtgcctactgacgtttgcaactaccataattgtcacagcatttttcgttagtagcgaaaaatatcggtgtgcccaaattttctgttaatagtttgagaaaaaatattggacatgtctgaatgttagtctttcaggctgtattgtgctggactgctggtgccacaatagaagtgaattcaggtcatttgcttgcaaaaaacagttgctacactcacgtatgttgataatattagagtgcctttgtgcacaatatatagatgatcgagagacttagaatgacagcctggtaaataccttatcttccaaccattgcatgcaaagtgcccccagcttgtcatcgaaaaatccaacgcctaattgactagccaataaaggaatgtactcaattattgcaagccgaaccctccagtgcctatcctctgcaagttctacgatcgccggtaacagtgattgtgacagcaaatcaattccaataacctgaaagatcaaaaggactcagtaatgaattttctatgaccaaggaatttatcagtcattagggaagcaaaattgaaatgttatattgagctgtgggactgatgttttctaaacactgcaggtagtcaatacctcaaggttaggctggtagagagtgagaatcctttaaaaaaataaccaggtttgcccttgaggggtattctagccagttttgatagtcgaagtgtgtataaaatgtctggtgtcatagttgagggttgatttctagactaaaataattgttgaggtggagtaaattagacttcacgctaataaaaacagcatgaacatcacaaaagataagataaattcatttcaataagaaaaaaacatgaacatcacctgattaacttgatcgagcttgctgattatattgagccgaacatcaggaaattcatccttgagcaaagaaaggaaaataggaagaagttgttcgattgtagcctcctacagaatgccagaaacaaagcaagtcaggtttccaacaatcgtgaagcaatggtagtaaacaactgaacagtaaagctgttgcaaacaaataatttgaattatttcaagtaaaattttatgaagatattttgcttgtgacctttcccaagaccggggccattcccataataactgaagccaaagctgaacgaacatgctgagatgaatctgatgacaattcctgcagatgcagttggcaagttagtttgctgggaataaacagcagcagaaaaccagttaataatatttggttaagcgttggcccaccttgacacaaggaagaatatgctgaattgcaagctgaggacttaaaatcctacagaacttagtaactttccctgcagccgctatccgcacttccgcctcattgtcacgaaggagacgaacatatgccggcaccaactgctccctattaccaaacacatgaacataccatagatgaatattggaatcagattacaaaattatgtatttagataagaaataaataataacttgcaccatttaaggaccaaagtatttatgattggttttgacagaaaagatttaggacataaggcgcataatacctagaatgttcaggaccaactgcctcgcagagctcatacaattgattggcaaccatataacgaactcgccatgatttgtcctatttaatgagttacagagagtaaaagatgtcataattatggtaacacatacaacagaagcaactcggagcatcaggaacctctagcaactaatgaatgtctgcaaataaatattatatgtgatatcaagtagatgacactgaggtaccaagtaggggtgtaatttacctgggagaaattgacaataactggaaggatatgtgctacacaatcttgtggttccaacaatttcccaagagcagcacagccttcaactgccaacaagcgtacggaatcttgatctggtaataaaaggccagcaatattgttagatgcattatttaggctgcagaacatgtatagtaaatgtcccaactggctcaatcatgcactatttgctccatgacagaattgtcccaactggctcaatcatgcactatttgctccatgacagaattccattgaaaggctagtactatgatttctgagagtttgtgttgatatttgttatcttcaggcactaatggactaacattggactagcataaacagttgtacaaattgaataatggatgcatacaaatagctctttatgctagttcttggtacaaaactgaagcagcaaatgaactgggagtggtaaattcaacagaattagaatcagcaatgcagtaaatgggtacagttttttattagttactaataggattattaaagactattatgtcatgaatgtaaagaagtatgaaatagcacaaaatattatgtgagaggtgcatggtaccatcttgggttagatcatcaaatatcgacatgacttctgtctttagatagttctgttcaactgtggctgcaaactttccaagatttgatgcagctgcccttcggaccataggcatgtcatcttggcatagctgaccataaatggtcctcaattctgccttcaattgatcaggagcacttggatatgctatatggaaaagtccacaagacgatactcgagctgtaaaccactcaccagctgctagcctctgaaaagagtaatgcatggttagctgaatacaacacgatgtagtgtaaaatagtctgtccataaagtattcattagtggtgctagatggaatggactaaggaaaaggaaaatgaaagcatgataactaatgccattgtggcactgtttccagtcaacaattgcaatgtgttaaaatagcttctatggagaacaatcaacaatatataacaaaattgcaattgacaggcaagaaacaaacacaaatatcacacaattgtatgccaaagtaacaagaaacctacatagtgaagttggcagcgaactgataaatctggcaactctacagaaaaaaaacaattaaatattaataaacttcttacctttactactggaacgaaccagtctacaatgtcactttccttcatctgtgctccaatacggcacagagattcaactgccttgtctcggacacaggtttcctccactgtacacaatgtctccaatggtggtagcaaaacatgagcatgttctacacccccaacgtaaggaatgaacacgcccaattcttcagccatagcaagaagcacctcatcttcatcgtcattattttcactgagaaaaggaattaactccttccgggttctttcttctccaagtgctcgtgcaattgtggagagcctcctaatggagttcagacgcaattgaatatcttcgtttttgagctcatctatcagtatagcgatgggataaagaggctcatccatcgaagccatcagccttatcaaggattcctacaactgtaaagaaagaagattagtgctctatggtcattggaatctagcaaaacctataatcatatatttctcatcttaggcacggttccattagagaaacaaatccatgtaaatctaaaaggtcaagagtgaaccacgcatataactcacaaaatcaagcctaaactatatcactaattaatatatggttcaatcaaaccaagcatacaatatacgacttgcccaaatacaatatttgttgactctcattagatgtaaaacagagatgtcgtctattatctacacatggtttccggagaaaagtcagaaaacaatctcatctaaacattctcagacatatcaagcacaatggaagaaaagagatccttgtgtcgtcaacagatctaaaaacaagatacctaaaacagaagaatttcagctggtgaatgaagctcagacaacttaattcgaattagatcaaggaccaccctctcagctttttatggtatatcgttaacataatttttcacctttccaggcacattttcaaaaccacaaattgcaacctttccaggcacaaattgaaccacaaaatagcaacgcagaagaataaatttgatgtgcggcgagtgattcatcacatcagggtaacagaagaaccaaatcgaaccacaagagaccaataccaccaccaccaacgcacaaacgtaacatcccactagaagcacccacacatacggcaaataataagccctcccaatccgcccccaaaatcacagccccgaaggagaacacgcaggattcgtaccaaccgcgtcaaaaccaacgtttccccccaaccaaaatggcgcagatctaaagcagatgaaccacacggcaacataaattaacccaaaaaaaaaagcagccgcgaaccgcgcaccgcacggcggccaccggaaacctaacccccgcgcctcatcctcgacggtgggggtgccgatcgggggcgccgcgggccagtcgaggtggggtcggcggcgcagatctaacgcgcggggagcgaaggggaaggcgagcgacgggcggatcctcacctcgcggggccggatcggcggccggcggagaggggggcaccgaggggacgcggcggcggcggcggaggaggatgaggaggagcggctcgcgaggggtgtcgccgctgaagtttaggaggaaagggaggggggagagatggatggggatgggtgatgtagtggtgggggtgatggatgcggaaggaaggggatcggagagagataattgagctcaacgggagcgggtggaacggaagatagcaatgggccgggccgggccgtgccggaccttgtccagagtgattttgttttttactgtgcccgtgcgttgcaacgggtaaaggtaattttaatcatttatacagatgggaaaaaaatataaaggaataataataataataataataataataataataataataataataataataataataatgaaataaaattgcagtaacctttgataaaaaagataaaaaatatataattaattttccattaattccattagctaaaaataatataatacgaagtaggaaaagttattctcaaatttttagcaatttttaaaaagcttaaatagagcaaactaattatataaatgaaaacaaatttaatcacctaaataaaacaattagacctataattgaaaatatgttgccagttcatttaaacatgagcctgcgggtgtgtgtggtatatatctctcacttgtatgtcgtggtcttttttttgacatagaaaaaatgcccatgcgttgcgacggctaattaaaattataacaaatataaaaattttataagattaaggtttagttttatatgatatgagctctttaagaaaatatatttataatgaaataaaaaaagttcagctgaagtgacctaaagtgaacttgttccatacggagcgcgtacacgtggtccatgaggcggcccaatagtgtgggcggcctgggaatagaatcggggaggaacaacttaagcgacctaaagtgaacttattccgtgtgggcggcttgggaatggcgttcgacctgacgcgggagaagccaaagccgtccgatctgatagacggtcatcccgacctatataaaagttcaacagcccaaaccctaaccctaaaatcatttcccctccccctctctctctcaaaacaacgtggcggcggcccggcataccgacatccctgcgacggcggtggtggttcggcagcgacgacgacaccctccccttctggcgtcggcattttcttagtgttcttgaatctgatcttgtatttttgtagtagtgttttctttaggatttaggtccaaatttgatgcggtctctcatttattttctttcttttctttttttattttttgccatcggagagggattgaagcgggatcgattgcacgtgcgatggaaaattttttttatggacaaaaactataacccataagccatacaaatttttttaattaggtatatatagatattgaatcggactttccttttttttcattttttttcgcccttttttcgttactacggatgtcagaaacgtctttatttatttttaccgcgtcacatataatcggattcgatttttttcgcccgatttctttttcacgctttttttcacagatggacgatggaaacactttttaatttttaagtagtagagataaagatagagatacagattgagatagagaaagagaaacggaaaacttttttcgcaaccttttttttggaatcggacagaaaaaaattttacgcttgttttttaccgcgttgatggaatcagattcgatttgtttttttaccacgctgtgtcacatataataggattcgattttctttggaatcggacagatacttttttttattttttttcgccattttctttaccgcgtcgacagagttggattcgtttagacttttttccttttttcgcccttttttaccgtgtagacggagtcagaatcttctatttttttcctttttttcgcccctactttttctggatcggacatattttttttcttttttttggccggttttttcccttctttcgcctttttggatcggacaggtttggttttttttttcgctcgcagatttttttcgtttgtttcgtctgtttttttatcggacagagtctttttttttctttttttgcccggtttttttcacacggttttttttcccacggtttttttgacggacgatagaagcacctcttattttttaagtagtagagatttaatgttctataatataacgcgtttattatgtatatatagaattaactagtagcaccttcatgtttaattcattttttaattctctaccctaaaaatatttaatcttattgagtgcatgcattttactctatcatttattatgtaagtcatcttgactttttaaaatcaaacttctttagatttaactaagtttatagaaaaagatagtaatatctacaacatcaaattagtttcattaaatataacattgaatatattttgatactatgtttgttttatgttgaaaatgttcctatattttttataaacttttccaaacataaaacaaaattggctaagaaagaagtcaaagcgacttatggataatttattagagccaaaaaatgagaaggttataatattttttttcattgcgttactagttgttgtgccttatatttttggttgaagagaatattattgtatttttcttctaaaaatatattgctttactactaatctacaagctacatataatatccatccaatacaaaaggttaaaaaaaatccaccttggccatctccctgaaataagcacgatctgttgagcatatgtttgaaaacaatttttgcttgtttaacttattcaatctaaaatgtgacattccattgtaatatatgatttgtgaaacaaaagctcgacaaattgtgcatgcctatcttagaatcgtttactgatcatctttccttgtccctactttatatgagtaagaagcaagattcttttgttttccctaaaaaaaagaaatacatttgttattgtcatgtattatttgaatacaagcatcatgtgaatatttccttttaggaaaaaaatggttatacaacattaagagctcccatttctaattttgtagcaccaaaagttatctccactctttaatttagcattccatccaaacctctatttgttttcttttctttttattatcttcctgacaaaatatgatataaacactaccgctaccttcttttttcttcctttagtcctttatctctaagggcaagagcaatgcttaccccctccgtccaaaaaaaaaaatcaaacccagggacatactagtatgtctttggtggaaataaggtgggtcccaccacaccctctgactatggtcacaatgcttaagacataaagtgatggtaagttggtcccacaactatgtaaaaaagtcctacataaaaataggttccaccatgtcatagagtcattctcaccctttctagtgtgcatgtgtgttttatctcattattttatttcttaaggttgagccataagcttatggccatttttagcatttaatgctttatggctaatatccacaatgtatatgacttgttataaggtcttatgtcacatcgtggatgccctaaatcaccattcctaaacttagcctgaacttgtataacctccattctcaaacttcccctggaccggcacttagccatacctctgtttctgaactcgtcatggaccaagggcttttaactatttgccactcttacgagtggtacttaatgatttgccactagatgtcatgagggtcacatgtcatatacagtgagtggcaaataattaattgccatatcccaagagtggcagtagttaaatttccccatggtgcattgctcatcctatacagttataaacacttctcattggaaagctcaaactcaaccaaaacttgtctattatcattgttgtgctcaagctttccctaacactacgcttcttgggcattcaccatcactcccctgattccttctttctatagagctaatgctcactaaacacataaaactcaacatgtaaacatagtatttattaacactcctaaaacctacatgtaagcatgccacatcaacacattaagcacacaaagctcaacatgcaagtatatagtaattatatctacaatttatttcattctaaaactaaacatacacatgctaaatcatcatattttcaaatcattttcataatatttcaatccaaattattttatcatttctccaatatctaacatatatcccgcagcaaagcgcgggacatcatctagtatagaaatatgtccattaccactgttgtgctcaagcttgctctaacaccacacttcttgagcttgttcaccatcgctctcattatcgcccttaggtggatttcattgtccttgagctctccttaaattgaataacaccctacagcacgctagttgagctctcctcaaatccattgtcacctaggctcccgactactatctcaagaatcatgcatgtctggttgttattatgctgccctccatctcacgagatgtgccgccatcgagcttgtatgcacgctacctccaacctagcccccgatgcagtgcatttgaactcatccgctggttcgtatttatcgtgatgcgcacaagctccccaagaggcctgctatggtgagttcgtggcatatggaagatggtaaatgaaggaagaaggcaaaatgtatggtagagaaagataacaatagttttgtggtgggagaggtttttcgttttggttttgatggaatgttaaaaggagtaaaagatataactttggtcttactaaaataatatacgaatttgatgttatatgactaaaacatgaattaacgatgctgtagaaccaattttatctttcttctatgccatcacaatggttcatgtgccaacatctttttttttctaccgctagagctcgtatgtgttatgatagtgagtggcaaagtaatcaaagtaaaaaaaaaaatctatttctcaatgattttttttaaccatcagttaacctaatgttgattataagttgaaaggcttataagaaaaaaattatgggaggacttttatatacatggttgtttacattgtagccaaaataaaccttaccaaaatttggtaagttggcaatattgctaagttttagtatgattccttatgtatttactaaaatttgattaaaaaaaactaaatgtatgcacatctttagcaactttttttttaaaaaagtatgatttgaaatgacatcaatctgaacaacccctatgttcttagtgattcagaagttaatgttaaaaaaaagttgatgttaaataaaagagttaattacacaatgggccgcttatgtttaccaaggttgcatcttggactaggggagaaaaaaagattttcactttggactagataagtttgcaaaataattcactttgtaccacttccctctactgctctctcatcactttcttctctgccatctaggaaacttggtgagctcatgaaggcagcagcatgcggcccctcaaatcctcaatgcatcagatcagcatgagcaggagtcaactactaccaatcaaggatctgctatagctaggtgctcgcttcttgcgttgattttgggaactgggagcctaggagatcctcgagcttcacgtcaggtagagggcacggcccggaggagatgctccttggcgatgagcaataggcgctcgccgtagcctccacaaattgggacaatattccccgatgcagttcaccaaggcatcaactatgcttgctccaatgcttcacgatatgcagggcatggcagaatgtgtaggtcgagtagagcgcgtacggcaccaacggaaatcaagctcgagtggcaatacgtagacggcaatacatagaatgtggaggcctgcgttcttgaacttttttttgtgcgtatgtccttctcatctccttcatccgttgagtccgctctcatctctgcttcctagtcgaccgcaagtagctggccgtgattacggaggagagggcagtagggcacgacgggcatgggtagtgctacctgccgcaggcattcccattactacatgacgggcaaggagcactgcccatgcccatcgcctgtgggcgccatgtgcctgcaggcctgcctgtttacccatcacaattctccacagaccacaagtaggacgccgatggttggaggggagcacggcgcagtggaggtaagaggcggcggcgaccggaggtgggaggcagccaggcggatgaaggaggagcgactagaggaaggtgtcacggccgacggctggaggacgtcgatggccggaggtgggagctcggcgcagacgggataggaggcggcggtggtcgcagcttcgtcggttgcccctcccgtggcggctgtgaaagtcgtcggctggagggtggggccagcggctgtgaccagaggtgggaggtggtggcgattcacgcgcccctcctgtcccatgtcggcctggagtggcgactgtggaggaggaaactggagtggggctatgaaggaaaggggaagagaaggaagaaaaccccatagtcttagatgtggtttttatattaagttgaccgagggcccacatgtcaattggttctcgcgagtaaacaagcgaagtttttgcgcccgtttgcctgttgagtacaggttttgacccaataaaaaacccaagggtaataaatggagaataaatccaactctattagggtttttacccacggataaacgggcaaacgggtcaaattgccatccctagaggagaggaagaacactatttgatgctgacgtgtgggccaccggttaaaaaagcaaagtttggtaataaaacttggtcaaaagtgtaaagatgtgctgataactggtccaatttgcaacttaggtaataaaatctgccctaaagtacaattcactccaaaaataaagtgcgatgaaaaaaaaaactcgaaatcaacttcacaagtaaattttataatttaaattttggcagcagcttaccagctagaatatgtaaaatggtaagagcagaatcatgacatagattaaggccctatttagttcccaaaacaaaaatttttatgctgttgttggcaactttttgtgacaagttgacaacaacgattgcagcaccttatgtcttgcggtgatcttagagtcgccaaccacctccatctagcaaagagctaaacctagatgggttttgacaaataaaccggctagcggagccaatttaagataactacccgtctcgtgggcaaaacggaaggttttcaggacaaacctacaaagagatgtcgcactctcgcagcggcggcggacggtttacggcgcaaaccgacaaagatggacaaactaagagaaaactaaaagcaatatgaaaaaacgattcaattgattgattgtagattggatttttacaataatccagccatgtcccttatataggggttggtcttgccctctacaggccctcctccacgtccaactcggggtagaaactaaaggaaacccgaaacatgccttcacgagcaaggaaacctcgaaacccgacgaaacacagtcagacttggacctgccggttagaccggccacacaccgcaggtctgaccggccctcaatcggcggtctgaccgcccaacacacggcggtcagactggcccactcaaagaaaaccggtagacttccaaattttggcaacctttcctattttaatcctaggtgccaaatttgggtgtaaacacatgccccctgcctttttgatgaacaacgtgaatctaaaagcatagaacatgttttggtcttagggcgataatctaattaccggccatagtacctcctaagcgtcttgccacacactcgggaagtatttcttcaagtatttcccattgattgctcgctgaaaacgctcccttgaagtgtctccaagaaatatgcgtttcgtcgaacaatgccgcatactcgggaccctcccaactaggggaccacttaccgaactccctggatcgagtacccaaaggcaaaattgtcttccaaaccaagtctccaacttgaaacaactttgctttcaccctcttgttgtacgccttggccaccctcttcttttctttctctatctcttccaaagccttcaggcgcttgtcgatgacttcatcaaggttgtctcccatcaacgtcttgtaatctttacttgacaaatcatcttgcctgatgtaacgaagataaccaagatttacctcaaccggtaaaatgacttcttgaccataaaccaactcaaaaggagtgactttagtggcaccatgtttagatatcctatgcgcccacaatgcttcgaaaagcacttcatgccacctctttgggtgttcctcaatcttctttttcactaatttcaacaatgtcttattactcgactcggcttgtccattagcctgagcgtagtaaagagaagaactcaacaatttaataccataagattcggcaaaattcttcacttccttagatataaaagaagcaccttgatccgtagttaatgtttgtggaataccaaatctatagataatatgcttcaaaataaagtcaattacctccgtatgagtcatattcttcaacggcacatcttcggcccacttggtgaagtaatccgtagcaactagcacgaacctatgcccctttgatgacgaaggataaatttgaccaatgaaatctaaagcccaacctcggaatggccatggtttgattataggattcaacacggcggcgggcgccaattgaacattgccgaaccgttgacaagtttcacatcctctataatatttgaagcaatcatcaatcatcctcggccaatagaaccccgctctcctaagcaaccaattcatcttgtgggccgattgatgagtcccacaaattccttcatgtacctctcccatagccactttagattgatcttcatctaagcacttcaacaagacaccatctatatttcggcgatataaatcttcatcaagcaatgtgtacttgaatgcttgccgtcgaattttccgatcaaccttaagcgtgggatctttcaaatatcgaatcaaaggaatcctccaatcttcttctgtttcttgggcacaaatgtccgaattcacaattaattcggccttaaaattgattgaaacgtgccctccagcgctctgcctagaaccggtcagaccggccataccaggtgtcacaccctgaagttctcctcctaagcctaaaattgaatttataaaccagcctaagaaaatgccggtgcaaatcaagacaaaaccttaataaactaatgcaaataataatcggaattggcatgtggaatttttcttgagttctacatgtcgaaatacgctaacaagatttttagtggaattttcagagctctcgaaataattttaaccaattaaaattgagcacatgcaattttaatcccaggaaaaatcatttttccttctttttcctttttctttcttttcttttctcttttttcctttgaatgggccgccggcccattccttctttttctccccctcctcccgctgggccggccgaaggccaaggcccagctaggccgcgtgagccggctgcccgcctcctctcacccgggtcgccgacaggtggggcccacctgtcggacccgtctcccacctcgcgccgcgccgccgcgcccgcaaccgccgccgcgcccacgcctccgcctcctccgggccacgtcggccacgcccgcgcatgcgccgcacctcccgcgcctactcccctctctcccgcctgcgcccgcgcccgagatggccgggattcgattttcgaatcccgcctctctctcctctcccactccccgcgttggccggcggaatctcgtccctaccggccacgtccgggactcccctcccctatttaagcttccccgccgccccctctcgctttttccccatctcgccgaactccctcgtgctccccatcgctcccgcgccgtgcaaccacccgccgccgccgcttccgttactccggtcgccgctagccgccgctagggtcgccgccgcaccgcgccgtcgccgccgtcgggttcacgaggccaaactccacctcgtttgccccttccccgtcgggattcgtcgccggaattcgcatcccctcgcgctccggtaagttctacctctaccgccgccttcggccatggatgccggcagccgtggttcatctccctctctctaatttctctctcctccttccttagggcaccccgaagcccgtccgccggttgccgtcgtcctcccgtggctcgccgtcgccgttcgccgtggtcttcctccgcgccggccaccctcggtgaggcgtcttctcccctctactcccctccctttccctcctagtgccgcgccgccgcttcaagtcatgcgccgtcgcctttggccgccgccaccgcctcccgtgccgccggtcgccatcgccgtcggccgcgtgccgtcgccgctagccctggccggccggccggctttgatgccgagccgagcccggcggctgcctctatcgccaccgcccgatcggctaaggggccgatctgggccgtcggtcccgtggaccggcggtggaccacccgcgtggtcccggtccacggtgcaccggcccccctttgagccgctgaccagtgggaccctcctgtcggcgccaccccccttgatgacgtcagccctgggagttattgtgcaataaattatttaaggactttttgttatagtaataaacacagtgaatcttctaaaattcataactaattcatccgagctccgtttaagcccattcaagtctcagtaaatcaagaaaaatgtgtagaatccattaaaaatggttttgttctctgtttcagtagtcttgtagcctgtttgcaatgtttgccttgtatgtcgctagattccggttcttccatcgctccagtgtacttcgaaatagtcgccgaggttcctctagcagcagagcaaggcaagtcatgcttgtcacttgatcatgttgatcctatattgcaaatgttctaatgttttctttcaaatactgcatttgttttgcaatatcactatgggatgtttacctattgttacagccatgctattttggtaccctgctcctttgttagctcgggttatgacatgaatagacgttgccctaggagttggttagccatgcttagttcaactagtacacaatgggggagaatcctattaatgtttagactgttggttctaatggtaatgttggtttagaaccaccgctttggtgttggttaattaaaatgaatcacatggtgggctgtgggtgcatggttttgctgatcgcacccttggcagttaaggaccggttcgcgggatgccctggaagaacttatcgtacttaccacaagccagcctgggcaacggctgggcttgtagtgtagctttcctctagctgacgcatccaggcaagggtgggcgtgatggagcggggcgggccctgcgacggcctctgtcgcttccggattcacctaggcacgagaggggactgcccgctaccttgcgaggactgggggtgaaacctgaggtgtggtgtgcttggttatagggggttatgcgaagggtcctgtcacggcctctttccggtatgtcgtggtggcatgtcggcacacggaaatgtgtcgtggggctatgtcttgtgggtacagttgtacacctctaatcagagtaaaactattcgaatagccatgcccgcggttatgggcggtcaaccagattcaccgtgattagtctcaccctagtttagtctattgaaattggatagtataggtggatggttgggcctgtcgcaacgtggtatagcgttggacagtggatgattaatattgattaattattacgactgttttcttctttaaacttctgtttataaatgctcgctttatgcaaatgaaccactctagctctcctttgataattccctgcatcatacccctattccggtatgacttgctaagtacagtgggtagtactcagtcttgctctatttttcccaaccccagagtacgagtatgtgtcagatggaggtttctccgaggagtaggcttcgtccgtgccgtcgaggatgcctgtggagtggtgttcccgctgcagttctagtcaaggcttagctcctgttgtctttcgtttttccgctgcatttatgtaagacttttatgatgtttgtaagacgtggatctgaatgtcaatattgtcgtttgtgtaccccggccggtcctggacggggattttaatgcacattctgcttggaattctattcgggaatttctgggcgtgacaccaggccggttagaccgctcggggtcgctggtctgaccgacggcatgtggccggtcagaccgcccctggtcaccggtcagaccggccgtgtaatgccggtcagaccgctcctggtcttcagttttgccaatatcgcacaaagatttaaaatcaagcaccgactcttctaatatcagaaataatcatttcttcacattataaccagatgcttgttgtgccaagtcatttgctctagaattatcatgcctagcaatatgtctaatagcaaaattatcaaaattggcaataatatccaaacatgaatcgaggtacctatttagtgatccgtccaagcatttgtaaactccggcgacttgttgcagcaccaattccgaatcaccaaaagcttccacgtacttagctccaaccatctccatgacttgtaagccgaataacaaagcattgtattcggcttgattatttgtacaataatattctaaacgaaccgatgcttcataacacatgccattaggtgaaaacaaaactacccctatgccttgaccttctttgcaagaagaaccatcaaaataaatcctccaaggtataacttcaactaggcaaatctcttcctcataagcaatatctacatgatggtccactataaaatcacatacaatttggcctttcatagatttcaatggttcataagccaaatcatattctatcaaagcatatgcccacttgccaattctcccacttagaattggcctttgcaacatgtgtttaataacatcggcttgacaagcaactatgcatgtactagataacaaataatgcctcaatttggtacaagcatagtataagcataaacaaagcctctctataaagacatacctcgtctccgtatccaaaagacggcggctcaaatatgtaataatatattccttgccatcttcctcttgcgtcaaaacgacaccaatgactttgtcttcggaggcaatatataaccgaaaaggttttccggctttaggcgctcgcacaacgggtggagtagacaaatacctcttcaactcctcaaacacctcttattgttttgctccccaagtaaaatcggcttcttttttatgcgaagtataggaacaaaagcatcgattttacccgctaggttagaaataaaccttttcaaataattcaccttacctagcaacttttggacctccttcttgcatgtcggcgctttgaaattacgaattttttctatcttcttaggatcaatctaaacccctctctcatgcaccatgaatcctaagaatttccccgccgacacaccaaaagcacacttaagtgggttcatcttcaaaccataccggcgcatcctctcaaaagctaacctcaaatcggctatgcgtccttccatactatctgatttgacaataatatcatcaatgtagatctctaagataatacctagcaaatcatgaaagatcaaattcattgccctttgatatgtagcaccggcattcttcagcccaaaagtcatgacaacccactcaaacaaaccaacaaatcccgggcacctaaaagccgttttgtacatatcttcctccgccataaagatttgattgtagccggcattaccatctaaaaagctaatcaccttatgacccgaagcatcattgatcatcatgtcggctataggcataggatattcatctttgggagtggctttatttaaatctctaaaatctatgcaaactctaatcttaccacttccctttttctccaccgggactatgctaaaacccactccgcataacgacatggcctaataaaccccgccttcaacaaccgatcaatctcctctttgactcggtcatatagcaaaggattaaaacgacgaggtgattgcttataaggcctaaaacctggtttaattggaagccgatgctcaagaagctcacggctaagacccggcatctcatgatactcccatgcaaagcaatcaacatactctttaagtagctcgattatcttaaccttataatcgactctcatatttttgtttacaaaagtcggccttggtttggttccatcacctatgtctactgcctccaacggatcggccgatgtaaacccttgtccaagcttctccacttcatcaaaatcttcaatagtttcaccaatatcgttctttgtagaccgatatttttgcaccctcttttgtaaccactctaaattagcctctttactcattatacaaatttatatggcttagccgtgctacactagccagctttacagagataggtacaaattttccatcggagatactaataaaatcatagctagaaagattcctccccgataagcattgaatattcccatgacgccactcaaaagtagcatcggccattgcaacctcggctgatgtatccgcttgaacaatttcaacatcatcgccgtcccattgaattaaacattgatgcaaggtagaaggcacacaacaattggcatggatccaacaacgacccaaaataacattgtagttaccttgcacatcgacgatgaagaaagcggttggtaacgtcttgttccccacggtaagctccgctgaaaagatacccttcgcctccgttggttcaccattgaagccattgagaatcatgttagtcttcttcaactcatcatctccatgcctcaacttcttgaacaatgagtatggcatcaaattcacagcggcacctccatccacaagcatcctagagaccagttttccatcaatatgacctttgagatagagatgcttcatgtgacggtttgattcatcgggcttctcaaaaaccgcatctttagggcctagtgaaaattgagcaacctcggcttcatccatagcacaaaactccataggcaacatacataccatgttgatatccatgtcttcttttggagatgactcatctttagcaaccgattgttcttccctctcctctacaacaaccggttcttccttctctatggttttacgcctccataccggtggtggtcgcaactcattgaaccttttatccctttactctttggcctttttctctcttatttcttgggcccgaagacgttgcaaccttctcctttgagtagccgtcaaatccttaggtatccacctaggtttcggctctgttccaggaggtaaataatgccccctattaggtttagttgatgacgatgaagccctcacatcgccctttgcaaacctcctatcaaaccggtgctggagcccggtcagaccagacgtagactaccgatcagaccagccagatgcgcaggtcagaccgacattcggtgggcggtcagaccggcctgaggcgtcggtcggaccattgtcagttcggcggtcaaaccagcctgatggcccagtcagaccgaccgtatggctgcggtcagaccggccgtatggctgcggtcaaccggccagaagacctggtcagactggccaactgcgatgagctggtaccagcttcggattttttgcttgaggactctccaacttcatctccagaaggtattggcacatcatgagaccctactttgatggtaatcacttccgaagtccttgcctccaccttaatgcgctttccttccctcctttcttcattggcccggttcctaccataaaactggccattgtttggtgaagaaaaacgctcatgaattggccttcttggtcctccccacccttggttgaattgcattggaggcatatggttgaacattggcgatgttgccccccatggcatataataaggataagtataactcggcggcggcattgaataagaaccccatgacatgtcttgtggatgatgatatggaggtgaatgcgaccgtcttagcgagtgaacaaatcgctcccaaagaggtgatcttggtcttttccccttgttgtgagctctctcaccaccctgcttttcatatttctccaaaagcatatcaagggtcactttagtcttcctaggagctttagaagttgaagcttcacttttattctctttccaaacaccaacctccggcttctttggtactatcatctttggccttggttcaccaatgattactccttttcctttagtagattcggcttgctccggccaaatcaacaccttcttgtcattgaaattaattgtattcaccggaaaaggatcatgatcaagcttcatcttggagccatcggtgaacttcaatcgtccttcatctatggccgattgaacctgtcgttgaaacacattgcaattattagtggaatgagaatgagaatcatgccatttacaataagctcgacgtttcaattcttcttgagatggtacgatatggcctttaggtaatctaattttttttcttgtaaaagataatcaaatatcttatcacacttggccacatcaaaactatatttaacctcactttgccgatctttgcgaggagtcggcattaagttagaacaaacaaaaggcttttttttgttagtccatgaccattcagcagcatacatatcatgatcaccctcatcttcactatcactagcctcagggtaatcaatcacattaacattaggctttttctcatatggtctaacaatttttttattatccttaacccggctttcttgagccagagccctttgcataagttgactaacatcaagaaattgttggccatctagtctttctctaagaggagcaattaaaccattaaaagcaagaccaaccaaatctctatcagttatatttaagctataacatcggtttccaacatccctaaatctcttaatataatcaacgacaggctcattatatttttgcttaaccgatgttaaatcacataacctaagatcggtttctccagtataaaaataatcatgaaatctctcctctaattgagcccaagtatgaatagaatttgccagtaaagaagtaaaccatgtaaaagcggtaccggacaaagataaagaaaacaagcgcaatttaaaagtatcactattagcctcaccacattgcgctaaaaattgacctacatgctcccatgtggtcctaccatcttcaccactaaacttggtaaattcgggaactctataattactgccatagcctgaatttccgtttcaggatttataaattatttaataaattattaatagaatttatattaaaagttcattaatttacaagtgaagttaaatgtgggaaataaaatttcctaaatataaagcatggttggatttaatttttattaaattctccatgattaactatactctttggaattttctcggatttttcagagctcaattcttaattttaataatacaaagaacagtttagcaattatttaaataataaattaatcattaaatgatctggatattattatattaaatactttgagtgtccaagtatgttcaagatttttcttggaattatttgagcattggaagtatttttaataattgaaagatcatctcattggttaatttatttggaaaagtaataaaagtcctcctcatcagttgggccgaattcagcccattccctcccttcctctcagcccgcaaaaaagtctgtttgaccttcctggcgctacagtactccatcttcctcctccagccgactgtctcccgtgccgtgcacagtgtcgccgatccccttccgaaatccggccacctcgttgctcctttttccaaattagttgcgggaatggaatcctctcaatctcctcttccttttccccaagaaatccccaaaagtttctatggaaatcctttccaatttcgtggttcaatctttcctttttccggcgaaatcctaaactttcccgagtttttcccgtcgtcgtgggctcgatccctgggctcccatggctatatatagagccccctccttctcctctttcggccgccacctctccctctctccgccgttgccggaagcactctccccgcgagctccctctctctccacctccggccgccgctccagccgccgtgcgccgtcgccccggccgtcgtcggtcagcgccgccacttccctcggctccgcaaagtcgagctctaccctggcctttggttccttcgtgccaaatccagccggaagccgcttgccgacgcgaaccagaaggtttcggcctttgcggcgcctccagccgcagctagcagccgccttagccgccgctttccgtcgccatcgactccattgggttcgcaggagcaagatgaagcccggcagccggttccccgaagccgaaatccaccggagctccatcgtcgccgtcaagccgaagttcgccatcgcgttttgatctccggtgaggccttgctgctcctcccgtcatcgccaagcttcgccgcagcctccctcggcatcgcagctgcgaagtgaaccccgtccacccctctgttgccgtcgttcgtcgccggaaaatcgtcgccgccgtggacagtaccttgccgcccttcgaagctcgtcaccggccatcttccgtcgccgtctgtcgtcgcgtaagtgttggtaagaatcgccgtcgccttctctacctcccggtgcccccgtttgcattattgtgccatggttcaccggcaaccgccgctcccatgccgttcaccggtgtagattttttcctagggtcttaatccaatctaatctaatccgttgtttgtctagcgtcgtcgtcgtctccgtgtgttgccgccggatcgtaaacgtcgaccctccctctccgatcgctttggttcggtgagacttctatccgtgtcccctcgggttaggtttcaatccctcggtcgtgtcgtcgccgttgttgctctaaccttagcgcagccgctgccgtgtcgcttgctggctgccctgtgcaccgccactaccgccggctccttgttgccgccgcgtcgctgtttagccgctgtacgtcgccgtcgcgctgctgctgcatgtgtgccaccgcaaccgcggttgtgccgttgccgtgcgcaacgcctatcgtatcgctgtgccgctagctgctgccttagcgtcaccgctgcactagctgcctagccgccgccatgccgctccctgccacagccgtgctgctgctgctgtgcattgccgcttctgctgtgcattgccgcttgccgctagctgtcgttgggccgctacttgtgcatgccaagtggccgccgtcccgctaccgcagctaccgagccacttgctgtcgtgccgtgccgtcgctgttgtgtcgtgtcgcagctgtgtgccgtttaaacctagccaccgctttagctcgttgctcggtagtcgagttgtctagccgtaggtacatccctaggttcctaccggcctatcgtttgccgtaccggggctttaccgtgaatcgtttctagtccaccggtttagccacagccgttgttgagttgttcgctcgttcgttcgaacgaggtgttccccgtgtttcgttcattcatccgtgtggagtcgtcctttagtttagagccgtcagagctgccggctccgttcgccggtttcggctaatcatttaggcgatcccgtgtcatgtagaattgactcgttgagtcggtatctcgtgaggctcgcttgccagatcaatccaagccatctgatcttggtcaactctcggtcaagattaatctcagtcgtccaaaatcgatataaatcctctcctcttttcaatggcatattattcctttttaatatatgtcatctaccaaatatgatctaatcttttctggaggttgctttaatcttttgtctcagttataaatcatttgtaaatggtttaattaatttggaatagtcttttctttaataggtttaattggaattaaatcttgtaaaatttgtaattaattcatatgaaatcggaatgagaccgttcaagtctctaaatttatgtaaaatcatgatctacatgtttgtttacttttatgtactgtttatttggtttttattagtctttctcctcgtttttgcgtgttagcttgtcgtttccgtcgtttcgaaggttcgaaagtgcgtcggaagtgttccagaagacttattgaagaccgaatattgcaaggcaagtcacacagatcccaaacacaattcctttgagcatgttaatcctatatttaaattctctatttatttcaactgtgcatttatgttcgaatgtcaccgggtggtgagcctttcccatttaattatggccgaagatgactttatttttttatgggttataatttgattagctagaaccttatatattagtttggttcagctagatacttataatagatgcttagccatgcttagaaacaatagctcactaatgggataaatcatgcttcactatcacttatggatatttaatggaagctcacgatggtcaatcgtgattggttaattaattaatgtgccaactaaaacttgataatggtgggttgtgaacacatagttttgatggtcgtgcgcatgacaattaaggaccggttcacgagtttcggttgtgaaacattaaccgtgccaaccacaagccagcatgggcaacggctttaccttttgtatagcatggttcattgcggagcactagactaagaagtggcggagataagctcacgggggtcgctggggagtccatgccttgttttataagggggtgattatgatccaggaacggtacactgctttgagttgtgttgtgcgaggggtactgtcacagctcctttctgaggtactgtggtagtatcgaggcacatggtgacatgttgtggggctgtgttttgtgggtacagtggtacacctctggctagagtaaaactattcgaatagccgtgcccgcggttatgggcgggtcgaacaatgtcttttgtgattagtctcacacttcacaccataataaatgatgctataactggtaataatttgattagctcctggtttggaatggtacattcctggtttggagataggtctgtgcagcatgggtgtgctattcagcgttgattaatattaatgattaattactctactgttttacaattcctaaatgtttgctaaatgctgctttcgcaaatgaaccctatattatgccattctttggtattcctgtgcacttgcatatttgctgtgtggcttactgagtatgtcatatactcaccttgcaataatcaatcaaacctcagttgaagacaagttgcgaaggagaagacgtttggcttataccccagttgagctgcctgtgggagtggagtcggagcttcgctagaccgtaattccgctgctgtttttcttttcttttgtaagtatgtaacgttattattatgatggatttgtatattaaattgtcagtttgtgtacctcggctgattcctggacaaggattttatgcacaaataagttcagaaattactagtgaatttccgggcgtgacaattacggggaaacgacacattatcataatagtcaggatacggctttttgtaaaccctaccacgattcctagtttcaatctctaatttatccctaatagtcttatttcctccatattatcaggcctatgttgatttagcggtggatttggtggcctaataggttgtgtttgtggcgcaatatgattatattggccttgtctagtatcgggaggataccccctagcaacatcattataagcattaggaacatgtgggggaacttggggattatttacagcagtagatacaggaggatcaaatgttttaggatgatacaaataactagcattagtcattggatctatcccctatatcggtataattgcgccggtctgaccggtccagggcccggtctaaccgacatccagaggcgcggttagaccggcttgagtcccggtctgaccaccgggataatacccggtcggactggccgtttggccggttggaccgacggcgaagttgcggtctgaccggccgtcaagcccggtcggaccggccgtcaagcccggtcggaccggccgtcaagcccggtcggaccggccgtatgcgccgctccattggttccgctactcgtttgatctataggagcttggttagcagtggtagaggctttatcttttgacatgtaatcggccataagagggccgaatttaaaccttaaaaactcatcaaatttaccctcaaaagttgcatctaacttatctttaaaaacagtcatagatgaatctattgtagatgctacttgttgttggatagattgtgttacctcttcattgcttaccaaatcagaagcgagcttagtacgtggcctgggcttgatgatcacgccttgatgagtcctagtgcatgctctcatcagcgcctcctgtgtgatctccttgatgtactcctccatggacttgcggtcttctcctttgaaatcatccaatgtgataggtatcacattagatggctctacctccgtcttggatggcggcttcgtcatggcgaagtcgaagttgagttgacgctgaacggatttccccagctgagtcgccaaaatcatgttggcaactttttgtgacaagttgacaacaacgattgcagcaccttctgtcttgcagtgatcttagagtcgccaaccatctcgatctagcaaagagctaaacctagatgggttttgacaaataaaccggctagcggagccgatttaagataactacccgtctcgtgggcaaaacggaaggttttcaggacaaacctacaaagagatgtcacactctcgcagcggcggcagacggtttacgacgcaaaccgacaaagatggacaaactaagagaaaactaaaagcaatatgaaaaaacgattcaattgattgattgtagattggatttttacgatgaaccggccatgtcccttatataggggttggtcttgccctctacaggccctcctccacgtccaactcggggtagaaactaaaggaaacccgaaacatgccttcccgagcaaggaaacctcgaaacccaatgaaacacagtcggactcggacctgccagtcagaccggccacacacaccgccggtctgatcggcactcaatcggtgatctgaccgcccaacacacgacggtctgaccggcccactcaaaggaaaccggtagacttccaaattttggcaacctttcctattttaatcctaggttgtcacgcccagaaatttagcccaaatttccagactattttgtgtattaaatccgtgtccaggaccagccagggtacacaaaacgacaagtaatatacagttccaaacgtaaataaagcgtaaaatacttacagaagaggcacttagtcctcacaccgaaacgaaagcagcagcagcggaaacaggcgatcctagcgaggcttcagctccactccacaggcaaaactcaactggggtctgagccttggtcttctaacttcgccttcagctcagaagcactacacttctgaaaaggggaaataatagcaaggctgagtacaaccaccgtactcagcaacacacaccaacgatgctaacgtgcaaggggaacacaaggacggtttgtggctatttgcattaaggcggttgtaaaacattttattgagcaaacagtaaaacagttgagtaattaaagtaacattaaatctccactgatcaacgctacaccacgttgaacaggcccaaccaacccacctaaactacaatgcattgggtcgatttattaaggtgggactaatcacggtgaatctggtcgaccgcccataaccgcgggcacggctattcgaatagttttactctggccagaggtgtacaactgtacccacaagacatagccccacgacatgtttccgtgcgccgaaatgccaccacgacataccggaaagaggccgtgacaggacccttcgcataaccccctctaaccaagcacaccacaccttaggtttcaccctcaatcctcgcaaggcagcgggcagtcccctctcgtgcctaggtgaatccgaaagccgcataggccatcgcagggcccatccaaactccatcacgcccacccttgtctagatgcgtcagctagaggaaagctacactacaagcccagccgttgcccacgctggcttgtggaaagtacgaggaattcttccagggtttcccgcgaaccggtccttaactgccatgggtgcgactagcaaaaccatgcacccacagtccaccattcagtcgcattttagttggataattacgaccattaagtatggccagatgtctcgagcacgcagctcattctaatactaaaaaggtctaatactgtaattatcccgtcaactaagctagtagtaattaagcatggctaagaatatagttctagctaggtcacataagtaacatgagctagtttatttattacccagggttgacaaaggacagatattaagtaaacatggcacaaacgagcagataggtaatacccagatcccatgtaattagcaaaacatgcatatttatttgcaaacggtaaaacagttataaattaggatcaacatgctcaaggggaatgtgtgacttgccttgcttcttcaaacaatcttccgaactcttatccttgcgaacgcgaacttccgaaacgacggattctacatgctagcatgcaaaacgaggaaaaactctaataaaaacaagggaaacaatacataaaaagtaaacaaacatgtagagctcaattttagatgaattttgcaagttgaatggctcaattctgagttcgaatgaattagatatgaattttagaagttttgagccatttaaatgaatttctagaattattaacgaattattgcgcaattaaactcgatttatgatgtcaccgagagggaaggggtggcgccgacaaacgggacccacccgtcggtgactcaagggctttggcctaccgtggaccaagtccacggagacacgggctagcgcaccacgtggcgccgacggagcaccgacgtggcggccacgtgtgcggacacacgggcggcccgggtggagactgaggccgatccgacggcccagatcgactgcggctgggaccaaagggaggcggcagccggcagtggtgcgggcgcggagcgcagcggcgacgaaccggccggacggccaccggcagcggcagcgcacggccatcggccactgacggcgagcggcggcgcggtgagcggcggcacggcaagcggcggaagggagcagggaggagaggagggatgctcaccaaggcggcgacggcgagacgacaacggggaagccagcgggacgggctcctcggggaggcaacggtgacggcggtccggcgacgggctcctcggggaggcaacggtgacggcggtccggcggcgttccgcgagcaggaaccggcggacggcggctgcgagaacaggggaa

SEQ ID NO: 7241 - DNA, 11120 bp, Oryza sativa
acaacattcactccctctcactaaactgtggcatgttctctagccgcttgtgatactcgcaatcctaaaccacgagagaaaacattgcccctatagcagaagggtagatcgatggaggcagccatcggcgcagcgagctggctcgtcgacaaggtggtgacacagctgtccgacgagctggtggcggcttacatagccagcaccgagctcggcctcaacatggagcagatcaagagggacctcatgtttatgcaagggctgctccatcatgcccgggagaggagggacaagagcaaccctggcctgcaagggcttctagaggaactcagaaagaaggctgatgaggctgaggacgtgctggacgagctccagtacttcatcatccaggaccagatcgacggcacccatgaggccacccccgtggtagacgatggcatccgtggccaagtcctccatggccgccatgctcttcgtcacaccatcggtaactgcctttcatgcttttcttcttcttcttcttcttctgtaccagaggatgccaattatccacatcacacagccaagtcccgtagtgatgaatctgactatgttggcaagttgacattcaatcgagtagacatgtccaaaaaaatcaagtcggtaatcgagggcatatatgacttatgtagccatgtatccaatttgctcaaaattacccaacctgaagaaagaagggttctatcactgaagcgacctcccaccagctcaacaattacacagaataaattatatgggcgggaagacatctttaaccagactcttgatgacatgtgcaccatacgtagtgaaacactatcagttcttcccatagttggccctggtggaatcggaaagacaacctttgcccaacacctgtacaatcacaaaagaacagaggcacacttctctggcaacaagacctgggtttgtgtatctactaattttgatgtggttaggctcacccaagaaatcttgatgtgcatatgtcaaaatagaaatgaggaaagtagcggagcacatgaaacatccaacttggatcagctccaaaaatccattgcagaaaaattggattctaaaagatttttacttgtcttggatgatatgtggagatgcagcagtgagggtgaatgggaaagcctactagctccattgaaaacaggagaagccaaaggaagtatggttattgtcaccactcgttttccatctatagcacaaatggtaaaaacaaccaagccaatagaactgcaaggtctagaggatgatgaattcttcacattctttgaagaatgtatatttggtcaggaaaaacctgcgtgttatgaagatgaattgattgatattgcaagaaaaatttccaagaaatttaagggtttcccactagcagccaaaaccgttggtcgattattgaagaataacctttcccaggaaagttggatggaagttcatgaaagaaatgagtggaaaaatcagcaagatggtgatggcataatgccagcactacaaataagctatgactacctacctttccatctgaaaaagtgtttttcttattgttccctttaccctgaggactaccggtttggtaatttagagattacttatttttgggaagcattaggcatcatagcttatggagatcaaaataataaagctgaccatgtaggattaaagtatttgaacgaactagtaggtaatggttttctcatgaaggaaggtgatgatagtaggccatattatgtaatgcacgacttattacatgatctagcacgaaatatttcgtcacaagagtgcattgacataagttcatataactttaggtctgatagcatcccacaatctattcgacatgtatctatcaccttacaatatgatgagtatgaccaaagttttgagagagaattagaaaaattcaagacaaaaatagacatagtaaatttgcggactttgatgctttttggaaaaggcaatgcaaacatgacctttttcaaagatttgttaaaagaaacaagaagtcttcgtgttctatttatgcatgcaaactcgcccgaatctttcccacatgactttttcaaactaatccaccttcggtatctaaagttgaaaataccttatggcgtagaactatctctaccaaatgcaataagtagatttcatcacttaaattttttggatctagggaatagtatatgtattttgccaaaagacatgaatcgtctattcaatttacacctctttcttgctagaaaagaactttgttccaatattcctgggattggtaaaatgaagtatttacagaggttggaagagtaccatgttaagaaagaagacattgggtttgatctgagtgagctaggggatttgacagagcttggaggtgaactgacaatatttaatcttgagaatgtggcaagaacggaagaaggtaatcaagccaaattgcagttgaaaagaaatttgagaagattgacgctaatttggggtgcggtgcaacagacgacaggatctgatgttcttgatggcctgcaaccacattataatcttagagcacttggcataataaaccatggtggtcccactggtcctggttggttgtgttccgatatctatctatctattatatactaaaagtccattaaactttctataaacgctctcaagccgccacgtggctttctacaaacgctcctaggtcaccacgtggcattctataatctcaccgtcgattttcttttaaatcggtggacccactaattttaactattagatcttcattgaaaaaataaatctggtgtccccactattttttaaaaaaattgccgtgtttgccatcgggcaaggaacgtaagttcttttttttttcccggcggcatacgatacgtactccacgttccacgttagtattatttttttccttttttttattttgcaaacagttctggtgtccccactatttttaaaaaaaattgccgtgtttgccatcgggcaaggaacgtaagttcttttttttcccggcggcatacgatacgtactccacgttccacgttagtattatttttttccttttttttattttgcaaacagtactttttctttacaccttctgaaaacagtactactactacgcacatcgtacatacactaggggagtttaggagaaagtgttaatagatatgtaaaatcacatcttatcgatttaagtaaaaatccatagttaaatattttttctttttcttataatttttaataattcttttaatttagagatatgacatgtggtaacctaccagcttttatatgagtgtcacgtggtagcttaatagcgtttctaaaaagtttaatggacttatatatagtaaaagttaatttaacttcctataaatactctcaagccgccacatggccttctacaaacgttcctaaatcaccacgtggcattttttaatcacaccgtcaattttacgaaggtaaaaaaaaaaaaacgcagtacgtactccttccaccctccgaatctcccatcctctcctattttctagctaacttatcatattttctcattaacactcaatatatcaaaaaataattcggacatctaattgatcgcgactctcaaattataattttatactcaggtttttttcaattgttatgttatttataattaaatataaaattcaaaatccatatcactcatattttgttatctaaaaattagatcatgctgccgttctaactacaaatgtcagggcctaatggtacgcccataaacacttctaagtcgatctcgccttgtaacactataataaattaaaataaatctataagtatgacaaatgaaaataaaacatctaaccattgctctccacttaaatcgatggatccactatcttatatggttagatctatctttaaaaaaaaatcccaaaactccctcacattcctccattcctctgattcctctctccctaccattccttctctgttctttttatctccatagtaactaaaaccaacattatctttaggataaaaaaactccaaaaatggactccacctaacaagtctagctagctttccctctataatgtgcttttcttatctttctcctcaagctagcacttacagaaacaatataaactagactttaaaacactcataaaattttaaatcgtatattcatttatgatatttctacactattttaatttttaattaaataaataatttaatatctgtattgacttacattgtggaccacatctatccacctttaagcctccaataaataaaatagaacactaaaatttctcattaaaaattaaaatatctcaccttatgtttttaataaatggtcaacccattatttataccatgctagacatctaatctccttcttccaactccttatgtttcagattataagtcattttaaattttgtcaatgtcaaattacttgaattagtttataaaaaacatagtaatattttctacacaaacaatcatattataaacatattcaattttcttcacaaaaaaatcatattataaaacatattcaattttgaattcaataaaaataatttgggttgttgtaaatattgatatatttttcctcaacagtggaaatagttaatttctcttaacatgcatatatgggctatttacttatatttgaacttaattagatgcacttttatgaataaatgatctttttagggataaataaacgttcctaagatgatcataatatctaaattatacatatgatatctgatgtcactaatagattagagaaaaagcttataattatatcattttttcgtgtcataacgtgtaccccgtctaggatctatttgtcatacacagcacattgaaaatatttaagggatacctttatcccatgccaagttgtatggccattccaaattgcagagatcaaaacatttaagagacgctcgatggaatggaaatctataaaaaaataacatgataaaaataattgaagactgaactttttttttctaaatttaacatttttttaaaaaaattgaaacccattctaaatagcaatgttttaatattttaggagtactgaaataatgaaaataactaaatatttaaataaaatataatagaaaatttgacccttttcagcattatgttggaaacaaaatctaatataactaaactacaacttgggagcgataaaagtctcattttctaatatattttctggttgagaaaaacatttactgctaaactgtagtttcatactgcaatactatatacatacaattaaatcaatatttcaacaaattcagctaatttaattagatgtagtcgtattaggcatatttttaatagaaaatatcttcaattaatatatcctaaaattcataaagacatatatattataaaaagaaaaattggtactcagagtttagaaagtacaaaattatgttatgctaaatattttaaaaaaagaaacgcattatgtacaaatgatatatagtttcatgtatattttttttataaaacctaaactgcattgttttaagtaattttagtttacaatttatacggtggcgatggttactagcattaagagaaacaccacacaaattattgaaaaattaaagatgtttacgatagactaatcataaatatttctaatcaaatttttaacacacttaaatatgatgcccgcgcatttgcgcgggctaccttcctagttcgtataaatggcctgaaatgtctacatttagagggcatatcttggagaacactcccacctttggggcaactaatgcatttggaggaacttactttgatcaatattgctgggatgcgtcaatttggacctgattttggtggtgttacgaagaagagtttcttacacttgaagaaaattgaacttgttggtttaccggaacttgtggagtgggttgggggagatcattgccatatgttttcaaagcttttaagcatcagatgtgaagattgtcctaatctcaccgtgctcctgctgccatcgtttgagtgctctatctctgacacaaaagacataaacaccatatggtttcccaacttgtgttctcttaagattcgaaattgccccaggttgtcactgcctcccctgcctcacacttccatgctaacctgtgttactgtgaaagaagatgatacagatttgatgtattttgatggaaaaagtctgaggttaaatcgctacggtagtgctttggccttccataacctgaacaaagtagaagatatggaaattgtagacatgccgctcgtttcatggactggtctccaaaagctgaactcccccagaagcatgcaatcgatgggtctgctctcaaacctctcatctctcactcatctagaactagtaaattgtgataacttaagagtcgatggttttgatcctctcaccacatgcaacctcaaggaaatggcagtttacaatagtaaaaaccatcacccctccatagcagcggatttgttctcagtggtggcaatgatggaagtaatacctgcaggttccttccagcagctggaacaactctcggtggacagcatctcagcagtgcttgttgcccccatttgcaacctcctggctagcaccctctgtaagatggaattcccgtatgacatgtggatggaaagcttcaccgaaacgcaggaggaggcgcttcagctcctcacctccctccaatgcctaggattctatgtgtgtccccgtctgcagtccctcccagaagggttacatcgcctttcttcacttcgtgaactaattatccataaatgtcctgaaatcagagcgcttcccaaggaagggttccccgcatcactgagatatgtatttgcatacgagggcatcagtgttgatctaaaggatcaactcaagaaactaaaagcatcaacgccaggtttacgtggtaaagcatgtcctctcctaattcctgtatttgtcccttattaaatctgtaaattttcatatttaactaatttttgcctgttttgctattaatgatttacctcatgtggagtagtggtttcatcgctaaccaacttagtaaattaatgcgagctacacaagattacatgaaggccagcaatctagaggtcagttcatggaaaaccaaggcagtccttcattttgtggtttctttctaagttcaggcagctgcttttagtttagtccatatggttgagctgttttctttatctgctatctgaatcaatgctatattagttagcttacattctatatatccttacatatttttttcatctcaaacagcatcacaacagtttgcacgcatgcagctgcgtaataaatctgaaacccgcccgccctgctatggtctgatgtcatcagatccaacagcatcaattaagccatggtggtcagtagcatcacttctgctcatatcgtttgtttttttttcttttctgtagtttctcctgaaactagtactccatccattctaaaatggcaaaatatatcaatatcaacgtagtactacgaatgtagacagccttcatcgtattaggtggtgtctaatctattattaggacactatattttgaaacggaggggatagcttttgtaatttctctcgatgtcctgaaatcagatcgctgctcaaggagcattcctctcttcattgagatatccaagggcaagaccgcaagaggatgcagcatcgtctacaggatcaactcaagaaaatagctaggagaattagacccacatttggtaaaagtgccagggtgatccaaagtgaaatttaggtaataaaaagtgacctaaagtgcaattcactcaataactttacaacgcactgcagaagctgatatgttctctgttatctttggtagcggtggaggcagcctaggaaaatctggctatactgagatgtttgtcatttaaaaagagaagtctatcttcaattaaaataacaccaaaatgcctttatgcattcatcaacgagccagggaagcatttcaaggtactagattcaacaattcctgtaggacaaatggtcattccactgttcatgggtattgagagtatagatagccatgtgggccgcccggcacagcccggcccaggcccggccgtgcctaggccgaggcttgtcaggccggcacggcccgaccgactcaccgggccagcccacgtgccgcactcacggcctaggcacggcccaacacgcctcgggctgtgccgggctggcccgaaggcacgatgggccatcgtacgtttcctcagaataagtctaactttcctccctcctattgggctgtgacatatatatagctaaaaaagtctattttacctccctcttatttgggctgtggtatataaatagctaaaacaaactcaacgcacccattggtgcgcggactaatgtatggcccgtcaccatcgtgagcttctctatatctcaatattttttttcatatttatttgaaattgcctgcgttagttcgtttgggttgggaacccatcttctccacatagaaaacataacggtccattagcacgtgattaattaagtattagcaaaaaaaaactttcaaaaatggatcaatatgattttttaagtaactttcgtatagaaactttttgcaaaaaacgcaccgtttagtagattgaaaagcgtgcacgcggaacacgagggagagaggttgggaacacagagtaaagaagtgcgttttttgcaaaaactttctatacaaaagttgctttaaaaatcaaattaatccattttaaaaaaattttctgctaatacttaattaatcacgcgctaatggaccgctccgtttcctgtgtggaggagatggttcccaactcgaaggagcgaacagagggttgggaaccactcccctttgcacgcaaaacggagtgatggattaacgcatgattaattaagtattagctataaaaaacttgaaaaatggattaatatgatttttgaaagcaacttttctatagaaacttttttccaaaaacacgcgccgtttagtagtttgaaaagcgtgcgcgcgaaaaacgagggtgatgcgttgggacataggggaaagaactaagacagggggtgtttagataattagatctaagggtgtaaagttttggcgtgtcacatcgggtattatacagggtgtcgcatggggtgtttgggcactaataaaaactaattacaaaatccgccagtaaaccgcgagacgaatttattaagcctaattaatccgtcattatcaaatgtttactgtagcaccacattgttaaatcatggagaaattaggcttaaaagattcgtctcacaaatttatcgcaatatgtgcaattagttatctttttagcctatatttaatacttcatgcagatatttaaatgttcgagttcgacttgacagggtgtaaaattttggggtgggatctaaacagggccttagttttatgccagtaaaatttgtaacaaaaaattcacacatttgaaatgatcccttcaatacttccctcatcacttacaattttaataatttttttaaagttatgctgaatacctaaaatagatattattgtatattggcttacaaatttatatctaaaggaaaaaatgtagcaagtgaagaaattcaaccacctttttcagtcctttgtcagttcaaaattaccttcagaacccaaccaggacgtacctatgtatttgactccaacctgtctgataactaaaaaaaaaatgtcctagactccatgatgtaaaatttgctaggttaaattagaccagattttattttaagaattgcatgtaacattttctttttttaaattattcttaccttaatttttcctatctaatatttaatctgcattaattttgcttgtaaaattttcttgatggctaacattagttttttgttcttttgcctgtcattctcctcttacatgcagcgcaggacttgcccgtccagtagggcacccaagacccagcacgcgcgcccaacgtcattcgtccggtcgtcgcacgtcctttgcagccgctaattttcctccctcctattgggctgtgacatatatatatatctaaaagtctattttacctccctcttcttgggctgtggtatataaatagctaaaataagtctatttaaggtccctattctttggacaattacatttatatgtctattttagtccctatactttatgtgccgggcctagcctgccggcccatcgtgccgggccggccggtcgggccagcgtgccggtggggaggcccagacacggcccggcagtcgggccatgccgtgccgtgcttgggccgggccaaaaagccgtgccatgggccgggccttcgggcctcgggccttatggccatctataattgagagcgattttttttttctgtggaaatctaccaatccagaagcttatccacaaatcatcaatttaacatgcatcatatatggttcggcaccattcagattcgccagtggaaactgattctatgtacgcctactaacttcaaaatcttcttattttcataggcaacctgtccagctgttttcgataacagaggtacatggcgatgtggttatgtttgtagctttcttgggagttctgaacaaaccatttgtaacacattagcaggtgattacatggcttgttttcccacagaaattacagttttgttgttaaggggcaatacccgaattcttggaggatcattgtttccatttcatttcgttcaaaagaaatttgtttccatttcatcatctggtagactggtatgttcatagtgttagttagcatgaaaggttcggatcatgtgatcacgacctgacagcttgcatgcatgtagttgttgaggttagtttggattaggttagtctatccatgcggatcaggttagcctttcctccacatgcgataacagatgtttgttagagtttgttttctgttttctgttactgcatgcagtcgtttcatcaatctcggcttcggttgttctcagctgcgccgaactctgtatcgccacgatgggggctgttcccatcacatatatattaacacgaaggcgacgcaca

SEQ ID NO: 7242 - DNA, 6737 bp, Oryza sativa
gtatggggagagaggaaggggaagcagcacagagcactggagcagcaacatcagctctgcagttgctgtgtgtctctgagatagttgaacgagtgttggtcattcttcagagttcaggctagcgtgcaagatggaggtagatgtgtgtcgttaatggcttacggcatttgaactacgatgtattaaatactgtttcaattggaaggaatcgctctgcctccacgcgtgctcgtccgtcgacaatcggttcgccgccacgcacaatgtattccgaagaagcgctgctgctctagcagaacgtactacgagatccagaactaataccaactaaacaacccgtccgagattaactccgggtgcaaataaatctcaaattcaaattactaaacagccctttctatatttttcacaaataccaaacttacctttctatatactgcaagtatatacttacagtagaatgtaccgtaaaagttctctaaatataagtccacaaagttttagatctgataacatcccacaatctattcgacatatatctatcactgtacatcataaatatggccaaagttttgagagagaaatggaaaatttgaagagaaaaatagacatagaaaatttacggactttgatgttttttggacgatacaatgacaatatggctatatttttcaaaaatatattcaaaaaaaacaaaatgccttcgtgttctatttatgtttgtaaactctatcaaatctttccctttcaacttttcaaaactgattcaccttcgatacctaaagcttgaagtacctcataacttagaaatgtctttgccagccacaatatgtagattttatcacatgaagtttttggacctaggccatggtaattatattttgcctgacgacattaatcgtctagccaatttacattatttccttgccaaaaaagaactttgttccaatattcgtgggattggaaagatgaagtatttacggaggctgcaagaattccatgttaagaaagagcgcactgggtttgaacttagagaattggggtatttgaaagagcttggaggagcactacaaataaataatcttgaaaatatagcaacaacggaagaagcaaatggtgctgaattgatgttgaaaaggaatctaaagacactagaactagtttggggtgcagagcagcagaatagtggatctgagattattgaaggtcttcagccaccttctaatcttagagcatttggaataagaaatcatggtggttccactggtcctagttggttatgtgatgatatttgtgtgaaaggattgagatctctccatctagagggcatctcttggggcactcttccacctttcgggcaattcatatatctagaggaacttactttgatcaatattgctggcattcgtcagttcggaccagattttggtggtgttacacagaggagtttcttacacctgaagaaagttagatttgttgccatgccagaacttgtggagtgggttgggggagctcattgccatttgttttcaaagcttgcaagcattgagtgtgaagagtgtcccaatctctctatgctactaccaccatcctctgagcgctgtatctctcatgcacaagatataaatatcacttgttttcccaacctatgttctcttaatatccgaaattgccccaagttatcactgccccccatgcctcatacttccactctaacgcatattattgtggaaggagattatcaagaagtgttgcatttggaagaaaagatactgagtgtaaatggttatggtggtagtttggccttccataacctacagaaagtagaaaacatgaaaattgaaaagatgtcacacatttcatggaccgatctccagaagctgaactccctatcaagccttaccatcataggatgcaaaagcttgttgtgcagtgaagtagacgaaggtgttatcttccattcagttgagcagctcaatctctataagtgtcatcttgccggaatatccttggcaaagctattaaactgtttcccagctcttacaaagttcgagttgaacaggtccggtgaagctcaagaggttgaggaagcagaactgcgtttcccgtcccccagactgttgcgctatgtcaagatctttggctacgagaacctggttctacctatggaggttggagggagtttccaggatttctcctcactccaagaactcgaattttggcgttgcggcaagattttcgcttcgtggttcatggtagaggcaggaactcatcacactagcaagcccttcctggctccccttaaggaactcactatttacagcgagtcaagcgtgcagtcgatggctgtgctctcaagcctcacatctctcactcgtctgcgactagtagactgtgataacttaacagtggttgggttcgatcctgtcatgacaggcagcctcagtgaattggtgatttataataagccagatatagacgataataatcatcgctgctccgtagcagcacatttgttcgcagcggtgtcaacgacgaaggcaatacctgttggttcattccaacagcttaagaagcttgaggtggacagcatctcagcggtgtttgttgcccccatttgcagcctcctcgcttccaccctctacaggttgaggttcacttatgatttgtggatgaaaaatttcacaaaagagcaggagcaggcacttcagctcctcacctccctccgaaatctagaattctatgagtgccaccgtctgcagtcccttcccgaagggttgcatctcctttcttctatctgcacattaggcatcgtcggatgtcctgaaatcagatcgttgcccgaggagggcatcccagcttcactgaaaaaactactagcaatgcgttgcagcgtcgacctgaaggatcaactcaagagattagaagaatcaaaccaagatttacaagtattctacatctgatcacccaaggtaagacgtgatgtcccaactcctttgttttttactctttcatctgcagttgttcatatttaaactcttttttacctgttcgttgttactgttgatcatctagcgagccaccactactctcttttgaacaatgaagtgcagatacacattctaaagtcatttgaacaatgataaaaaatcaaatccgatgggaaaaaacaagaaattgctagaacatgttggacaatcgccatcttttcttactgtgcgcaacaagcctaaccttggcattatggaaactttgcagtaactttgcagtaattagatcgtggatgttctgtacgttgctttattgggagtgatgaccaaaccatttgccacacatagcttgtttttttcaagagaattacagttttgattaaggagcaacacccaaatgattgtggagctaacctcgtttgtctctatttcatcatatgttatgttacagttttgattaagcagtattagatttagatgagagcaactgtaattgtttatggttctggtaacacagtttcatggtcattagtaggagaattctttgaccttattaacttgttccctttcagcaaagcattgtggaatggtgttttttttagcctattcagaaccagttttttacataatggaagctttattaatctcagtaaatttcatcaagtgatacaattattctgagagcacattcggcttctgcaccaaagagtacacacagccaacaagaaagaaacaaaagataaactcatcatccaaaatagcagaaacaaaaagaactttaggagcccgctaaccgtagcctagaacgtcacccatgtgctggggtagaaaactactatatggccactaactctaattgttgacaaaccgcaatgatagtaccctgcaaattgaccttctgaaggatagcctatgagcggagccaatgtgtaatcaaaaagataacctgcaaaggagaagatatgttttttcctttcaaaaaccacattatttctgaaaagccaaatagaccaaatagtggtagttgcacctaataagaccaaagatctcaaattgcgtgattgtcttcttatccaatgcccaaacatatgagttgtactattagataaaactaatattcgaagcaaactgaattaaagaccaaaccgcgcgggcaaaataacaatcaaagaacaaatgattaatagtttcatctttgtggcagaaagaactagacttgtttcctctccaattccttttaatcagattatcttttgttaagattactccatggcgtaagttgtcacgcccgaaaattcactagtaatttccgaacttatttgtgcataaaatcctcgtccaggaatcagccgaggtacacaaactaacaatttaatatacagattcatcaaaatatctaaaacgataaatacttactaaagaggcacttagtcctcaccatgaagaaaactgcagcggaaaaaaaaaaatctagcgaagctccggctccactcccacaggcagctcaactggggtataagccaaacgtcttctccttctggatcctttttcttcaactgaggttgattgattattgcaaggtgagcatatgacatactcagcaagccacacagcaaatatgcaagtgcgcaaagataccaaaggttggcataatataggctcatttgcaaaagcagcatttagcaaaacatttaagagaagtaaaacagtggagtaattaatcagaaattttaatcaacactgaacaacacgcccatgctgctcaggcctaaccattctgaaacaaccatacccggctgtacagatctaatctccaatccaggagctaagcaaattattaccagatataacatccataattattgtgagaagtgtgggactaatcacgaaaaacattgctcaacccgcccataaccgtgggcacggctattcgaatagttttactctggccagaggtgtaccactgtacccacaagacacagccccacatcatgtcaccatgtgcctcagtaccaccacggtacctcggaaaggggctgtgacattaccccttgcataacacaatccaccgcagtgcaccattcctggatcataatcacccccttataaataaggcatggactccccagcgacccccgtgggcttatctccgccacttctcagtctggtgccccgcaatgaaccatgctatacgaaaggtaaagccgttgcccacgctggcttgtggttggcacgattaatgtttcacaatagtagctcgcgaaccggtccttaattgtcatgagcacgactctcaaaaccatgtgctcacaacccaccattatcaagttttagttggcaagtaattaattaaccaatcacgattgaccatcgtgaactatcattaagccatcattaaataatgagtcataagttatcccaatagtgtgctaatgtttctaagcatggctaagcaatcatatctaatatctagctgaaccaatatataaagctcaacttgtcaagttataataatccaaggtatcaaggaataaagtaatcaatgcaaacaggccataacaaaggaataggttcacaccacccagtgacattcgaaaataaatgcacagttgaaataaatagagaatttaaatataggatcaacatgctcaaaggattgtgtttaggatctgtgtgacttgccttgcaataatcggtcttcaattaatcttcttgaacacttccggcgcactcacgaaccttcgcaacgacggaaacgacaagctaacacgcaaaacgaagaaaaagactaataaaaaccaaataaacagtacatataaagtaaacaaacatgtagatcataattttagatgaattatgagacttgaacggcctcattctgacttcataagaatttattatgaattttacaagattaaatctaattaaagcccatttaaaaagaattaaataaatttaattctatttatggacaattttaatatgtagatctttattttatataatttttgcaacttgaaccacattaaactgagttcaaatgaattagttatgaatttttaaagattaaatcggattaaaacacttatatggattttaattgaattatgacgcaataatgaattatttttgaaaaggaaaaggaggattattgcgtcagcagctagggtttcgcggtggaccgggtgcacggcaacggttcatgggaacgaacggccgagatcaaccctatccaaaacggacggccgagatcgatcggtccacgaccggctcacggcggacggtcccgatgacgtcagcgacaacgtcagcgatgacgtcagcaccggcggcgactcgggcggctcgggcgcgtatgctcgccggcgaacggcggctctacggcacaaacggagggcaccaagacgtagatcacggcgcggcgaactcaccgatgaccaaaacgtcggcggaagaccaacggacggcggcggcgtcgaggaaaaggtggcggagaagatcgggtcgacggcggcgacggtgctccgacggtcttcggcggcggtgaagcggtggacgaggacggcgacgcgacggcgaccacgatggcgatcttcccgagcgacggcgacgtctggaacggcggcggcgcacggctggagcgacggcggcgacggcggcgctagggcacacggagctagggcgctacggacgacgagaggcaaaggcgagggtggcggcgggtagaggagacaccggggatcctta

SEQ ID NO: 7243 - DNA, 7024 bp, Oryza sativa
tgtatcgtacaatctcatacatacggacagtagcagctagcgtttgtatgttataaacatgtggaagttattatttttttaataatagatctaatctaatggtgtaaaataacgggtccacaaatttaagtgaaaatcaacggtaagattagatagtgccatgcggcgacttaggaatatttgtaggagtgccacgtggcggctttagagcgtttgtaggaagtttaatggacttttagtatataatagataatagatagatagaagatagatagatagaagatagatagatacaccatccattgaatacatagtgtctacatatagtgtctatatgacatgacaagtatggaaactaatagtttattggttggggatggcctaattagtcgcttgactgcacgctcgcccgaggcagcggggcccaccagcgcgtctgcatcgccatccactcggcccgcgtccgccggtatcaccaccagcgcgttcgctccgcttgtgttccccgttgttgccgtcacgctcatctgccgtcgtcgcgctccaccgggccgccgcctcatcgaccatggccagcgtctccgtcgccctcatctgccgtcgtcgcgctccaccgggccgccacctcgtgcaccatggccggcgtctccatcgccctcgtctaccgttgtcgccaccctcgtccgccatggccgtcgtctccatcgcctctgctcgccttggcagtggcccttgcccaccgcgaccgcctcggctgcggacctcgtccacggcggcggtggccgtcgccgttgtggttctcgtccagcccggccgcctgaataagcaacccggtgcttcaattggtggccggggggccggccgtgttcttatcttaacgggttgccgtggtcaccggtgtcaatcttgtcattttggcccacatccacggcgccgggccgctgtcctggtcttcgtccatcccgctgtcctcgcccacatccgttgcgccgcgcaatcttcgtcttcatccatcttgtcgtcctcacacacacccgtcctaccaccatcgtccgcctttgcagcggccgccatccccgtccaccacagtcgtcgtctcctagtacaccagcgccagacgtgcacgcgggccggaccggatgaacccggcggccatgatgtactgatgttcgtccttggacttgagcacgtgaaggataaaacattcccacgcatctcctcctccggcaagaaagagagtagagggatggtgggcctataaaaacaaaaagaatatttgtgttacagtaagtatatgatatatctattgtatcacttagctataatgctttctccagggattcagctcatctgacttcacccctcatgacggcggagagcagtcgaggtcatccaactgtccacgttcgattgaaccgtccgcccagaaatacaggtcagccgcgtcgtgagtctgggccaaggctggcccaacaagcctcgtcccagcgccatcgctcctatcttttttaccgcgaacaaacgcgttttggcggtcgcgctcgcctttttggcgccaaacgaggccatggccccaggcgatcatctgacaacatgctgggacagcgaaccacggattcaaccattgatcaagcacaggtgaagttctggcctcttctcttccttttttttagcaaattatttgattgtcttccacctcctccattagactgttggaattcatcaaagaagcctccagcaaaatctacatatttgagatggaagaaaacaggtctgtaagctatggttgttacttttttcaccatgatcgggtagattttacttgttcgatgaccaccaaatcattttttttgttcctgtagagtgggtgtgctacctagtttgttacctgaagttggcatggaattcaatactgttgatgaggcttggatgttttgggttagctatggtggtcagaaaggtttcgaggttagagaaaggtactcaaacaaaaggaaatcagatggaaaggttgggtcatgcatatatgtttgtgcattttggaaaaaaaaaaccgttggttctcttgaacaagccatatgcccagaattggaacataatttcattgcagtgataagttacaaatggccatttcatcattctgttggacaagtcattctcattgcaaacaatttatagagtttttctgctttctatacaaattacagaacacatgcaaccccatttttcagaacaagtggtctgcttctgctgcccgtgtaaagaacaatctatcattcttataactgaacattcagtatcttcagaatgccattcggtttggtcagacaagcaacaaagcaacactcctagacgcagcatcaaggagctgaagaggaggccgctgtgttcctccactcgctcactgctgagagatggcgatgaggagttcctcctctccctgcctgccgaggcccgacgcaggtaattcagatcaacgagcagctcaggcaccacagcttcggtcttcctctgatcggcgaaatggagccacgcggcgcgcgcactcccctcctccattcgccgcgcgctgcctgtcgcggcgcatggcctgctcgagctccgcgcgcgcacatcgagctcgtggcaccgatgcgccgtggccgtgaccgggcgctgcatcttgcgcgccttccggtccccatcttctcagccgagtaccgcagcctgacggcgagagcgagggcggtgaggaggacgagcacgacggtgagagcgagggcggcgaggaggacaagaatgacggcgatggcggtggccagacgaggagtacgagcacggctgggggacgaggcttgttgggccggccttggcccagactcacgatgcggctgacctgtatttgatgcgcttcctgggcagacggttcgatcgaacatggacagctggatgacctctactgctctttgccatcgtgagggttgaagtcagataagctgaatccaactccagatgatgtgcccatctattgcagccgatagttggctatgttattgacctcattctaagctcgtaaaatctaaacggagaggcctctccatttagcgctatcgtgcgacgcgcgtggcagccgtggtgacgtggcgtccatcacggcgcgcgccgcgcgtcccgaccggccgaccgagcgagctcacgcgtcgccttttccgaccgaacgagcgaagggtactgttcaaattttttgggtggcgctcgacgagagagagagagagagaggcggagagtgagagaggcggaggtggcgtgaatctctggcgaaatccgtggcggaggcggcgtgaatctccgacgaaatccgtggcggaggcggcgtgaatctccggcgaaatctgtggcggaggcggcgtgaatctccggcgaaatccgtggcgaaggggggggtgcggggagttgctgttgtttcctcccatcgcgccggcgtcggcagagtcggcggagccgacggtttcctctcatcgcgccggcagttgcggtgggaagcgtaggctgcggcggaggtagttttctctcctccaaatccggcggccatttttttcggtaagttgtggcggtttcattgcggtttttttgagccaaagaggtggagtgatggggctgtttttccctgcgttttttgtgccggggaggtggagaggtttgggcagtttttcactgcgcaaattgcttctcaaacctcccggtttgttctcccctattccctcatttcccctctctctctccctcattcatcaggtgctagttcatcctctcggcgagcgcaaggttgcggtggaattcgccccctcaagcgtcggcttgtggatctcgggttccatttgaaggtatttaaatttctctctctctggcttatgttgatttttccggttgcaagttgattactagtgattactatcatccaaaatgaatttctaaaattattactaacattattagttgcaagttgattattagttgatcgatggttagttgcaagttgattactaacatccaaaatgaatttccaaaattattactaacattgttagttgcaagttgattattagttgatcgatggttagttgcaagttgattactaacatccaaaatgaatttccaaaatgattactaacattgttagttgcaagttgattattagttgatcgatggttagttgcaagttgattactaacatccaaaatgtatttccaggaatgggaaaaagaaaaaccattgtacagaaaggcatgttaggcaaaccagagccaagtgaaaaaacaagggggggttcgcaacgtgctaagaaaagaagtattggagatgatcatgcagatgacatagaggaacctcctccaaaaaggagcagatcaaaggtattaagcatccacctttttttatgcattttttgccctcaagcagtgtttcgctttttccaatgcactatattttcttatgatgcattaagttacttctcactgtgaattaagttacttctcactatgcattaagttacttattttaaaattcctatgagatttccaacaccagtactcatggctatgtaactagggaatgcaaattcaagtttatttttggaagtaacttgcatgtttctaggaagtaactttttgagttttataacgagtaactttctgttcaaattgctctgagaggcaactagatggaatgtatcatgctgtgtaactagggaatgtaaattcaagtttatctggaagtaagttgcatgttcctaggaagtaacttactgttttgttagaagtaacttcctgtcaaaattactttgagattttctgttaacaagtaagaagttacttctcgatgtgcctgaagttacttctctctttgcattaagttacttctctatgtgcattaagttacttctcaccgtgcctaaaatatttttgatgctgctgcttgagggcaagttattttctagaactaacttaatggcaagttacttcttggttcagttacccttttttcaactgttttatatatgttttttaaaaaataaacaaatgctgatgtttttttatttttctttttgttgttttatacatttgcagcaagaaagtagcagggcttcacctatgaaacttataaagttgtatccccatatgagtggcgaacaaaagcgactaatagagggggctggcttccatggcctcgtagatctcaagtgctcgaagctcagacctgatttgtgcagctggttgatggagcatttcaatccagcaaccaatcagcttgtattccctggacgtggagccatagatgtgaacgaggagtcagtgaagtctgtacttggtatcccaatgggcgacaaggatgtctcatatgagatggaatctgaagctacagaatttgtgctgaatttgcttggaatcaatgatggtatctcaccatcactgacttctcttgggattcaattggagaagttgaagttagcagatgacaagtacctgcgcatgtggatcatctacgccatttcttctgttttagcaccaacgacggcaacaacagtcagcccaagatgctatccttctgttgttgatgctggaaatgtcaagaatcttaattggtgcaagtttatcatatctattttgcaaaaagctgctaaagctgggaagaataccaactcagcatgtctcctgtatatgatggtaaaacccccccaaaaaaaaaattttggggggttttttcaatgctcgcctttttttatttgatcactgtcccaatgtaacttttatgttttttagaagtaagttaagctgtccaggaagtaactaacatgttcctaggaagtaacttctttctgttaaattgttataaataattttctgtcaagtaaattctctctgtgcattaagttacttctcactgtgcattaagctacttcttattgtgcattaagccacttctcactgtgcattaagttacttcttcatatatgccctgccacatctttttttccaatttgtttttaaatttaaattacatctggaagttaacatattttgtaggttttaaatcaaacaagttatgtactttttttaattaatctaaatgctctaatttcttttgtagattctttatttggactcgctttcgtttaaaaatctcaatgttccagtggagggttatcgagctactgtttggacgaatgaaatgataaatcaagcaatattagctgacacatcagcagacggctcctttggagctttaccagtgagttttttttatagttggcatacttgcatcatttttagttttttgtttgttcgtaacttacggattttataattgaaaatatagcttaggagcagttttcagcatgaagggaccaatttgtttgggaacaatgtagatttttcaacccttcataaattcaaatgtgcccaatactatgcagcagcaggtttatattttttccccacttctctgtttaactttttgtacccttggtaaatgtaacatcaacaaactgcaaaagtaactttgtgaaatctgcatatgtaacttctctgttttttctttttatacaggaaaaggacagaattgtgatcgctgtgcaaaatttgtgtgaagggttttcaggtttggtcacgaaatttgtgagacagatttccggccttgattttgtggatcctaggggtagccaaccaaggaaaatgcgaatgaaccggaagaaacttgcacaatggacaaaaagagttcagcaagatgaagatctaggtttggttttttcactatgtttctattaattattgtacagaataattaatttagccatgctctaccactctgcacaatttgaatctcattagtatcattgttctaccacactgttttttttacaatgatttcaactgaatttttagtttttttacatttgtccaaacaacttcctacaatacactaagttactttttgttcttttttggtagatgtaacttcaagtgatgatgaagattttgttgctgat

SEQ ID NO: 7244 - DNA, 4589 bp, Oryza sativa
ggaaagagaccgatccgattcgaactcgaatcaaacacattccaaaccgatttagccgatgtttccaaaggggaaaaggtggaggagatcccggagatcgtttcccctcaatcaatttcaccagaaacggaaaggaacggccggatttggaaggagacggcggcgcttgcgctagggtttcgggcggcggcggcggcgcgaggaggaagacaggcctgacagacgggccccacctgtcagcggctgagagagaagagtggcggctcggcggactgggccggactgggccgaggagggagagagatagagagagggagggttttgggccggctttcggcccaaagccaaaaaaaaaaaacctttttcaatttaaattattcatgaaatgcaattccatttattaaaaacacttccttagctcaaataaatcccagaaaaatctaggaattatagaattaagcaaagtatttaacaaaattttatctagcccaattttatattgagatttaacaaattaaaattagatcttctcttttaggcttttaaaatcatttctaataattccttttaaacaacaatttataatttaaggattttaaacaagaaaagcacttaacaattataattagatcattattgtcacgaccggaaataacccaacgggcgttccttacgtgcgtgtattattccttgtcctaggaggcaaggtacaccaaaagttgatacaattcagagtttaacaagcgaaagcgtaaatagttatttattacatgggcagcgacggcccagcacactcaaagacaacgaaaaacagcggaagactaaggcgacgaccacaggcgcttgacggcaggcacgagctagacaccaaagccttcatcctccaggggctcctcttctgggtttgggaaaaattgagcaagactgagtacaaccaccgtactcaacaagacacacccacaagtgcagcataattgcaaaggagtacaatggagttataatataggggttaggttttgcaataaacagcatttaaaagactcttagttgctcaaagctaaatttaaaacacgatcctagaactatttaatattattaaacaaggccgtgaacccacacgaacctgccttaacccaaggcctacgatgattcagaccgaactggcaacccgaccctgggtcccagctcgtcccaggccaacccaggccaaccattccacattttagttgttaagcaggttttaagaattaaaacactaacttgggtacattgctcggcttgcccataaccgagggcgcggctattcgaatagattatactctgatcagaggtgtacatctttacccataagacacatcttcctcacgtgtaatcacgtgccacataccaccacggtatacaggcggaagacgtgacatagttcccaacccatcctagccatagacaagagtaccgacccaatcccacctacggccggaacccccgggacaggcaggcaggactgagccccctagcagcaggacaccggccctgtgtcatgacatctcgactaccgggccgcagctcgtgtagccttcatttgccctggagatgtccatcgaacccccgacttcgtccatctccatccgtgtacttttgtttataaccagactgagccacaaactaagccttacccactagacatgtggaagtacggtagtgctttgcaacagaggcccgaagaccggtccttatatggccgaggtgctactatcaaaaccatgcaccccgagcccagcctaaaaccattttggggattttgaatagagggggcggtatgaatccaattccacaacaatccaacaaatccaatgtgtccaagtgatatgaatattaccacaatctagagttttaaaaccacctaatgttacctaattaatcagcgaagcatctacctaaaatcatactagtgataccacgagtagagtgtccactagttgggggttttgtttatcctagggtgaacaaggtaataataacaataacaataataataaggtcataacaaaggtaaataggcatggctaaataaaacagtgataacgcgggaatttaaataaagcgatgatgcaataatttaaatcaaaataatttcataaattgggattcaatatgttcaaggatgatgtgtcttgccttgctcgctttcccaaatgccggcttcaacttccacgaagagcggatcctccgaagctgcagcgtctacacgaccaacggaaaagaaaaggcttttactctaacaaactccatataaaaagcattaacaaagcacaaaaatgggttcttgacttcttaaggaaaaattagagacttgaacggtccaattccgagttcaaatggccaagttatagccatttgaagtttatatgctctttaaatgaatatttgcgaatttcttcatttaaattttaatttaaaattggatttattgcgtcagccgaggggaggggcacgcggaccgggtccacgggagtggggcccacgcggcagcctcacggtccacggtggaccgggtgcacgcggcttactccgaccggcgccgcgggccccacgcgtcagccgcacccgagggcgcgggcggctgacggccgggccccacgcggcagccgctcggtgcgcccgaaggcagccacggcggcgcggccggcgggaggcagcgccctcgccccgatggtcgccgccggcgaccaccggcacggcggagcagcggccgagagaggggagggaaagggggaaacgaaacggcggtccacggctcaccccgagtcgacggcgacgacgaaaacggcggccggagcggaggaaggcggcggcgcggctcgggtcgacggggtcgacggcgttccggcggtcggcgagcgaagcggaggggtggacgaggtcggcgaggatgcggcgaagccgaaggaggcggcgccggggcgggagatggtccggggcgacgacggcggcggaccggagctcggcggcgacggcggagagagagtgcgacggcgcgggctcgattctgacggggaggaagggcggtgtcgcgaccgggaaaattgccttttcccgaacgctagtgtattaatccccgtcccaggaaaagccggggtacaccacacaaacatgatataagagacacttctttattatatcgataatatttacattattacaaaggcacttaaggcctgacaatcaaaaataaacagcagcggactagcgggcctacggctccatcttcacaggcgctcaactggggtataagccaggactccacctaagacatcttctccaaagcttctcttactgaaggggggagaaagatagagcaagaatgagtacaaccacagtactcagcaagccacaccggagatgcataattaatgcaagggagtacaaggggataataagataggggttaagttttgcagtaaacagcatttaaaagtcacttagttgcccaaagccattttataaagacgatcctagagctacacagttttattaatcaaggccgtgaacccacacgaacctgccttaacccaaggcctacgatgattcagaccgaactggcaacccgaccctgggtcccagctcgtcccaagccaacccaggccaaccattccacattttagttgttgagcaaattttaagaattagaacactgacttgggtacattgctcggcttgcccataaccgagggcgcggctattcgaatagattatactctgatcagaggtgttcctcacgtgtaaccacgtgccacataccaccacggtatacggacggaagacgtgacatagtttccaacccatcctagccatagacaagagtaccgacccaatcctgcctacggccggaacccccgggacaggcaggcaggactgagccccaagcagcagcgcaccaaccctctgccacgacatctcgactaccgggccgcagctcgtgtagccttcatttgccctggagaatgtccatcgacccccgacttcatccatctccaatccgtgtacttttgtttaaaaccagactgagccacaaactaagccttacccactagacatgtggaagtacggtagtgctttgcaacagaggcccgagcttaatccttatagtggccggggtgctacttcccacaactggcatgcacccaaaccccaccgaaaacaggttttaggggttttgaaaggggaagagaggtgtatgtccaattccaccataaaccaacaattccatagtgtccaaatgatatgagaattcccaaagtctaaagttataaaatcacctaatgttgcctaattaaccagcgaagcatctacctaagttcatactagtggaaccataaatagagtacccactagttggggttttattttcctagggtgaacaaggtaataataacaaatagcaaattaattaatggttctttaaaaaccaaaaaaccgggaaatttaaaaaaaattaaagggggccaattgggcgcttaaaaatttaaaaaaaaaaaacccaaggtgataacgcgggaatttaaataaagcggtaatgcaataatttaaat

SEQ ID NO: 7245 - DNA, 40745 bp, Oryza sativa
gtgtttgtttctctacctgcattgttgcttcatcgctcatccaagtttttattacaacttgtattctcacgtatcaaccgacaaccataacaatatacatgaatacgtccacaggtacaattttttttttcaaaaacgcatgaacatagaaaagcatgagaattataagaattaagtagcgtaccaaggcttggtttagttcccaactttttcttcagcttccaacttttccatcacattcaaactttcctacacacgtaagtttctaacttttttctttaaacttctaattttggcgtgaaactaaacacagcccaacttgaatcgtaggcaattccaaaacgcacaaatctttcgagttgttatgaagcctcaaagaaaaatattaactgcaagatttgggagtgacaaagttaatttcaagcagttgaacgtcgtgttagaaatcgtccaaaattctgatggtgtttaggtaattcaatgggattcctattagttcatttctttgttcgaaatgaccacatgagaaaatttcccatatactaattcgtatcctatgaaattctttaaaaatcctaaattccaaataaacctctgaattcttctcactaccctcagttactgtgattttcctgtcatttactcatttacattaacattggttgtctctctcaatttacagaaccaattttgctttgccccattttctcatctctcccttgccacatcatcaatatcaccaactcttgttgtctgatgaaagctacttcttctgcataacacccatgaactaaatcctgcatacctctgctcattaaaaccgctgccattgttgctacacacatgaatgtacaaacaacaacatccccaaattcaattttggcatcgcaaatctgtcttggtcccatctgatctgacacacccagcccaagaaccatccacacaaacccaagagactactcctaccaaagatcaccagggaagaatcccagaaggccatatgagaattagaattaagacacaagggcatatgttggcagtacggccatgaaatgtcattgtcctgtatatatatgagagagagagagaaatggggggccctcagtaattaaggtagcaaaggctacacattttgtgccgcacaagatgccgcaggaggtcactggctgctacagtggatcaggtagatccgtggattatacaacggtgacgccgcatctgctgcctgattatcagtgagtggccgggacgcctgtgtctccggccaaaagcgtccccccccccccccccccggattctctctgtccctatgcttacctcgcacgcatccaagcgcagtccatgaccgcgaaaaaaaagaaaagaatcatccaaatagtcgtgaaaaattctgaaaatgatctcgattgcgtgtttgttctccgtggagtaaggaatttcactcgtaagacgagtgttgttttcggtaatattcaaatagttatgaaaaaaaaaatcagagaggataacatattaccatataagcttagtttttgtgtagtaagaaattttgctcctaagtaagtcgagttgcgcaattcggattcgggtactaaactggggaggagggggggggggtggagctcaggtgttgagctgtacatcgacggatgttagcgtgtcactgttgctccaacttgctgtcctccagggtggtgtgccagaattttgacaaatcacaagtggagatcccacttgggttgtgtcatggtagctaccatgtaatactacaagaggacaccagattttgccaaatgacacaagctttggtggaggagtgggggtagcatatatattcaggcatttagggacattggatcctagatgagaggaacatgcatgattggtactactactggctagcaaaggaccagtgtctaattaaggctagtacctacctagagtggcttagaagctgtgtgatcagggacacttagtgacaggacaaggttgttggtttcagcaaaatgttctgaaggagatcaggaaattccagtgaaaaaggttttactttgaggcaattttagctgcaataatgcaggtttcttatcaggcttccataggcaaaggttcaaaagtatgtatcaatttcttttttcttctgacactataatttgatccaaactgttgatggcttgcttagggaagtggtatggcataccagctaaatgttgaaaatacatgaaaaccagggtgtagaagtgaaggagacttctgttcaacacagtaccaaacaaatatctgaatttgcattccaagcatgcataattcattatctgaaaaaatagagtaaattccttgtgtgtgcccctgaaaagttattcaatcccttacatgcccctgaaacttactcgattccttctatacccttgaatttttgattggatcccctacatacccctaccgttagattgagcagcattccctggttagtttggttgaaaatgtctataatacccttgaggttggaggagctgaaaactaagaacatgtttggcagctgggtttgaaacattcatgattgcacagtatgtattccatgaggctaaaaaattagtgcataaaattaatttcattttcttttgttatagcattcagtattttataaaaaaatataacatgatattggatctttcatgaccactaaccgacacagcctgggggtaaaagacagtacccctagccgtttactcaaacaccattgcaattcatcagcatatcaagaggatcggtagcaccatttaataggaagaaaatgaaaatacatctaaaagcattcatacaccatcagcagtacacaaatatattactttttacatcatgagcataatggcacaagcccataacagttcaaggcatccgcctgcataaagtcaaacaaatcaatcaagaaacactagcagcagcagctattcgcattttgctaatcaacgcaagggcgtatcattaccgacggcgaggagcagcggagcaaggaggtaataggccggcgtcggagcccccgagaagagggtgaggtgacaagagggagggcgcggaggaggcagggaggagatggcgtcgccatgaccgcaagcagagtcgaggccgcggcgggatgcggactcgtcgccgcggcgggatgcaaagccgccgccgcccaccagatgcggaccccgccgcgccactgatgggatgcggacctagccgccgccgctgaccgcaagcagagccgagaccgcggcgggatgcagagccgttgccgccgccgggatgtgggagaagggcggcgatgcgcgtgcaacgatggctgaaagctggcgatgtgcggcaccgtgcgtgtgggaactatactattttggaggatttggggatcggatgtggccctgtgttacctagggttgacaggggcattttcgcattttatgaaaatactgacaagctaacacacacatgaacacaaacatctgacggaacccaaacggtaggggtatgtaggggatccaatcgaaaattcgggggtatagaaggaattgagtaagttccaggggcatgtaagggattgggtaacttttcaggggcacacaaggaatttactcgaaaaagaaaaaatagggcatattgcataatttcattttcttttttgtacattgtgtcttgattgtatgaaatgagaaatatatcttgctcatcttgtatccatggcaatatggcatttcaaacagattaaaccatgtgaaaattgggctatgcaattgcttcaagtaattgaactggactttctacgataaaatcattttcaggtttagcttgaactgaagggaaatccaggacaggagttgccagtttctagcttcttacaatcaggctaatgtcagtggtgtcgaagctgctgctgctgccgtaacttatttgcatttcctgccgcgacgggaaggtgatgatttggttttgcttggtggcgaccgtgataagactgtcactatatataatctgaatgatctctgaagaacctgaaccttgatggtatttttcgaagcatgtaagaaagagaagaaagcgaacaagtttgtaactgtatatgcatgactcctagctccccaaattcttttgattgtgtggtatatatacatacatagcaggaatggaattgttttcttttgtgtgttcatagctctccaaaaccctgttccttttttcttttagaaacaaccctgttctttattttaagtggccgtgtggtacatgttttactactagttgttttgatccaactagaatggtttcgacgaggagtatagagagagagagtaatttcatatgttacttagttaagatataacattggagatagctttaccattgtatgattagatgaaatctgcattaacaagtcatttaaccactctccataagttgtagcaaggcaacagatacacgaggggaggccatttcaatatacaggtttaatgggcttggaccttactgttttatttcctgaaggaaataatttcactttaggtccctcatcttgacgtcgagtttaaaattcacctctgaactgcaataccaggcataccccaacttacaaaaccggtatcccctgaaaaacaagacgcgggacttaaaatgaacttattcctttcctgaaatgatgatcaagtccattgaacttatggccttttggcccattaccaagagaggtaatcccaaaacccaaacggtttagcccacggtggtgagtgagaagagattttctttgataatggaatagaatattccggcctttgctcaacgaactacaaccaattattatagagtagcacacaaaataaaaagcttctcacacaaaaaagaagacacctaccaacgcaagataaggagtacacaattattaaattctgtttgtgaatctccatcaaaaattggtaaacagttgcataaccgttgcctcaagattacgacatgcaacttttaaacgctcgccctcttcatcacacttttgtagcagtgcccaagacctgagccaatgtattgccctgaaaattactttgccctatggtgacgaaattaaacaaaattgtactatgcatacaaaacagtgaggaagaaaattgctggatgaagtgtcctattttttttccaagcgaagtgttataaccttgtcctatttttttccaagcgaagtgttataaccttgtatgaaaaagtgaacccaaatctttcagttagcaaatgggcttgtttggcagtgctgctttgcagctagctgcaacagtagctgggttgtacctacagtaaaactggagaaaattttccatgtttgctgcagctgcaaagcagccacaacaatctctgctgaaaaccccaatgatacgactcagagaagcaggtcgataagtagaatttacttgacgaagaattcctctgagctgggtatcttttatctcttgaatttgtaattgggtggctcatgaaatggtagtattagggaacaaatatgcaattgatggcgattttgtaatgcatggtgagcctgcttgtcttcatgaattggtagccaacgatttatcaaataaaaagggaaaaagataagtctgaattaccttctgaaatatcgaggttatctgaggaatccataaattacagcaccagatatttcactgtccatagcttttcataccagaatatcttaaatgtattatactacattcgtcccaaaataagtttatttttcaccaatcacacattctaatacaaaagcaaaaggacaaactaaaatactcatactttatgaaaccctaatgaaactattcattagagcaggtacaatagcaggctattagctagccataaacatattttaatgatataaacgatgagagagaagagcagcgggctacagatctgtagccagctgcagcacggactccaagacacactgtgtatatgacaggtgggaccatatactaatagtatagtaagcaactattgtatgaattggctattagattggctatagatgaattggagctggtagtgggctgtactattagacttgctcttactttatctacttctaatacaattatgatgtaatgattactttaaaaataaacttattttcggacaaatgaagatagctaaaaataaacttaatgtgaaacggatgaagtatataagtattatagttgtagggtatctcaaactacctaaatagttgaggagtaatttagatttttcttttaaaaaaagagtgaagccaaatcctaagtgtgaatgctataacagaacaaaagtctgaataagttatcaagtactcaagattccgaaattccataaacagtcgatgtgcacggtttatatattattatatctctcattttgcaaatttaagttgtaagtccgtatttcgagctacagtcccagaattagggccccttttttttttgaaacacagtacaaacgcaggcgctcacaacgtgcgcacactcacccctatgaacgcacacacgcacactctacccctatgagcacctccggaagacttgggccgcatatcttgagattgacgaagtcaccacaagcgcctcgctgtcgacggttacgtcgcctaccactgaaagaataattagcccgaaatgcgagcaccgtgttaaatctaggatttaaacccgggtgggctgggttccaccacaaggaacctaacccagttgagttatgctcacttcacagaattaggcccctttgattcaaaggaaattcataagaattttaaaggatttaattcctataggaattttttctatatagccctttgaatcaaaggaatgaatcctatggaatcctataaaattcctatggaatgcctcttcccatgcaaattttgaaggaaatttaacatgaggttctacctcatgtaacctcatgttaagaatcctttgagtctttctctcttcttaaattcctatgtttttcctgcggctcaatcaaacggtcattcctatgttttttctgtgttttgcaatcctctgttttacacttgtatttctatcagagtcctatgtttttcctatttctccgtttttttattcttatgattcaaagggggcctatagaacattgcggcctgtccttcaaaattcacccgccatcgttgttcgttgagcatttgagtttgaaatcaccaggcaccatgacaccacacagtagccgtgcaacgaatgttcaccgcatagcaagcaaagtcgtactagtacgttggtgcgtgcgcccctccgccgtccaccgaaaaccgcgtggacggccgctacttaagagcaattttttatagtatagctaactattgactattagctcctgttggagacaataacacagtacttcctccgttttatattataaggctttctagcattggccatatttatatatatatgttaatgaatctagacatatatgtgtgcctagattcattaacatctatatgaatgtagacaatgctagaaagttttataacctgaaacggaggtattaagtatataataggttaactgtaagatttactctgtttatttttctcctctctatttctttcactataaatttcatgtaaatattttgaagattatgtaaaacaatctattgtatgagaaccaaaacttctcatctttttctctttcttttacataagcttatattttctccgtggctttgtcttatattttaagagattttaggtggacgtaacatttcctacactccggtggtgtttggatctagagactaaattttagtccctgtcacatcagatgtttggacacaaattagaaatattaatcatagactaatgacaaaacatattccataaccctggactaattcgcgagatgtatctgttgagcctaattaatccatgattagcctatgtgatgttacggtaagcatgtactaattatggattaattaggcttaaaatgtctcgcgaattagctcttatttatgcaattatagttttattataagtttacgtttaatacttctaattagtctcaaacattgatgttacaggcctaaaatttaggtggtgtttggattcagggattaaactgtagtccctgtcacgtcggatgtttggacactaatttgaagtattaaacatagattacttataaaactaattacataaatgagagataattcatgagataaattttttaaacctaattaatccataattagagaatgtttacggtagcatcagataagctaatcatgtattaattaggctcaatagatttgtcttgtgaattagttcgggttatgaaatactagtaggttttatcattagtatatatatatattttgagcgaatcattagtacatattcaatacttctaattagtgtcagggaatttttttttttagcacctcccgtctcctcattcctcaatcgtcatcctcctcccaacccacacggtccagtcctcctcctcgcgtagacgcggcggccgaggaacaagtccgtcacgcgaaccttccagaacctcacacgtcacgcaacctcctcctctttattacgactactaccaccccctctctcctctccgttccaccgccggattcagattcggagagagctactcctcgtcgttagccatggcgtccaagcggatcctcaaggagctcaaggacctgcagaaggatccccccacctcctgcagcgccggtgagatgcatatccctctcatcacctttttttgctgcgtaattaagcttcgatttactagccgtgctgtgcttctgcttcctgctcgatcgatcgattccatgcgcgacccgtcgctagatctgaggatcaggtaggttggtttgctgttggtgtggacgagtggatgatgatcttgttgatttctgtgcaagtggagggggtgcctgtgcgagccaacccggattttctttttcagcctttgatctcgtcaaaactcagaaatttcgatgataacgtagtaataccgctttttagtttcacttttaagtaaacctaaatgtacggcacatcgtataagatctgcaatccttagctttgaaaacaagcgagaactgtattctgtagcccaatgcaatatcagatcagttaaatttgcagggagaatgagctgcgtagtggctatttatgcatcacaattcagagagctaccgaaactttatttaagcacatggagatggtccagatggagtggcttactctgtaatttttaaatggttgattgttcacggataaagagtttttatccccctactttgggatggctggtcataagatcactagctatgtttaactttgaataagtctaccaactaagagcattggtatatgcattagggcattagtgcttccaagaacagaacaattacgcataccatgcttgctcaattttaaggacaatgttctattgtatcagttcacttacttcctatatactccgtatgttggaagttggaataagctaggtgtttcatgctctgctggaagatgtaacaacctgtcgtactagtattcctttgatcttcattctatacaaatgcttccttagttgtttacgtatacgactgacatgtatgtattcttaacctaccaggccctgtggcagaagatatgttccactggcaggcaacactgatgggtccatcagatagcccttatgctggaggcgtgtttttggttaccattcattttcctcctgattatccattcaaaccgcctaaggtaaggaaacattacatcgtattcaacctacatattttaagatagcttccttgttgcaactatgaatgctggattgttcaagtgaatgggaaaactggatactgtgaaaatcttacacaagatcttttcctggaagtttggaccttttaggcgatagtaggtgtatcaattttctgaagtgggatatgataggaagtataaactgtgatttatgaaaaccattggtaggttttagtgcatcaatatcaaatgctgcgtccataccgttgaacatgttattctaagcacatgattgccttttgaagatgagagttaattgtgttcattttagtggtgtaggtggcaattctaattaatttcacctttacttccctgttcctgttctggtattatgaaatgttgtttggttgtccttaatggaagcagtcatttgtttttgttgcttctgtattgtgcgtccatatggttgaatgtattattctaagcgtgtgattgcctgtagatagttcttgtgcaagttttttaactttaatggtgtaggcagcagttgttccatttaacttcacttttccttgttcttgttcttgcttagcccttacagaaccggtcatttgttcttcttgcctaagcagaatcagtcctttgttaattttgctttagtagaacaagttatacaattatcggtttgtttgttcgtgagttttatcttctcatgccacaagtgagatgtctttagtgcatggtcgtggcagagtgcagcttgtgatctggtgtcttttctggataaatgtagcataagggtgtgaaaacatccttgacaatttctgaacctaaaggcaattgtttcccctgaaaaaacacccttgtttaaaagtggcgccaactgcaatccttgtacagagttatgctttggttattcattggcaatttggtaccaaagtttgtcatatagaaaaggtctcggttgtacaggacctagatgtttctcttaactcaaaaacgtaacggttcatgattgggaatttgtagttgggactcagagttccactaccttttcttgctcttttctgtcttaagtttaattatttttgttctacagaacaattacaatcagtagtaaaattttcaggtggcattgaagacaaaggtgttccacccaaacattaatagcaacggaagcatatgccttgatatcttgaaggagcagtggagtcctgcattgactatttcaaaggtaagtttgttcctaatatgatgaacaattgaagtaagaaaggagctgctccctccggtcataaatatttggcatttaacataagattttggacagatttttaaaattttgatcatcaatagtttcacaggtcctttgcttaaaacaaggacaaaatggtatatggatttgtctaaaaagtatcatcataatattgtaaatatgttatattacaaatttgttctgatacaaaattgatggtcaaagttttaaaagttttgaccgaaacttgtcctaaacattgacaatttatgaccgaagagagcataaagcttggtagtcaatcctctgttcttgttcagccgtgttcgcaatcccacgtgcaccattctgggtttggggcatatgatggacactgaagtagttcagttcctctgatcttgttcagccgtgttcactatcccacgtgcaccgttctgagcttttggggcatatgctggacactgaagtaaacttcagttctaatatcttccatttcatttaggtgctactctcaatttgctcgctgttgacggatccaaatcctgatgatccattggttccagagattgctcacatgtacaagactgatcgggccaagtacgagtccaccgcaaggagctggacccagaaatatgctatgggctagaatggttaacaataagaaatgtgagatatgccattgtattgccttgtattctcctgtaactctttcaacatttaagaaacagcaagaatcaaattgaactctcgagttgttgtatggaatcctactatagatgttcagctattgtaaattatgtagtgggtggttctattgattgttcgatgagcacttggaatggtacttttatgttccagagtaactgtgacaaaatagtctgtattgatctcctgaaaggctgaaacccatcttggactgtttagtgttttattaatttcattctagaattagaaattaataattagcactatttactgttttattagtttcattctaaaattcgaaattaataattagcaagtttgtaactaacgtggactcctttttttaattgtaagtagctataattcaaatgtacagcttcattttttgcttattggtttatcagtcgcaaattaaaatttaaaaatttaaaacctaattttaaagttaattccgctatttgcttgccaaaaaaaaatctctcaattctaatgtccctattgatcaagaaaacattatttccattagttgagcgcaacaaacataggcaattgttagatttgaaatatgaattttgaatggcgaaagcagtaactccttctcatggcatcctggacccatgttacaaacagagtcctgctctatctttagtggcaggtgatcctaaggccatgtatagatgggattaaaacttttaagtccctatcacattggatgtttggaaattaattataaatattaaacgtagactattaataaaacccatccataatcttggactaattcgcgagacgaatctattgagcctaattaatccatgattagcctatgtgatgctacagtaaacattctctaattatggattaattaggcttaaaaaaattgtctcgtgaattagctttcatttatgtaattaattttataagtagtctatatttaatactataaattagtgtctaaatatagggactaaagttaagttcctggatccaaacaccacctaaaagctctatctttagtggcaggtgatactaaaatttcaccttattactcagtggtagtacaactgaaccaaaaaaaaaatcaataattctgtgcttaatcaggggacaggcagagaaggatttcagggtggaggccgtgacgatcggctgtgttcagcacaagaatctggtcagcctactgggtattgcagcgagggagctttgtaggtatgcatggtgtaattttaatacgatttttgaaataacaagttgtgctctctgtacaactttactctgctagtgatgtgtaaattgagttcttgcaatttttgataggaagctggtgaaattgagttgaccaatttggactgaagaagtgatctcagataggggggttgctgcctggaagagtaggaaaacaatgcagagagagatggttcaaccctttgaggccaaacatcaaggttagtctcctcttccttgtaggtttcacacacattgtatatccaactaaaaatacttcttttgccggcatttcaaaattcttgtcttgtatacagttaagatcacttgatttgtctgatagatctgttgatggcatgtaggcatagatagctgcttagtcaacccaataaaatgaggctataacaagttctatcattgctatgctgcatttttgccaagtctgcaatctatcaatcttcatccgccgagtctctgaacataaattactacatctatagagggctcaatttatctttagctagacaatctattagaagatgatgagggatttgggactcttgtcatctgttaatgtgttatgcaatctccttccaccagctaaatgaagcatgcgagcttctttagattgattgtttcagactttcattatcttagattggactcgtgcaatgtctaatgcaatgtttttttttgtcactgatttttgaagggaacgactccttgcagcctctgtgctgcatcggccaccatcaccggcgagcctgtggcccttctctttgtgccatcggtgccacgagaacatgaagaggccattcgcagtcaccgcaagaagaattagtgtcacaacaacaagaagcatgagcgccttcatcaatgggggacagtgagatccattgcaatggccatggccatgagaggatcctgatgtcatctgccacgatatgtcagcactgaatggctgggggcctgtcggggttgatgaggtcggccggactgcacagcctgagagcaggcagaacatattcagatgagtgttgtttgcaccttgcaatccaccctgcagtttcgctaattcttggggaaaatgatgttttgatttctgtagcaacagctttaatttgttgaacgaatggatcccatgtattttttttctgggctttgaacaacaaaagcacaaaaagggacagaagcccatgttcgacccaacaaaccttttggcaggggtgcttgatgcacgcacagcacgcggggaggaggtgggagatgatgacacgtgtcatatcctatggtcaaaagtccagctgatatctcaaaaaatttcagcaggatggtactagacagtccctaagtggtacttaattcgtttcacttcagtaaagccgcgtataatatgcagagtccagagtataatctgcatcagtagacctactgatatatgatggctcagtagcatcctgtagagtttataatgtggcaaatgtctgacgacataatataactcctcaaaataacgttaaattaatttgggacctgcttttgcatttgcttcctcaaatcaaattgtttcctcgagttcaacatagagattctgcagaccagttattacagtccaatgcattttttttccaggtggtttccaagacaaattggtgttccatcggacgagtaatgcagccaccatctgtcgttatatcttgacagagccgagaaggaaaatcctccagagattggccaccatttgcatggtcagttgattctccattaccctacccttcttgttcctatagaagctcagaagcgggcaagcggcttgttttgcgacgcaccactgacactgtctctgttcatcactgcagcaaccggatggcgagcaaggcgacagagatgggaatttttttcgtttttagattttttttaatatttacagaaataatctatcggcgagaaaaattgcaaaaatagaccctgccgccccaatggtgggcggcaagctgacgtggcaaacgggggaggaacggacggtgacggagggtggttttttttgcatgaaaacccttgccgccctttggtggggcggcaaggggtccgaatgcaaaagagccgcaggggccggccattttgcaggcggccccttgccgccctctggccgggcggcaggccttgctgcctataaaaggtctgccgcccagcccccagccctcattcctcacccctctcaaatccagtgaaaaaaaaagaagagaggggaggagaagagaagaaggggcgaagccctgccggatttagacgccgatttcaggtaatattcatagatcctatatgtgactattgagttaaatagtgtgtatttttaaaaaatttgtttgaataaatgcattatatttttagggtttcagttgtactaatctagaagtgcgtattgtagatatcggtaactacgtagatctgctagtttggaatcaatactttaccgttgcattggcttacacaagaagatattacgttgtagatgtttattgcatgaaagagtaatatgatctagttaattcgttgacagatatgtcgaacaaacaaatattccaagtttaccatggaccaggaaacgtccattacgggccaactggggtagatctgtcagattttattgtatcagaaaggggaattgatagaccggctgagaggagtgtaccttctataaaaggatggttaatgaggggcttgagagttgatccacagacaagtgacataacaatcaatgttatagtaagtcgggcaactgagggtttttattaggaactaatgccagttcaaaactctcaagtgtggagatggtatgtggaaaatgcaatgcaacgcgggtggcctctagctttggttccgtttgtgcacccgaaggatccaggtatgcagatgaacatggatgatggcaagggaccaagtgctgaagtaaatgagacttctgtggaggaggtcaacgcaggagaggacaggggcgtagtagctccagtgggcattcaaccaggtggagtggccgacaagggggagactgtcgcagccattgtggatgaaatggagagggaggattctgacaacgagcgtgtagaggaaggtgattcgtcagatgaggagacggatattaatccagcagaatgggctagttaggatttttctgggctgatcgtctctgaagaggatagtgtgagatgggagtacaaagaaaatgaggttattcagggagcgatttatagtagagcagaagatatgaaggaggcggcaaaacattttgcagtgtcacttcatagagagttttgggttgccaagtccaaccggtcgcaatatgaagttcggtgtgttaaggaaaaagatggttgtccatggagagtgcacgcgtataaggggaaatggaaggattattggacagtgtcagtcgttaccaagcatacatgttttctacctggtgttcagaaataccacaggaacattacatgtgcatttgttgcatctgagatgtatgcgcatgtcatcgataatctcacatatgaaccaaggtcaataatccgacacatcgaggagacatacaagtatactattagctatgccaaggcctggagggccaaacagaaaataatagagataagatttagaacttacgaagcctcgtatgacaatttgccacgcctgcttggtgttatcgaggaaagaaaccctgggagctcttacgaagtgaagaaattcccatcaattgaacatcctggcaagagtgtgctgcaaagggcgttcttagctctacatgcatgcaagatggcattcgtgaactgtcgtcctgttctctgcattgatgggacattcttgacaggaaagtatcggggccagatactgacagcaataggggtagatgggaacaatcaggtattgcccttggcatttgcttttgttgagagtgagaataccgacagctggtactggttcctaaaattggttaaaacaaaagttgttggtatgaggccaaatgtgtgcctgatacatgataggcacgctggcattctgcgagcgatagaagagttgcagtttgggagcatggaacaaggataccctggtgtttgggacgatgtacagagtaggtggtgcatgcgtcatatgggagctaatttcttcaagcaattcaagaacaaggagctcatgaacatgttcaagaggctgtgcaatcagaaccaggagaaaaaattcaatgagctttggaagagattagatgagttgacagccaaatgcagtgatcagcgtgcagcggctccatcgaccgccgttgctgaccctcctcaagctcttggacctctcccaacggtagtccaactttggttagaagaactggattggagattaggaaattttctcagtggattctgcatgaaccaaaagagaaatgggccaaggcgtatgacacaggtggtgctagatatggaataatgacaacaaatttggcagaagtttacaactgggtgatgcgcggtgtccgtggactgccactagttggcatagtggagttcattttacatgggacatgcaggtattttagggatcggttccaggcagttcttccctctatgccgaacaacagcatttttttggaactttcatacagaaaaagctagaggagttgcgtaaaaaggccatgaaacatcgagctgtagtgcaaggtacccacaacacaggtttgagatactctgtcaagataaggcaggcaggggtatctaccacaagagagtgaagcaggagtgtgttctgaaagccgacgacacatgtcattgctcttgttcaaagccgaagctgctccacaggccatgcacccatgtcattgctgccgcagcggagtgtagcataccagatgtagtatatgtgtcacagtacttcagtaagcaagcaatatattatacatagaacggcgagatttatgggttcggcatagctagggagttcacagagactaacgatgaagtactcaatattcctgacccatcgaagctccgaggcaaggctggaaggaggaggactcgtcgcatccgcaacgatatggacgagtcggaggctggcagggtgaagcgttgcagcaaatgcgatgaacgtgggcacacctacaagcattgtcctaaagacaaggagaaaccaagtgcggcggaggcaggactatcaggatcagcagcagatggagctcgccctacgggtgaaggcactacctccactcgaccacgtcctaggcgtcgtcgtgccacgtctggctacgtggtgtagttcttatgttctatgttggcatgtgggtttgcttgtaatatgtttcgaacttatcgatgtgtttatgtttcgtcgtgtaatgtcagacttcggcatatcatgtctttaggtctcgtgatgtaacgtcagactaaggcccctagtgtctttagatatgctgatgtatgtcggacttcgacacgtaatgttatgttatgttatattatcgaactctacataaatgttaaattgcacgtcatcgttatgtaccattagtaacgtttgctttatttaaatagcctgtaatcttgttgtacataattattctcatgattttattactatttcataattttgtgagtcatattttgttttacattactacgttttgaattgttataacacgaaacactatatttttcagagatggcacgtcaggatacacctcagctgttggacccggtgatagatcaccgacaccggtctcaccttactgcggtgcagggggctcagcttgggacgttccgggcacggacgtgcggtgagctactcacggttgacgactcctttgtcgagaggtacgaacagtgtattactataaattagttgcgctgtaatattttttataatgacatattaatttcttattgtaggctgcgtgaggccagcctcctaccgatgtgtcggctggtggaggctgccgccggccacgcggacccggccagacgatggactgtggacaggtccctcctagcagctttggtcgaccgatggagaccagagacgcacacttttcacttgccgtgcggtgaggtagcccctaccctacaggacgtatcgtacttgttggggctaccgctcgcgggagacgctgttgggccagtgaccacggctgtggattggcaggacgatctgacggcacgtttcgcactagtacagcgcgcaccgcacctcccgctcgagccgttggcacaccaccgcaacaccggacctacgaagaggtggctgcttcagttcaccgtgagtgtttttgtaccgaaatgacaagcgtactacatatttattccacatgttaaggttcctaacattttaacgaacgcttgcaggtcgatcagctacaggcggaggctgacgagtactcctacagccgctgtttgaaggcgtacttgctctggcttttcggctgggtgatgttctgtggcggtcacgggcacgcggtcgacaagggactcgtgcactacgccaggagcatcgccgacgccgcggtaggcgaggtgcctcagtggagctggggttccgcgttgttggcggctctgtaccgtggactttgtgaggcttgcacgacgacggatcccagcgcgacctttggtgggtgccctctctttctttctatctgggcagctgagaggattgcgatcggccgcccggaggtggaccagcacgcgtacgaggagtcactgtacaaggagcgaccagaggtcgactaccctacgatgggtactctgtggtgccgtcgtcaggtacgttgcatcgatcttctcgtattgttaagttaattgctcagttcattatatatcaaatcgatcgtcccgtattgcagcgccgatgggctcacgtccaggttaggcggtcgtatcctgagtttgttatggagttcgaccgccttctgccgactgacgtcgtgtgggagccctacagtgccgcggctacccaggctcgtgcgccgttgggtctgtccacactctgcaccagggaccaggcgtactggatgactacggttccgatggtcttcgacatctgcgttgagcctcacgcccctttcggcgtgatgcggcagttcggcttccgtcagccctttccagtaccttttccgacgaccgtcccagctgctgttcagcggtaagatctttcactacgctttccgttattgcattaaaatctacctgttcacaataatttgtaacatctctcgattcacactaatattacacattaattcgcaggtactcgcgcaagggtcagcagtcagctggcgactggcccgccaagttggcgacttttgttgaggactggttgctcgcaaccgaggaggtcgtggaccacgagggagagccgcacactgaggaggcgtacaggcctactacgctggtaccagccacgcacccgtactagggtcaccttcgctcccttggaggagcagccccacgttgcgagcactagagacctctacgccaggcaccgcgaccaggacttcgctcgttgtgtgagtaccctgcatcgcaccattcctttatgttttcgtgtctttctcattgtcaaattttacgaatatgtatgaataaattaaccatgcaggctcacgacatcaaccgggtcgtcgttgacggttcaacgacgatccaacgtttaggcgcggggattccggtacccgtagaggagcacttgacgacgtacacgcggatggtggagtcgatgcgctcaattctccgagtgctcacctgtcgtgcagacgacgttgctcgggcagacgcagctgtacagcggccacccgtaccgactggtccccgtccagctgcgcacgttcctaggccaactccccctccgcacggaggtaagtatttttaaggatttttctgtacatgcctcgcacatatatgtgagccgtttcacttgccgattgattcagggtttcgtgcaccgttcagcaccccgccttcctcggctaggccttctggtgtgccccccacaggtacttaaaaaacaacattacttcgacaataaatttacatgcatttaatgtcttagcttacaaggtcccattgtcgatgtgtaggtttcgcccagttcgctatgatgcaggacttctcccaggctacagggtcagcgtctcaggcagctgtgtcgacctcgcactcagcgcagttctgccagtacaccggtacttcgtcacaggcagccggcacgtcgagtcagggtccaccactggaccatgctgggacctcgtcggatcgcttgctgccttccaccgtgctcttcgacatcactgacttcgactccgcttcaggctcggcagaggacgtcatcggcccctcacagctgggaggcgcaccgccggtgtagacgcaggaccaggcgcaggccactcctccgccagacactcgtgctacctgtgctgtgccaccggatcgtttcacctactcccaggaccacgtgcgagcacaggcccggaggaccaagcgtggtcgcggcgcggggcagggccagtagagcagtcttctctttgtttatttgcttcactttccagtactgtatgcttgtgtaatgactacgttgttgttatatgtgcacgatatctttcggcgcatgcacgatacctttcggcgcatgcacgactactttctgccgcaccgatgcagcctcctttattcgcgtgcgatacgagtatttgcccgccatttgccgcatacgaccaatgtaactttcggcgccgatcaggcatgcaacttcggcgtacccaccatgccccaccacgttcacatgtcaaggatatcactcgattttttgcgcctatataagtcgccttaacgagtgaggcctcacgaactcagtcacattcagtactctcttccctacttgcttcattacaaatcctaccggctttcgtcaatggctagacgccggagtgttgaggatccaaactggcgcagcgatccttatgtatacctactaccaccttggtgccagcgtcctctctgcctatgcggtgatcgatgccaactaatggcttcgaggaatcctgatattcgaggaaggcgcttttttaggtgccctaactatgaccgtgaggtattttattatctgcatatgcttattcattccgtatgggtaatcgctttattcttcgtaacactactctattcggcagacccgcactatggcttgcacatacatcgagtgggtcgatacagaaaatcccgttctcgacctaaccacttgtttacaagaaggtcgctggtatttcgcatccgaaagtaccgagcaatacttacagagaaaagcggtttatgaacgacaatatcgtgaacaacagagcgactggcgggtgctaactacggcactccctccatgggaagcccgtccaagatgcaggtgtggtgatcgttgtcaggttcttcgttctataaatcctacaacattgggtcgaaggttctttgtttgtccaaatattcttgacgacgatttcatggtaagaatattttgattacatgaatccttattttctcacaacatttactaactttgctcgctttacatctattctttcctcccaggaaccaccaaggagatgtcaatacagagaatggatagacaccagaagggttctaactccacctagccgtgttgtgcagcttgaactaccagagcaatacagggttactaaagcgcggtttgagagaggagagggatcctcacgtaggggttagctattatcggacaacttggcatattgaaatttctactgtcatgcttccttgtcccattactacatcgtcgttgtgttcaactattgcactacctccctcctagttcgaatctaatatcatctatgtaaccgcaatggaaatagttgtatcatgttcaaattgtactactatttcttcatcttacataattctccttgtttaagttcatataatgtttctacgaccgagactgcgataggcctatattaattatccgagtactaatacgtcgaataaggtacaaaataatacctcacttaacatatgaaattgcgcaacaaccaacttcaatacatttttataacaatattaacaagttttaccaacaaatacttctttatttattattaacattacatagaaaaatcttttgaccgtactttttacatctgggtcccttgccgccctctattggccgcaaaaagtacggccgcaagctctgagggggcgtccaaaattgcaattagccccttgccgccctctgtatgggcggcaagggtctaatcgcaattttggccgacggcggcagacggcgcggtcgacccaccgtctgccatgttagcttgccgccccaatggtgggcggcagggtctatttttgcaattttgttcgccgatagattatttctgtaaatattaaaaaaaaatctaaaaacgaaaaaaattcacagagatggcgccgggggccctctccaatgggctgtggcttgcctgggccggatgcgcgcaaacaaatcagcccatgtgtgtgtttggggtggtggcccggctcttgggcttctcctctctactccacgcgttgcaagcgtcgacgccgatgccatccgccgtcacggtctgcacaagcatgcatctgctcaggcgcctcgcgctccctctggcgggatgatacgcttttggatcattggatggcagcgggtttgttcgagggataggtttttgcttctctcgaggctcgacggataagttttagtagctgattggtggtgttggcgtgggtcgttcagtgatgggttcacgtctaggcttagcgctctctgatcttgcttagcggcggttggtgcggtgttaattttgttttatcacctgccattaaggactcctgatgctgtaccaataattgcagagcaattgccatcgtaggagcaggattgcaagagacgactgacttgcagcctttcttgactgctttactttgtttgcattttattagtttatttaaaaggcctgatcacggattagtggttagtatgtaaaaattcatctgtatctagtgagcagccatcaccgatggggtcatctttgtcggatctaaatactccatccatctacttttgatagtcatattttatcttggcacacatatcaaggataagtaattctacttatcatccatttaaatatgttactagtcattcctcgtaaacaagcgattaattaatatttacatttctcaattcccatgtagctaatcatgtgtggaagaatgaagagtcattcattaaatccaagaaagtcgttaagataataagttgttggattgaaatatgcctatcaaaaataaaattttcagatttggaaatatgactatcaaaagtagatggagggagtaaaaacctattactgataaggtttgactcagcgcgtgaggcatcctataacccatgatgggctccaactcttactcgtcaaaggtgactttgtcatccgactaagtcttgctctccatacttgatccaacatgtgttctccttcatgaattctggacatattagatgagggtgtatatctactcttccgacaaacatcttctcattttttttcaatctacacatgaacaagtcatataatcgttgttccttctttctctcctcctccgcaacgtttataaaatttgcaacaccatttctatactcttttctatgtcgatcaattatgtacatccaatttccgtccatctctacaaatgcgaacaaatattatatatgtgtgtgtgagagagagatttatattataaaatttgtagagatggtttatttattattacatatagagaaattttccaaattttcttttttttcttagaaaagacaaaatttgtccctctagtcctcccaccacaaatgtgaaataatacatttgattgggataatcattacatgaaggtgttggagtatttatagtgtggaatatcggtaacgaggcgataaatgaaacccatcaataaccaccttattggtgacgggctttatagctatctttgttgggcctgtagatctggttgcgatccgtcaccgatgatcttcggcgggccgcaacctaacctcgtcaccgatgagggtcatcgctgacaggtccagccatgaggtctcaggtgagtgtttctatgggtgcttctatgtcggagattattttgggccgttaaaagtgagtgcctatgcgattggtcgtaggtctccgttatagatggtccatttgcgatgtctagttctatattagtcgtcgtttgatgaaacatctgtaggatcgaatactaagaaataagccaaccagagggggggtgaatggttgatgtacccaaaaactaaaacttttagcggaattaaaagttaccctcgaatcgacggatcacggtgtgaccgaagtagattggccggtctgaccgcctggatatcgtcggtctgaccggagttgatcgttcggtctaaccgccccgaagaagctgtagtcacctgaagctgccgccagtctgaccgccgcaatgctgccgatctaaccgacggtatctcgccggttagaccaccgaacccgagcaaacacaaatcgaagaatttttgatgtagacgacaactttattacttctctctgtgtttacaaagtgcaacaacagcactcctcatgaaaatctcgactaaactcgaaaccttaactattctctcaactcaatgctctctaaagtgataccgggaggccacaccctccctctctatttatacataaggtaaggcagcctaaagccacgaaccaaactcatacaagaaatccaaatccacctagaaaaccttcccgtacaagaaaccaactttacaaactccaattgtaccaaatttggactccttccaatttcgactccgcatcccatacgcacacaatatctccatcgtatgccatatggaatcttcaccaaccacgtacattgatctttagcctaagtatcccgcatgatatctgactgtccggacgtcaccttatctccaagttgactcccaatccatcaccggcaatactctcccgagacatcaagacacctacacatgaatcaaacaaagaaaccatattccgagaccaagttatctccaacttgactcaatgttagcaaacaacagtattacgtacgcatagtatccatctagaaaccataaacatgaaacattcacggatatccaatgaaacaacccgaaaccgaaaccgacatagtgtcggccggtctgaccgcttgatatatgctggtctaaccggcaaccactgcccggtttaaccggacccgacaatacaacggttcttgttcatcacctgaaaatccaatcatctcaaaaaccacttcgccaataatctccaaatatcaaaactaataatctcagatgctaattgttcacagaataagaattaaatacactttgattttacaaccttgaccaaataccgtggacagctttttccttagcaaaattttactcacccatttcacacagtttagtttgctatgcaactctagggcttaatccttacctatgatattttgggatagcctattacatatggtggtgccaatggcggcgtgtaggtgtacgttttggcatcggcgtgcaaacttattcctaccatagccattttttttccctactagcaagattttattcatccatttatacagttttgccatgaaattgttgggattgattaatcgcaaattggatattttgggatatatctatagcagagcacaggataaaagagtatcaaagctgttctacacgataagatataaatgaactccctcttccacaataatcactggaacagtaccgcttaccaaatgggatgactaaaagtcgtcgttgatcacttcagcgcagaatatttcaggtcatttgtagtctcatagcatatagttttatcaataagttttacaaaattatagccggagaacacgcatgccattttcattcataattaaaccatctttctgctactaacttgtgttaagaattctaattttagccatgaacctcgttgatgcaaatgtttgaacctgtttagtcaaaacagaacaattctttcatgtcgctaacaggtactgttgaaatttgtgtgtgctgtttggactgaagttgaaatttccacccttgtgttcagaattgaaccatcttgtgttcaaattctgaattttaccaatgaaccgcattgatcaaatgtttgaatcggtttggtcaaaacataaattctttgatgggactaattattggtagtgatgaaatttgtgtaaacggaccaaaggtgaaacttctggccctatatctcgactaaggaggatcttagtatcaatgttttcaagaaaggagatggtgagcacctgggtgtattcgaacccaggccgttgattgactagctcccggcagctccctgccaactaagctacacaacgttctcatgtttttcatccagacgttaaatcatgattcacaagtgctttcattgatttctttgcatttatacagaagtggtgcaagggaatgtagttgaagaaggtgactagaatacttatctgcaacctttttgtgttgtttctctgaaactttttcttcatgaagctatactaacggtagcaagtgagtttccattaagatgtgattttttttatcgtgtgtgtcctattataatcgagaaattttacaatccttgagacgttctaaaaggtatcaaaatttttagtacaaatttggtaccttctagtaccaaaggtatcgaaagatgctaaattttacactataatggtaccttctggtaccttttgaaggactaatcgttataatcaagatatggagctgaaataggatactatagtcaatttacttttataacttattctagtactccctccgtattttaatgtatgacgccgttgactttttaaccgacattttgaccactcgtcttattaaaatacggagggagtaagtattaatatagttattgctgattattcttgcttatttatttagaaaacacttccaccttattgttacctataagtgcctatataacatggacaattttcctacccaaattttcactcgtccatttcacacagttttgctatgaaattgttgggcttaatgagctcacattggaaatttgggatagcacggttactattatgcacctgcaccagtagatgcagatgatctgtcactacagggacagtgacgttgcccccatttgtgacgactggcaaatcgtcgatcgtttcagcgcagagtagtcttaggaaatcacatccatcaatagcgttgtcaatccttcgatgaaacgatcgttgtcatttaaccggaatcatttatatcgcagtagaagcaggcccgggcgccgggctaccagaacaagtataattccttgtgtactcatccagctttcaatactacataaaacattattgaaagtctgaaacacaagtataataagaccttgtttagatccaaaaaattttggtcaaaaacatcatatcaaatctttaaacacatgtataggacattaaatatgaaaaaaaacccattgcacagtttgcgtgtaaattgcgaggcgaatcttttgagtctaattacgccatgatttggcaatgtggtgctacagtaaatatttgctaatgacggattaattaggcttaataaatttgtctcgcagtttacaggaggaatctataatttgttttgttattagtctacgttttatacttcaaatgtgcgtctatatatttcaaaaactttacacccaaagaactaaacacaccctaagtttggcccgaggtggatacgggacgcttgtatagtgatggtgtttctctttgcaattcaattttgcgtggctcatacacattgtttagatggtaatcagatcgagagatgctagtccaactcaattatttgtggagtgaataagatggcaaaaaacattgacttgttcaggagcaacccttgcgtacacacctgactgcttgtctgaatgcaaattcaaagtaattgtgtaggggcctacctgttgcagattcaagtgtcgttgcgcttataaaagcttacaacattcactccctctcactaaactgtggcatgttctctagccgcttgtgatactcgcaatcctaaaccacgagagaaaacattgcccctatagcagaagggtagatcgatggaggcagccatcggcgcagcgagctggctcgtcgacaaggtggtgacacagctgtccgacgagctggtggcggcttacatagccagcaccgagctcggcctcaacatggagcagatcaagagggacctcatgtttatgcaagggctgctccatcatgcccgggagaggagggacaagagcaaccctggcctgcaagggcttctagaggaactcagaaagaaggctgatgaggctgaggacgtgctggacgagctccagtacttcatcatccaggaccagatcgacggcacccatgaggccacccccgtggtagacgatggcatccgtggccaagtcctccatggccgccatgctcttcgtcacaccatcggtaactgcctttcatgcttttcttcttcttcttcttcttctgtaccagaggatgccaattatccacatcacacagccaagtcccgtagtgatgaatctgactatgttggcaagttgacattcaatcgagtagacatgtccaaaaaaatcaagtcggtaatcgagggcatatatgacttatgtagccatgtatccaatttgctcaaaattacccaacctgaagaaagaagggttctatcactgaagcgacctcccaccagctcaacaattacacagaataaattatatgggcgggaagacatctttaaccagactcttgatgacatgtgcaccatacgtagtgaaacactatcagttcttcccatagttggccctggtggaatcggaaagacaacctttgcccaacacctgtacaatcacaaaagaacagaggcacacttctctggcaacaagacctgggtttgtgtatctactaattttgatgtggttaggctcacccaagaaatcttgatgtgcatatgtcaaaatagaaatgaggaaagtagcggagcacatgaaacatccaacttggatcagctccaaaaatccattgcagaaaaattggattctaaaagatttttacttgtcttggatgatatgtggagatgcagcagtgagggtgaatgggaaagcctactagctccattgaaaacaggagaagccaaaggaagtatggttattgtcaccactcgttttccatctatagcacaaatggtaaaaacaaccaagccaatagaactgcaaggtctagaggatgatgaattcttcacattctttgaagaatgtatatttggtcaggaaaaacctgcgtgttatgaagatgaattgattgatattgcaagaaaaatttccaagaaatttaagggtttcccactagcagccaaaaccgttggtcgattattgaagaataacctttcccaggaaagttggatggaagttcatgaaagaaatgagtggaaaaatcagcaagatggtgatggcataatgccagcactacaaataagctatgactacctacctttccatctgaaaaagtgtttttcttattgttccctttaccctgaggactaccggtttggtaatttagagattacttatttttgggaagcattaggcatcatagcttatggagatcaaaataataaagctgaccatgtaggattaaagtatttgaacgaactagtaggtaatggttttctcatgaaggaaggtgatgatagtaggccatattatgtaatgcacgacttattacatgatctagcacgaaatatttcgtcacaagagtgcattgacataagttcatataactttaggtctgatagcatcccacaatctattcgacatgtatctatcaccttacaatatgatgagtatgaccaaagttttgagagagaattagaaaaattcaagacaaaaatagacatagtaaatttgcggactttgatgctttttggaaaaggcaatgcaaacatgacctttttcaaagatttgttaaaagaaacaagaagtcttcgtgttctatttatgcatgcaaactcgcccgaatctttcccacatgactttttcaaactaatccaccttcggtatctaaagttgaaaataccttatggcgtagaactatctctaccaaatgcaataagtagatttcatcacttaaattttttggatctagggaatagtatatgtattttgccaaaagacatgaatcgtctattcaatttacacctctttcttgctagaaaagaactttgttccaatattcctgggattggtaaaatgaagtatttacagaggttggaagagtaccatgttaagaaagaagacattgggtttgatctgagtgagctaggggatttgacagagcttggaggtgaactgacaatatttaatcttgagaatgtggcaacaacggaagaaggtaatcaagccaaattgcagttgaaaagaaatttgagaagattgacgctaatttggggtgcggtgcaacagacgacaggatctgatgttcttgatggcctgcaaccacattataatcttagagcacttggcataataaaccatggtggtcccactggtcctggttggttgtgttccgatatctatctatctattatatactaaaagtccattaaactttctataaacgctctcaagccgccacgtggctttctacaaacgctcctaggtcaccacgtggcattctataatctcaccgtcgattttcttttaaatcggtggacccactaattttaactattagatcttcattgaaaaaataaatctggtgtccccactattttttaaaaaaattgccgtgtttgccatcgggcaaggaacgtaagttcttttttttttcccggcggcatacgatacgtactccacgttccacgttagtattatttttttccttttttttattttgcaaacagttctggtgtccccactatttttaaaaaaaattgccgtgtttgccatcgggcaaggaacgtaagttcttttttttcccggcggcatacgatacgtactccacgttccacgttagtattatttttttccttttttttattttgcaaacagtactttttctttacaccttctgaaaacagtactactactacgcacatcgtacatacactaggggagtttaggagaaagtgttaatagatatgtaaaatcacatcttatcgatttaagtaaaaatccatagttaaatattttttctttttcttataatttttaataattcttttaatttagagatatgacatgtggtaacctaccagcttttatatgagtgtcacgtggtagcttaatagcgtttctaaaaagtttaatggacttatatatagtaaaagttaatttaacttcctataaatactctcaagccgccacatggccttctacaaacgttcctaaatcaccacgtggcattttttaatcacaccgtcaattttacgaaggtaaaaaaaaaaaaacgcagtacgtactccttccaccctccgaatctcccatcctctcctattttctagctaacttatcatattttctcattaacactcaatatatcaaaaaataattcggacatctaattgatcgcgactctcaaattataattttatactcaggtttttttcaattgttatgttatttataattaaatataaaattcaaaatccatatcactcatattttgttatctaaaaattagatcatgctgccgttctaactacaaatgtcagggcctaatggtacgcccataaacacttctaagtcgatctcgccttgtaacactataataaattaaaataaatctataagtatgacaaatgaaaataaaacatctaaccattgctctccacttaaatcgatggatccactatcttatatggttagatctatctttaaaaaaaaatcccaaaactccctcacattcctccattcctctgattcctctctccctaccattccttctctgttctttttatctccatagtaactaaaaccaacattatctttaggataaaaaaactccaaaaatggactccacctaacaagtctagctagctttccctctataatgtgcttttcttatctttctcctcaagctagcacttacagaaacaatataaactagactttaaaacactcataaaattttaaatcgtatattcatttatgatatttctacactattttaatttttaattaaataaataatttaatatctgtattgacttacattgtggaccacatctatccacctttaagcctccaataaataaaatagaacactaaaatttctcattaaaaattaaaatatctcaccttatgtttttaataaatggtcaacccattatttataccatgctagacatctaatctccttcttccaactccttatgtttcagattataagtcattttaaattttgtcaatgtcaaattacttgaattagtttataaaaaacatagtaatattttctacacaaaacaatcatattataaaacatattcaattttgaattcaataaaaataatttggtgttgtaaatattgatatatttttcctcaacagtggaaatagttaatttctcttaacatgcatatatgggctatttacttatatttgaacttaattagatgcacttttatgaataaatgatctttttagggataaataaacgttcctaagatgatcataatatctaaattatacatatgatatctgatgtcactaatagattagagaaaaagcttataattatatcattttttcgtgtcataacgtgtaccccgtctaggatctatttgtcatacacagcacattgaaaatatttaagggatacctttatcccatgccaagttgtatggccattccaaattgcagagatcaaaacatttaagagacgctcgatggaatggaaatctataaaaaaataacatgataaaaataattgaagactgaactttttttttctaaatttaacatttttttaaaaaaattgaaacccattctaaatagcaatgttttaatattttaggagtactgaaataatgaaaataactaaatatttaaataaaatataatagaaaatttgacccttttcagcattatgttggaaacaaaatctaatataactaaactacaacttgggagcgataaaagtctcattttctaatatattttctggttgagaaaaacatttactgctaaactgtagtttcatactgcaatactatatacatacaattaaatcaatatttcaacaaattcagctaatttaattagatgtagtcgtattaggcatatttttaatagaaaatatcttcaattaatatatcctaaaattcataaagacatatatattataaaaagaaaaattgttactcagagtttagaaagtacaaaattatgttatgctaaatattttaaaaaaagaaacgcattatgtacaaatgatatatagtttcatgtatattttttttataaaacctaaactgcattgttttaagtaattttagtttacaatttatacggtggcgatggttactagcattaagagaaacaccacacaaattattgaaaaattaaagatgtttacgatagactaatcataaatatttctaatcaaatttttaacacacttaaatatgatgcccgcgcatttgcgcgggctaccttcctagttcgtataaatggcctgaaatgtctacatttagagggcatatcttggagaacactcccacctttggggcaactaatgcatttggaggaacttactttgatcaatattgctgggatgcgtcaatttggacctgattttggtggtgttacgaagaagagtttcttacacttgaagaaaattgaacttgttggtttaccggaacttgtggagtgggttgggggagatcattgccatatgttttcaaagcttttaagcatcagatgtgaagattgtcctaatctcaccgtgctcctgctgccatcgtttgagtgctctatctctgacacaaaagacataaacaccatatggtttcccaacttgtgttctcttaagattcgaaattgccccaggttgtcactgcctcccctgcctcacacttccatgctaacctgtgttactgtgaaagaagatgatacagatttgatgtattttgatggaaaaagtctgaggttaaatcgctacggtagtgctttggccttccataacctgaacaaagtagaagatatggaaattgtagacatgccgctcgtttcatggactggtctccaaaagctgaactcccccagaagcatgcaatcgatgggtctgctctcaaacctctcatctctcactcatctagaactagtaaattgtgataacttaagagtcgatggttttgatcctctcaccacatgcaacctcaaggaaatggcagtttacaatagtaaaaaccatcacccctccatagcagcggatttgttctcagtggtggcaatgatggaagtaatacctgcaggttccttccagcagctggaacaactctcggtggacagcatctcagcagtgcttgttgcccccatttgcaacctcctggctagcaccctctgtaagatggaattcccgtatgacatgtggatggaaagcttcaccgaaacgcaggaggaggcgcttcagctcctcacctccctccaatgcctaggattctatgtgtgtccccgtctgcagtccctcccagaagggttacatcgcctttcttcacttcgtgaactaattatccataaatgtcctgaaatcagagcgcttcccaaggaagggttccccgcatcactgagatatgtatttgcatacgagggcatcagtgttgatctaaaggatcaactcaagaaactaaaagcatcaacgccaggtttacgtggtaaagcatgtcctctcctaattcctgtatttgtcccttattaaatctgtaaattttcatatttaactaatttttgcctgttttgctattaatgatttacctcatgtggagtagtggtttcatcgctaaccaacttagtaaattaatgcgagctacacaagattacatgaaggccagcaatctagaggtcagttcatggaaaaccaaggcagtccttcattttgtggtttctttctaagttcaggcagctgcttttagtttagtccatatggttgagctgttttctttatctgctatctgaatcaatgctatattagttagcttacattctatatatccttacatatttttttcatctcaaacagcatcacaacagtttgcacgcatgcagctgcgtaataaatctgaaacccgcccgccctgctatggtctgatgtcatcagatccaacagcatcaattaagccatggtggtcagtagcatcacttctgctcatatcgtttgtttttttttcttttctgtagtttctcctgaaactagtactccatccattctaaaatggcaaaatatatcaatatcaacgtagtactacgaatgtagacagccttcatcgtattaggtggtgtctaatctattattaggacactatattttgaaacggaggggatagcttttgtaatttctctcgatgtcctgaaatcagatcgctgctcaaggagcattcctctcttcattgagatatccaagggcaagaccgcaagaggatgcagcatcgtctacaggatcaactcaagaaaatagctaggagaattagacccacatttggtaaaagtgccagggtgatccaaagtgaaatttaggtaataaaaagtgacctaaagtgcaattcactcaataactttacaacgcactgcagaagctgatatgttctctgttatctttggtagcggtggaggcagcctaggaaaatctggctatactgagatgtttgtcatttaaaaagagaagtctatcttcaattaaaataacaccaaaatgcctttatgcattcatcaacgagccagggaagcatttcaaggtactagattcaacaattcctgtaggacaaatggtcattccactgttcatgggtattgagagtatagatagccatgtgggccgcccggcacagcccggcccaggcccggccgtgcctaggccgaggcttgtcaggccggcacggcccgaccgactcaccgggccagcccacgtgccgcactcacggcctaggcacggcccaacacgcctcgggctgtgccgggctggcccgaaggcacgatgggccatcgtacgtttcctcagaataagtctaactttcctccctcctattgggctgtgacatatatatagctaaaaaagtctattttacctccctcttatttgggctgtggtatataaatagctaaaacaaactcaacgcacccattggtgcgcggactaatgtatggcccgtcaccatcgtgagcttctctatatctcaatattttttttcatatttatttgaaattgcctgcgttagttcgtttgggttgggaacccatcttctccacatagaaaacataacggtccattagcacgtgattaattaagtattagcaaaaaaaaactttcaaaaatggatcaatatgattttttaagtaactttcgtatagaaactttttgcaaaaaacgcaccgtttagtagattgaaaagcgtgcacgcggaacacgagggagagaggttgggaacacagagtaaagaagtgcgttttttgcaaaaactttctatacaaaagttgctttaaaaatcaaattaatccattttaaaaaaattttctgctaatacttaattaatcacgcgctaatggaccgctccgtttcctgtgtggaggagatggttcccaactcgaaggagcgaacagagggttgggaaccactcccctttgcacgcaaaacggagtgatggattaacgcatgattaattaagtattagctataaaaaacttgaaaaatggattaatatgatttttgaaagcaacttttctatagaaacttttttccaaaaacacgcgccgtttagtagtttgaaaagcgtgcgcgcgaaaaacgagggtgatgcgttgggacataggggaaagaactaagacagggggtgtttagataattagatctaagggtgtaaagttttggcgtgtcacatcgggtattatacagggtgtcgcatggggtgtttgggcactaataaaaactaattacaaaatccgccagtaaaccgcgagacgaatttattaagcctaattaatccgtcattatcaaatgtttactgtagcaccacattgttaaatcatggagaaattaggcttaaaagattcgtctcacaaatttatcgcaatatgtgcaattagttatctttttagcctatatttaatacttcatgcagatatttaaatgttcgagttcgacttgacagggtgtaaaattttggggtgggatctaaacagggccttagttttatgccagtaaaatttgtaacaaaaaattcacacatttgaaatgatcccttcaatacttccctcatcacttacaattttaataatttttttaaagttatgctgaatacctaaaatagatattattgtatattggcttacaaatttatatctaaaggaaaaaatgtagcaagtgaagaaattcaaccacctttttcagtcctttgtcagttcaaaattaccttcagaacccaaccaggacgtacctatgtatttgactccaacctgtctgataactaaaaaaaaaatgtcctagactccatgatgtaaaatttgctaggttaaattagaccagattttattttaagaattgcatgtaacattttctttttttaaattattcttaccttaatttttcctatctaatatttaatctgcattaattttgcttgtaaaattttcttgatggctaacattagttttttgttcttttgcctgtcattctcctcttacatgcagcgcaggacttgcccgtccagtagggcacccaagacccagcacgcgcgcccaacgtcattcgtccggtcgtcgcacgtcctttgcagccgctaattttcctccctcctattgggctgtgacatatatatatatctaaaagtctattttacctccctcttcttgggctgtggtatataaatagctaaaataagtctatttaaggtccctattctttggacaattacatttatatgtctattttagtccctatactttatgtgccgggcctagcctgccggcccatcgtgccgggccggccggtcgggccagcgtgccggtggggaggcccagacacggcccggcagtcgggccatgccgtgccgtgcttgggccgggccaaaaagccgtgccatgggccgggccttcgggcctcgggccttatggccatctataattgagagcgattttttttttctgtggaaatctaccaatccagaagcttatccacaaatcatcaatttaacatgcatcatatatggttcggcaccattcagattcgccagtggaaactgattctatgtacgcctactaacttcaaaatcttcttattttcataggcaacctgtccagctgttttcgataacagaggtacatggcgatgtggttatgtttgtagctttcttgggagttctgaacaaaccatttgtaacacattagcaggtgattacatggcttgttttcccacagaaattacagttttgttgttaaggggcaatacccgaattcttggaggatcattgtttccatttcatttcgttcaaaagaaatttgtttccatttcatcatctggtagactggtatgttcatagtgttagttagcatgaaaggttcggatcatgtgatcacgacctgacagcttgcatgcatgtagttgttgaggttagtttggattaggttagtctatccatgcggatcaggttagcctttcctccacatgcgataacagatgtttgttagagtttgttttctgttttctgttactgcatgcagtcgtttcatcaatctcggcttcggttgttctcagctgcgccgaactctgtatcgccacgatgggggctgttcccatcacatatatattaacacgaaggcgacgcacaggattagtgcgatcgtttccacccaaactaattcacatggtatcagagcgttgatcaattccctaatagatcaatactcatggcctcgtcgtccagtacggctgccacaaatccgttccaaggccacccaatctcagagaagcttgggaaggcaaatcatgcgctctggagaaaattgacatttagccattgtcaaaacggggtttcgctggaatgccactcccaaaaatggtttcgttaaaatgccaccctcaaacaggggcaacttgttgcaatgccattccatccatttcttctcagtttaatgttttttgtaatgtttttcttgttgagatgaccaaaatacccttatcctatctcatctctcctctctgtcttcctcctctccgttcggctcggcggcgcagctagagacggagacggcggcagcgtggccggagacggggaaggcggcagcgcgcttggggatggggaaggcggcggtgcggacggggacggtggcgacgcggatggggacgggaaggcggcgacatggctggggatggggacggc

SEQ ID NO: 7246 - DNA, 748 bp, Oryza sativa
tatataaatcctccccgagctccccaccaccgtttccgccactcaccgccctctctccccgccggaatagagctcgcgctgtcgctctctctctccgccgtcgccgccgagctccggtccgccgccgtcgtcgccccggactacctcccacctcggcgccgcctccttcggtttcgccgcagcctcgccgacctcgtccacccctccgttttgctcgccgaccgccggagcgccgtcgaccccgtccacccgagccgcgccgccgccttcctccgctccggtcgcccgttccgtcgtcgccgtcgacccggggtgagccgtggaccgccgcttcgtttccccctttccctcccctctctcggccgccgctccgccgtgcctatggccgccgccagcgaccataggggcgcgggcgcgccgcctcccgccggccgtgccgatgtggccgcctccgggcgcgcctagcggctgccgcgtggggcccgaccgtcagccgcccgcgccctcgggtgcggctgacgcgtggggcccacggcgccggccggtgtgagccgggtgcacccggtacaccgtcgacagtgagactgccgcgtgggtcccactcccgtggacccggtccgcgcgccctctctcccggctgacgcaataaatctatttttaaattaaaatttaaatgaagaaattcgtaaatattcatttaaagagcatataaacttcaaatggccataacttggccatttgaactcgg

SEQ ID NO: 7247 - DNA, 3581 bp, Oryza sativa
cttcccacaactggcatgcgcccaaaccccaccgaaaacaggttttaggggttttgaaaggggaagagaggtgtatgtccaattccaccataaaccaacaattccatagtgtccaaatgatatgagaattcccaaagtctaaagttataaaatcacctaatgttgcctaattaaccagcgaagcatctacctaagttcatactagtggaaccataaatagagtacccactagttggggttttattttcctagggtgaacaaggtaataataacaatagcaataataatgtcttaacaacgataaataggcatggctaaataaaacagtgataacgcgggaatttaaataaagcggtaatgcaataatttaaatcaaaataattttataaactggggttcaatatgctcaaggatgatgtgacttgccttgctcgctttcccaaacaccggcttcaacttccacgaagagcggatcttccgaagctgcagcgtctacacgactaacgaaaaagaaaaggcttttactctactaaactccacataacagcagaaacaaagcacaaaaatgggttcttgacttcttaaggaaaaattagagacttgaacggtccaattccgagttcaaatggccaagttatggccatttgaagtttatatgctctttaaatggatatttgcgaatttcttcatttaaattttaattaaaaatcgggtttattgcgtcagccgagggagagggcgcgcggaccgggtccacgggagtggggcccacgcgtcagcctctcggtccacggtggaccgggagcacgcggctggcggcggccggcgccgtgggtcccacgcgtcagccgcacccgcgggcgcgggcggctgacggccgggcccacttggcagccgcgagggcgcgcccgaaggcagcctcgccggcacggccgacgggagggggacgcgcccgcgccccgatggtcaccgccggcgaccaccggcgcggcggagcggcacccgagagagaggagggaagggggaagcgaatggagcggtcttcggctcaccccggtcgacggcgacgacgggaacggcggccgaaacggaggaaggcggcggcgcggttcgggacgacgaggacgacggcgctccgacggtcggcgagcgaaacggaggagcggacggggtcgacgacgacgcggcgaagccgaaggaggcgacgccgagaggggaggaagtccggagcgacggcggcggcgaaccggaactcgtcggcgacggcggagagagaggaaagcggcgcgagcgcgattccgacggtgagagcgagcggcgaacggcggaaacggaggagagaggcacggggaacaattaaatagcgtcgggagagagggaaagcggccggaggagatggaaaccggcgcggagatctcggccgccattgattgcgccggcgaggatcgcgggcacaaaatcggacgaatccgagggagagagagaggggaaagtgggggaatcgggagagggaatcgcggggaatgattcccccctcattatggtgcgcggggacggcgggatgcggcggaatccgcggcggcggcggcgctagggcacgggcgagcggcgggagcggcgggaggaaggcgatgacaggtgggccccacccgtcagcgagggtggcgggcgggcccgcctgtcagcggcgcgcgcgcggggaggagccgatgggccgcgggggagaggagagagagggagggagagaattgggccgagccggcccaagaagggaagggggggaaagaagacttcttttagggtttttctttttataaaacctttttaactttgtttatttcttaataattattatttgtgctctgaaaattccactaaaatttgagggctccttttagaccaaggagaatttaacaaaaattctccgggccacatttgaatttttcttgtacgtattttagtgtttgccaatttctttccgaattttaattaattctattattccttttagaaaatgaattttaatttcgggatgaatttatcaggacgtgacaaatccaccccccttacaagaatctcgtccccgagattcgaggaggctagcaagaagataggttgggcggtcttctcttcttgtctgacttcttccgtcgcgtcttttataacaacttgcctagcaaaacttctctactctggactgcttggctcaatctcctgttgcagatggaatcttctcttcacctgacttgtccctggttgaacctttagctgacttcgactgggttgcggcacttgaagatggtgcttcagttccagaacttcgcatagttcatatttttggcgtcaacctcatagaagttacccatttcacgttatgcgtcgagatcagctcgtcattactaggataccatgcttgtcatcatgagcatatcatgcttgtcatttacttctaacctgccaccaactgcctcatattagctttcctagtctccgggtgataactacttctgctatttgatgcaagggtcgataactttgcctttgaattatgtttcccaagagaaccaacttatcccacttgacatactttgacgtcttcccaaatggctttactgctggatttgttgatgtctagtcattatcctgccaaatctgaggcgtccgctagctagatgcgattttaatctgacctctgtagattatcttcgaacatatcacttggttcataactgggaatagctctcacgaacaagcaactcggattcactttctttacatttggttcacttcccactattctcttcatgttgtcatcatttagcattcaacatattcctttgcaccttccgccttgatgtgttctttctcgatggatcgattggtaggaaagtgcgttgagcgatactagtgcaagtgctttcattctagtagcatctgatacaaagcccaaggttgaaccgagctttagattccactgttcaggttttacttattgacttcttggtcatgtcacaaaagtttccatccttgtccccatagaagtacttctacctgtggtcatctctcttactcgtgaattcacctattttaatgacagggcaactgttgtagggttgtttgctatcgggagtcttccttgagtgacacaaatcatggttctcgttatcctttatcaatcacctttcgacctacttcttttcccagtaaccaaacatcttttccgatctcttccattaatcacctttcgacctttctcaaccaggtactcttcactccgggtgttgaggatgcttctggggcaatgaggtgcttgggcgtgctgtctttcagagaaaccttgaagtagttcgtcaaaagctagactgacgattgttgcctttgatccgaagagacacatctgaaactcttagtccaaacaaatgcctctttggttgatcacttgattttcttcgccatcaatcgctaggctatttgattcctaacagattatgggtttacggaaatgagaccctaggtctccctaatcaacaacaaaatgtgcacaactcacagcacttgcactcttaacatggatccttcat

SEQ ID NO: 7248 - DNA, 27222 bp, Oryza sativa
  unsure (1)..(27222): unsure at all n locations
catctccatcctcctcgacgacctcctcctcgagtgcctcgccggcgtcccttatgcctccctcccgcaactccccaccacttcaccacgcttgtcgcctccgtcggcgcgcacggcgagctccgctcctctctcctcgccctttccgtcacgcccacggcgagccgacgaatgttggcgtggtggtggtgatgaggacgaggagccggcggccaccgactcgcagctacgccccgtcgccgccgctacgctccaccgccggcgactggatggggatcccctttcttctttcccctgcaaagtcaacaaaatgactaggggcaaatatgccagagaatgatggaaaacatttggaaatcagttaaaatggttgaaatggcattatagtaagttggcttcatttgacaatggtattataacgaagccatattcggaagtggcattccagcgaaaccccatcctgaagatggctaaatgtcaattttctctgcgctctggaaggtgcaagtaagcgccgcagtcagaggagcgcggcttcaggggcatctcaccggcgcaaccaagcggccgccggcagagatcgctgtcacaaaagatggcgccaccaagaaggagccgaacccagcccatgaagactgggaagccaccgaccagcaagttctggggtaccttctctcgtcgctgacaagagaggtgctgatgcaggtcgctacaggcgacaccgcggctgaagtgtggagcgccatcgagcagatgtactccgcccacacacgagcaagagcgattaacactcggtttgctctcaccaatacaaagaaaggtaacatgtcaactcctgagtattttgcaaaaatgaaatccttaggagatgagatggctactgccggaggtcgcccgatcgatgaagaggagctgattcagtatatcatcaccggccttggcgagggctacagcgaggtggtgtcggctgtctgcgctcgggttgaaccaatctctgtgagtgatctgtactctcaagtgttgaactttgaagctcgccaagccatctaccgcggcgcacaggaggtcaccgtcaatgttgccaaccgtggaggcttcagccacggggggcgtggcaacagcaatggtggccaaggaggttcgcgcggcggcggcgacggcggcggccatggtcgcggcaacggagaaggtggccgtggtcgaggccgcacaccaggaggcgttgataaaagaccaatctgccaagtgtgtttcaaacgggggcacacggcagcagattgttggtataggtacgacgaggattacgttcctgacgccaagcatgttgcagctgcagcggttaactcctatggagttgacacaaattggtacatcgacactggtgctacagatcatgtcacgggagagctggacaagctcactatgaaggaaaaatacaacggtggtgaacaaatccacacagcaagtggtgcaggtatggatattagtcatattggtcatgctattgttcataatcccaatagtcgtaatatccaccttagaaatgttttatatgtgcctcaagctaagaaaaatcttgtttcagtacatcgcttagttaatgataactctgcctttcttgaattacatcgtgattatttctttcttaaggatcaaatcaccaggaaaactctccttaagggaagatcatggcgcaggctatatcctctaccacactcctccttgaagcaagcctacagtgccatcaaactatctttggaccggtggcatcatcgtcttggtcatccttccattaccacggttaaacaagtagtcaataagtttagcctcccctgttcagatttgtctagtgagtcagtttgtaatgcttgtcaacaagcaaagagtcatcaattaccttttcctatttcttccagtgtttccaaacaccccttagaacttgtcttttctgatgtttggggacctgctccagagtctgttgggagaaaaaaatattatgttagttttattgatgattttagtaaatttacttggatttatctcatacagcataagtctcaagtgtttgacaagtttcaggagtttcaagtcatggtagaacgtcaatttgatagaaaaattctagccatgcaaactgactggggaggcgaatatcaatcccttaactcttttttttctaagattggcattgttcatcatgtttcctgtcctcatactcaccaacagaatgggtcggctgagagaaaacatcgtcatatagttgagatcggtttatctctcctatctcatgcatccatgccattaaagttttgggatgaagcctttcaggcggcaacttatcttattaaccgtgtgcctagcagagttatccataatattagtccccttgaaaaactgttcaaacaaaaacccgattactcctccttgagaatttttggttgtgcctgttggcctaatcttcgcccctacaataaccacaaattacaatttcgctctaagcgttgtgtttttcttgggtttagcactatgcataaagggttcaagtgtcttgaggtctctacaggacgcatctatatttctcgcgatgttgtctttgatgagaatatttgtcccttcactgaacttcatgccaatgctggtgcccgtcttcgttctgagattgatattctcactcctgaactgctaggacccatacggtctgttgggaatgaacaatgcatgcatccagtgactaatccattatctgctgatgtttctgctgctttatctaatcgtgctaatgagccacatagagatggtgcagtacatcccgctgatgcagaagatccgccggcgacgcctcctctggatgccagttctggtccagaaccagaccgtgtcgtccaccactcccctgcggccacgtcatcaggccgtcatccgggtcccacacctggttctgtgccacggggggcagcatcatcgctagcagaggagacagcagaagactcagtgtcgcaggcggtgcaggagcaggagtcgcaggtggtgcaggagcaggagcagtcctcaccagcgcaggaacatgcacaggctgtcacagatgagactaatacattacagcatgcagatgtgactgacacaggttcagaggcaccggcaggaccgcgcaccaggttgcaaagtggagttcacaaagaaaaggtatatactgatggtactattaaatataagcattcttggtttactgcttcaggtgaacctacaaatgatttagaagccttaaaggataaaaattggaaactagcaatggattcagcgtatgatgctttagttaagaataaaacttggcatcttgttcctcctcagagagggagaaatattattggctgtaagtgggtgtataaaattaaaaggaaagctgatggtaccctagataggtataaggcaaggttagtagcaaaaggatttaaacagaggtatggtattgattatgaagatacctttagccctgttgttaaagctgccactatcagaataatattgtctttagcagtgtctaaaggttggagtcttagacagctagatgttcaaaatgcctttctgcatgggtacctagaagaagtttatatgctacagccaccaggttttgaggatcctactaagccacatcatgtgtgtaaacttgataaagctctgtatgagttaaaacaggcacctagagcctggttctctagactaagtaaaaagttgatggaccttggttttaaaggatcaaaagctgatacgtctctgttctttctgaataaaggtgatataactatgtttgttctggtatatgttgatgatatcattgtagccggctcttcagaaagggccactgcagctttacttcaggatctaaaaggggaatttgcactcaaagatcttggtgagccgcccccccaaaaatttttttttaaaaaattttttttttttttttttttccccccttcccggnaaataagaggtaagcaaggttcagaatggcattgtactgaatcaagacaagtatgccaatgatttattgaagaaagtgggcatgatagattgtaaacctgctaatacacctctttcagtaagtgagaaactctctcttcatgaaggctcattgttagggcctgaagatgcaagtcactatcgcagtgttgttggtgctttgcaatatttgactcttactagacctgacatagctttctctgttaataaagtttgccaattcttgcatgctcccacaactgtacattggattgctgtgaaaaggattcttaggtacttaaagcaatgcactcggttaggacttgaaattcataagtcaggatctactttagttagtggcttctctgatgcagactgggcaggctgtttagatgacagaagatcaacaggaggatttgcaatatttctgggttcaaatctggtctcctggaatgctagaaaacaagccactgtgtctagatctagcacagagtcagaatacaaagctattgccaatgccactgcagaaataatgtgggtgcagactttacttgcagagttagagattaaaagtccaaaagctgctaaaatatggtgtgataatcttggagctaagtatttgtcagctaatccagtgtttcatgccagaacgaaacacatagaagttgactatcactttgtcagagaacgggtaagtcagaaacttctagaaattgattttgtttccactaatgatcaagttgcagatggattcactaaacctctgtcagtaagactcctggagaatttcaaaagcaatctgaacctggttaggtccggattgagagagggtgttagttagcatgaaaggttcggatcatgtgatcacgacctgacagcttgcatgcatgtagttgttgaggttagtttggattaggttagtctatccatgcggatcaggttagcctttcctccacatgcgataacagatgtttgttagagtttgttttctgttttctgttactgcatgcagtcgtttcatcaatctcggcttcggttgttctcagctgcgccgaactctgtatcgccacgatgggggctgttcccatcacatatatattaacacgaaggcgacgcacaggattagtgcgatcgtttccacccaaactaattcacacatagatctaagctaagcagttttaggtgagagcactatctattgtttatggtattggtaacatatgtacatgatcattaataagagaactagtaagagaactaggaaggtagcccgcgcatatgcgcgggcacttatttaatgttgcttaattttttattggtataaatgtttatatgtagattatattttcaaaatagatcttcactctatttaaaacatgttttagttattatctagttatgacatattacataaaaccatacagccttgaatttatgataatgacatgaatttataagaacaacatgtgtcacgataataaaacaataatagaataatggagttgtttcatatctatttgtactatatgtgatttttttacctaaataaagtgtttttttaattaccaccacggtaaaatctccaaaggaccatattgttggttatattttgataaatatctataattttgcgtctcgtgtttttcaacgcctattcttcataatcattcataatcacagaagacaccttgaccaattaatttggagaatgaatctattttcccaaacttatttataataactaattgattaaagtatacttctttgtcacatcaatagagtgcatgacatacattcatcgaattatgcctgatatgctggaattcctcaactataagaaaatatagagtgaacttcactgtgggctagtaatttttacccaagtttcattttggactaggggtggacaaatcttttcactttggaccaggtgattttacaaaaatttcaaactggactggccttcttctccatctctcttatggtttttttcttcatcgagatactgccatggattaaccggagcaagcacataactaggatttcttctctcggatccgttcctgagctcgaactcacgaaattaagtcactgggcagcttgttgctgcaactgtttcctgtgagatcacaatcatgtgattttttttcagctcacatgattttggtgggagaaaaagagcaaaaaaagaaaatcaaggtgctggttttttctttattgagatgctgccatggatcaacccaagcaatcacatgactagcattccttctctccgatccgttcctgagctcgaactcacaaaatcaagccatagggctgcttgctgctgcagctgtagcctgtaaactcacaatcaagtgattttttttttcagcccacatgattttggcgggagaaaaagagccaaaaagaaaatcaaggtgctaagtgatcaggatacattactggcgtgtttagttgtttgtgagctaaagaaatcaaggagtgagtggcagcacagtaggtcagaggcaaggaacaacaagaatggtccaatgtgcaatataaggtagcaaatcccggtccaaagtgaaaacatcaaacatagcctagtccaaagtgaaactttggcaataataagtggcctaaagtgcaattcactcgaaaatatatcgtgagtagtttattgcgtatgttacttgattgttcatttgttatcaaaactatttgacaaagagaaagacatacatatgggacaataaatctcatgatggactaaatggttgttttatagcaagatcactggcttgaaatatttttcataattattttttagatttatgtaatatttatgttgcccaattatcatatagttctgaaaattcaaaaaaaatgaaaatattaatctcaagaagtattctattaaatcatatctacttaaaaatacacaactaaattgtgttgttttcaattattttacatatgtagctttaaattagcattatatagtcatcaagtgttatttgacacctggaatatgatgtaaaattatttaaaataggaaaagcctagagccaagtcattatatagtttctcttgtagagaaactcatcacagctttagagccatccactccctggcagcttagagccaatcctaagcaaacactgaccttggcaggcagctccatcttggctggccggctgagatcaatcatcgatggaggtggccgttggtgcggcgagctggctcgtcggcaaggtggtgacgcagctgtccgatagcttggtggaggcctacgtggccagcaccgagcttggcctcaacatggagcagatcaagagcgatctcatgttcacgcaagggctgctccacgaggctcagatgaggagggacgtgagcaaccctggcctgcctgggcttttggagattctcagcaagaaggctgacgaggctgaggacacgctggatgagctccagtacttcatcatccaggaccaaattcatggcacccatgaggccaccccggtggtagacagcagcatacgtggccaggcactccatggccaccatgttcttcaccgtaccgttggtaactgcctttcatgcttttcttcttcttctacacgagatggtgccggtgaccatgttggcaagttgacattcaatcgagtagatatgtcaaagaaaatcaaatcaataatagaaggcatagatgccgcatgtaaccatgtatccaatttgctcaaaattatccatcctacagtaggaagggttctatcactgaagcgacctcccagcagctcaacaattacacagaatgaattatatgggcgggaagacatctttaaccagactcttgatgacatgtgcaccattcgtagtgaaacactatcagttcttcccatagttggccctggtggaatcggaaagactacctttgcccaacacctatacaaccacaaaaaaacagtggcgcacttctctaaaaacaaggcctgggtttgtgtgtctactaattttgatgtggttaggctcacccaggaaatcttgaggtggcatatgtcaaaatggaaatgagggaagtagtgaagcacataaaacatccaacttggatcagctccaaaaatccattgaagaaagactggatcctaaaagatttttacttgtcttggatgatatgtggaaatgcaacagtgaggctgaatgggaagtctactagctccattcaaaacaggagaagccaaaggaagtgtggttatcgtcacaactcgctttccatctatagcacaaatgataaaaacaaccaagccaatagaactgcaaggtctagaggatgatgaattcttgacattctttgaagaatgtatatttggtcaatacggcggtcggccttagagattggacaaaaggcatctgctcagaggctaaattgcaattccatatggcactcaatgtcatccaaagactcgacgtggcacaagagcacagagaactctcccccccccggaaacgcgactgagggcggctctcaagcggaaagtcctaggactcgcttctatagaaagggcaaggaaaaagcaagcctccagggtaactcacatccgtgaaggagatgcgaacacgaagttcttccacctcaaggttaatgcgcgaaggagaaggaatacaatccaaagattgaaaaaggacagtggttgggcggtgacgcacggtgaaaaggaatcgacgattcatgatcacttcgcaagcttcatggggaggccagggccgaggccaaacgagctaaactgggagacgttggacatcacaccgattgatctagccacgctgggggaacccttcactgaggaggaagtgcatagggcaattaaggaaatgccagccgacaaagcaccgggaccagacggcttcactggggccttcttcaaagtttgctgggaaatcatcaaggatgacattctgctagtcttcagctccatctataacctgagatgtgcgcacctgaatttgctcaactcagcaaacatcgtcctaatcccaaaaaaggatggggctgaaagcgtttcggactataggccaattagtctaattcatagcatcgccaagatcttcgctaagatgctagcgctgtggttaaggccccacatgcatgagttgatctcggtcaatcaaagcgctttcataaaggggagaagtattcatgacaactacctcttcgtaagaaacatgaccagaagataccaccgcctaagacgggcaatgttgctcttcaagttggatataacaaaagccttcgactctgtgcgatgggattacctcctagccttgctgcagcgcaagggcttctcgacaagatggatagactggctaggggctttactgtcgtcttcgacatcccaagtcctccttaatggctcgccagggcaacggatcaaacatggaagaggactacggcaaggggaccccctctcgccgcttctcttcatcttggcgattgatcctctacagcgtatcctttccaaggcaacagagctgggtgcaatttcaaaattacgaggaagaacaactcggctgcagatctcaatgtatgcggatgatgctgtgatcttcattaatcccacccggaacgatgttgcgactttcgcgaacatcctacatcgttttggcacagccacaggactcgtcaccaaccttcagaaatcccaggttgcggctataagatgcggcaatatagacctggaagaggtcctccaaggcgttccggcgaagcgggcaaatttcccactaaaatacttgggcctcccgcttgttctgggaaggctgcgaaaaacggacttgcaaccggtctttgacaaaatatcagggagagttgcaagttggagggggaaaaacatggcagtagccgggagaaccacgcttgtaaagtctgtgctttcagcgcagccaatttatctcctcactgccttgaaggtgacgaaggaatccctggagcagcttgacaagcagagacatcgcttcctttgggctggtacgggggatatcaccggggggaaatgcaaggtcaactgggcaaagacatgcttgccgaccagccaggggggccttggtgtcctaagcttggacaagttcacaagagctctgagattgcgatggttgtggaacgaatggagagatccaagcaagccttgggtgggtttggaaacgccttgtgatggtgtggatagggacctcttcgccgcctcaacaaagataactgtgggcgatgggaatacaacgcgcttctgggactccgcatggattaacggccaaagaccaaaagacctaatgccgttggtctatgagatctccaaaaataggaagaaatccctacggcaagggaaagaagacgactcctaggtgcatgacctgaccctcgatgcgggttcatctatcacaatcaaccttctcgatcagctagtccgcctgtgggaggcggtacggaatgtgcacttagacagcgaggagccggatcagattgtttggaaattcacaagcagcggccactatacagcttcctcggctaatcatgcccaatgtttgggggcgccaaacacaaacttcaactccctaatctggaaagtttgggcgccagggaaatgtaaatttcatgcctggctcatcattcaaaatagagtctggacgtcggaccgactcgcgacaaggggttggcggaataacggacattgccccctatgtcgttgtgacaccgagacagccttgcacctcgtcgccatgtgtagatacacgaagagaatctggcgcctcgttgctacatgggtgggatatcagcagttggaaccggcccaatgggaggaagcctggtcagtccatcagtggtgggagagcctagctaacacacccggcattccaaagaagggccttcggtcccttatcctgctagtagtttgggaaatttggaaggagcgaaatcggcgaatctttgatcacaaagagatggcaacaggtgttctcctagcaaaaatcaaagaggaggccagcttgtgggctttagctggggctaaaagattgcgcgagctcatcccgcactctgtatagtgtatagtctaaagatctttttgttttatccctaggggttgtattttctccttctatattcaatgaaaaagcactgctgtgctgttttttccgttcaaaaaaaatatatatatttggtcaagacaagcctgcatgttatgaagatgacttcattgatattgcaagaaaaatttccaagaaattgaagggttttccactagcagccaaaagcgttggtcgattattgaagaataacctttctcaggaaagttggatggaagttcttgaaagaaatgagtggaaaaatcggcaaggtgacgatgacataatgccagcactacatagtagctatgattatcttccattttatctaaaaaaaatgtttttcttgttgttccctttaccctaaggaccactggtttaataaattagagattactcattttttggaagcattaggcatcctatgttatggatgtcaaaataacaaagatgctgatataggattaaagtatttggatgaactggtaggtaatggttttctcatgaaggaaggtgatgatagtaggccatattatgtaatgcatgacttattacatgatctagcacaaaatatttcgtcacaagagtgcatcaacataagttcatatagttttaggtctaatagcatcccgcaatctattagacatgtatccatcaccttacaagataagtatgaggaaagttttgagagagaaatagaaaaattcaagaaaaaaatagacataggaaatttacagacattgatgctttttggagaaagcaatgcaagcatggcctttttcaaagacttattaaaacaaacaaaatgtcttcgtgttctgtttatgcatgcagactcactcgaatcattcccacacaacttctcgaaactgatccaccttcgatatctaaagttgaaaataccttataacgtaaaattgtctctaccaaacgcagtaagtagattttatcacttgaaacttttggacctagggaatagaaattgtattttgccaaaagacattaatcatctagtcaatttatgcctctttcttgcttcgaaagaactttgttccaacattcctgggattggcaagatgaagtatttgcggaggttggaagagtaccatgttaagaaagagggtattgggtttgagctgagtgagctaggggatttgacagagcttggaggtgaactgaaaatatttaatcttgagaacgtgacaacaagggaagaagctaatgaagccaagttgatgatcaaaacaaatctgaaaacattgaagctagtttggagtgtggtgcaacggacaacacgatctgatgttcttgacggtctccaaccacctcctaatcttaaaacacttgtcataataaaccatggtggttcggttggtcctagttggttgtgcagttatatttgtgtaaaatacttgaaatcattccatctagagggtgtctgttggggcaatctcccactttttggtcaactggtgcagctagaggaacttactttgaagagtatttcaggcatacatcagttcggacctgattttggtggtgtaacacaaaaaagtatctcgcacttgaagaaagttgaacttattaatatgccagaccttgtggagtgggttgggggagctcattgccatttgttttcgaagattacaagcatcaagtgtgaaaatctatctatcttctatctatctatctatctattatctattatatactaaaagtccattaaacttactataaacgctcccaagccgccacttggcgctctaataaattagagaaatctaagaaattctaagaaaaaagcaaaacatctgatcctcgattttcacttaatacagcgggcccattattttacaccattagatccatattaaacaaaataaaccccatctcccaaaaatcctctcccgctcccctcatgggcctccactcctcacataaacagtacgtacatgtactaacgttcctccctcgcatcctctcttttctccattccattcatcttctatttttttagataataaatttattatataaaaataattagataactaaataattatatttatttgcaacatattatatttatctatattagccatgtgttttgatatatgagaaatacatcatttgacaaaaactcctacaaatagcaaaaattaataacatatactatcatgtgatcgcaaataatttcatgtcctctttgcttgctcaccttggcctccttaatttctagctagcaaataataaatatccattaaattaaacatcgtgtatcataatatatctatctattatatactaaaagtccactaaacttcctacaaacgctctcaagccgtcatgtggcactcctacatacactcctaagccgccacatgtcatatctctaaagattctacaaattttgaatacaaagaaaatatccgaccgtcaattttcacttaaatcagtgacccattattgccaaaaaaaaggctgaacgctattcatcgggaaaaaagccaaaaagaacgaacatatatgtacgctcacctcaagtaatgaaaaaacacagaaaaatagcataccatccctcgcctgatcttataaaaacattagactattacaattaaatttaagagatgtaaaacaactaaaactgatatttaaaaatcatcgacggttacgaaattatgatatgttactataaatttaccattagatttataacaaaactacaagaaaaactaattccatttatttatttcatcataaaaattataacaaaactaataatatcgattatatcatcatatataacttcataaacatggataacaaaaattatatctatgattattcgaagtaaatatttcattcattatgaaactgtgataagttacaataacattagagtcatgataaaattatcagattgtcatataaactactttcatgtattcatatttttaagtttattgtgaatatactaatttcatgtattcatatttttaatttttattgtgaatatattgcaagaaagaccagatacaaagctcttactatggtacaacctacacagtttatacgtggataacttaaaggtatcaagcatatgtcccgttaatcttgaatgtgtccgacccacttacaaattcttatccaccaaacatcgagctacaattgctaacaaggtatttgtgcatcatatcatatcaaatatctaatatatgatgaacatgtgtaccattagacgcatatagagataaaggacattttataagggacatttgctcatttaacccttttctaaagcttaactaccaatttgatccttttttaaaacaaggtttgctcatttgaccatgtttttcaacatcgaagttgtcgtctgaccctactttcactacatcctgagtttttcatttagaagaaaagaaaaacatgtatttacaagcccaaatgactaaaatgacactgaatacatcaaccttatcctcaagcactcatttgctcattccttatccccccgtctctctctctctctctctctctctcttcaaagcgcgaagggcaggaggagcggtggcggcagcacgacagcagctgcggagtgcccccggctgcttcgcggagggtaggatcggtggcagagaggcaacattgactcgccgacgaggagggccgctggcagtggtcgaagagacggtgacaactcggcagaggggaggcagcagctccatgaagggtaggaggggtggcgtcggctcagtgacgaggaggactgccgacgatggcgaatgggaagcggtggctgtggaggggtggcagcaaccacagatatggtaggaggagcggaggcagagggatggtgtcggctcagtgatgaggaggataggcggtgacggtgaaggggcggcggcacggtgacgaggaggaccattggcgcccacgcacatctccgccattagcttgctaataaggtcaaataagtaagggtagaagtggtatttggggcttttgttaactccgattaatgctcttaagagaagaaggtcagagtgtagcttcggttttgaaaagaagggtcaaatgagcaaagtgaccaaaacatggtcaaatcggtagttagatatgcaaatagggtcaaatgtgcaattgctccattttatattatagattatatcattttgtatcattttataaacatacaaagccaaagacacgggtgatttacttaatctatctaaaaaaacatgtctacggtaataagaatcatagatactgaaaagacagaaaaactcaagagcatataccctaataatacctaatagtaaataaaaattatcaatggctaatccctaggacatataaaattataaagtattattttactagtttattaaatgccctaaagaaccctcctacaacgtctattaaagcctttaacaaataagaggaaactttaaatttcttctgtaatagataaagcatctaaaccttattcctcattaatttaatgctcccattaattttggccattgggccatttcaatgggtatatgtatacacacattatttaataaaaaaacattcatccaagcatgttttctaacaaaaaattatttgagatgtcaggtgaggttgtaatgacctgttgcatggtttagagggttgttgtcaggatgactagcattgagttttactaggttgccagccatccaatgcatcacaaaaagagcccatataggagatatttgtgttttgttgatcgagccaccatcaagagaagccaacatgggaaccccagtacaaatattttttatgactaaatcttctcttaactcaagtatctatgtaatattatttaagtcgtgttggcttgaagcatgcataatttgataacatggtatatctagaaggctacatgttagaacattcaattaacccatcttggaaataataatacttagcaagaaatcaaacaggtaacaaatttctatctttaattttgatatttaattttaatcattggaaagggggagatagagtgaatggtcacccccaaaggttttttcaaacagttatgttaatattgtccaatttgcaagctaaatgtttttttaaaaaaaagagatatagcgggttgattctgaagtattatcgtactattcaagagtagaggaagtagtaatcgtatccaaaatacatacaaagaaccatcatacataattttagcattcagagaaatagagatgcacgcgcaacgcgcgggctatcttcctagttggcctaatttctcttcggtgctgcggccatcctcggagtgctctgtctctcatatacaagacataaacaccacatggtttcccaacttgtgtgatcttgacattcggagttgccccaagttgtccctgccccccatgcctcatacttctacgctgacacgtgttagtgtgagaaaaggtgatgaaacactcttgtattttcgggaagaagagctgacagcataccattatgatggtgctttggcactccacaacctgggtaaagtaaaagctatggaaattgtagatatgctgcattttccattggctgacctccaaaatctaaactgcctaacacgacattctttcgaggattgcgataacattgacaatactgttgttctccattcagttcagtcgctctatctcgatgattgtcatcttactggaaaatcattgacaatggtattaagcatttttccggctcttacctacttcaatttgagaatgtttggtgaaaatcatgacatagaggaaatagtgctgcaggccccaataacctgctcattgtgccatatgtcgatatcctccagcaagaacctagttctgccagttgaggacggaggaggtctgcaggaactctcctcactccagtcactcaggatttcagattgtggcagaatgttctctcgatggtgcatggtcgatgcaggagctcgtaccagcaagcccctcccttcttccctcagggagctcagtatttgtagagagtcaagcatgcagtcgatggctctgctctcaaacctcacatctctcacacatcttacactattggaatgtgaagacttaacagtagatggatttgatcctctcattacactcaacctcaaggaattggtggttttaaataattgttatgagaacaattattcttgttccatagcagcagatttgctctcagaaatgacaaggaccaaagtattatctgcaggttccttacaactggaagcacttaaggtggacaatatctcaggagtgcttgttccctccatttgcagcctccttgccgccaacctccacaagttaattttcaaatctgacttgcagatggaaagcttcgatgaagaacaagagcatgcgcttcagctcctcacctccctcaagcaactatattttgccgactgcccaagtctgctttccctccccgatgggttgcatcacatttcttctctccagaaattgcacatatataattgtcctaaaattggattcctacccaaggagggcttcccctcttcattgagagatctagtgttatcagagtgtagcgtcgatctacaagatcaattgaagaaattggagacatcaaacccagatttatttgtacaccacatgaggtaaaaaggaaagaaaaagaagtgttctctcaactactacttatttcagcatccatctgtaaccttcaatactaaactaaaactgctctgctttgtttcctactttgctgtgaaggatgggccgaatcagtctggagatatagcggactatctgcatccgcatgcgagtaacacaatagcacatgcgggccaaaggatcgatcggttcttccctctgcaacaatctggaaggttcttgaaaaaccaactttttttaattttatgtggtcgggaatttatgatctcctttttttagtgcatgcaagcgaccactctgttattcgcccatgtagttcattgcttccttcacctaaccaatgttatattaactgtcagacagttttggtaaccttggctagagactcagcatggtgataatgcatgcagcaggctgatagctatgcggtaaatttgagacgcgccttgccctggtctgacctctacaacatcagttacacctaggtggtcagtaacctctcctcaactcatctcgtctctctctctctctcttgatctctccaaaatagggaagttagaggatatgtcctttaaaactactccctcagtcccgaaataagttaatataatatggcatgtaatattttcaagtaaagtatgctaaaaaaaacaagtatgctaaaaatgactctaaagtatgtatagggtaaaagtattctaggcaatttttaaaatgcctctaaaaggtgtctacacttttgaactcccgaatttagagacaataaaaaatttttatcccgttttttccttttttttttctacaaaagtgtctcaacataaggtttttgttgtagtgtgagcttggcattgagtgtgtattctttctgtggaaacctatcaatccaaaagcttgtccagaactcatcagtttgacatggtacagtaaagttcagacctgcctgccagttcatgtaatcatttgctctttagcttattagccttagcgaaaatttgaatttcagaacttaattttagggttgattttattaattgttttccatcatagtttgttttctggcattgtgtcacgcccacgcctaccatctttcattggcagcttacaacggacaaatgaagaacaatagaacatcattgcttaaaataaagacagatgatgatcaaaagatcaccacagttgacatgagttctgtggagcatcgattccatttcatcatctggtatgttcatctatgtaagcagttttagatgacagcatcaggcccaaatacgaattatacccttacatactcttttgtccttgctctaagtagaaatttaacaaatagtatattatgattgaaacaaatgagtttatatgttttacagcccatctaaacttttcattgagactggtcccaccaactccaaacaacatagaccacacagctctactagactactaataaactggcaatggattctggtgttggtaacagaggcatatatggtctttcttctttttttttaattgaagaggtgcatatggtcatcgataggagaatcattttgagcttattagtttgttaagtcccatttaatcattcattatggaatgctaaaccgattgcacataatactgatataactggaatgacataatatttcttgactactagataataccccgcgcgttgctgcggacataataaataactttcaaacatgcaatatgtgcataacatttgagaagaaaaaagaaaaaactacttattaccatataattgatggagtatatacagtggtaattataactaaatattacatgatggagtatctccccaggtagcagtggttggccaatgcaactaacagaattacaactcaaatatatggctgttgaccggatagagcaagtattaataaacaaaattgaaggccactaaacattactggaaaatgaaaaatatacaccaataaaattacccaaaattatgtactatgtgtttatgaacatagcatgtatgaaaaataacagtagaaaagcaagtaaggtgtcatactgttgtcctcgttaacttgatagcctttattcagcatgacatttttcctagtaccgcttccctcgctgacccattgatctcagttttggaaattctgtagttaatcttgcaaatgaatgccaattgattcatgaataaggtgctagaatatcataaataattgtggtaagaaatgtttatttaactggaagtagcaattattatgcatatcttatcgtataaatatgcgatgaacattaggagcgcatttgtagttgcatagctgatcaggaatgtagtcaaggcatgtagcaaacctaggtgatgagtgatgactactttacaattacaaaactgataataaccataactgaaacatcaatattttatatgtttaaacatctacaaatatagtccaattatcactgatagcaaggaaatcataactaaggtgtcaaactattatataataatggtagaaaattttcatgcttgagtaagatatgggaagttgggaaaaggattattacctcgtatatataattaagtactcatccttgattaactctttggagtgattttagctttcagaaaactccaaaaatatttatatcaccaagctaattcaagagtgacaaaagatacttaaaaacatatctagagtatacatgatcagaaaataaaatgaactttgagacggaagacaacctaatctatttaagagcaaacctgtgtgtctgtgtgtggagaatctgacatcattcttgatgaggaccttatcaaaagtgaaaagcacatcaacgacatagatgtaccgagatatatatagcttcaccagttaaagaccataattaaaataccaaaagaagaaagctccatccgcttagcagcccatatgattgttacttagctcgatgagttcttagatctgatcgggtgacgacaaatcaaccaatagatgcatatttgccacgtcttcaaccacttaagaatgagaagtggtctataattcaggataaataaagaatatgaatcaactaaatcagtagccaagaacctgaaacctggaaaaagaggatacagcaacaataaaattctctgttgggtatcagatttattgaacataaggaaaggggaaatcggtaggtaacctgtgttagatcattgaagtaattggagaggatcgaccaggtgagggctgcatatgaatccagcaagcagagttgcaagaacggtagtaaaacgccagcagcctggtagagtgtggtagatcgacgaataagcgagatgataaattggatatagatgcagaactgataaagggataagaggagaagaaaacgcattaagccattaatggatttacttgataacagccgtgaagtgttttcctcggtggttgtcgacggttttcattaatcatggcaacctaaaggggcgaacaacctttagacatggaagaggaagggggaagcagcgcacgagccgccatgggggcgacggaaggggaaagcgccacaccctcattttgcttccgtgtggcacgggaggcggatgacatgccagcgccggtacgggcgagcacgatgcgggagatggagaggatcacggcgagattgatacgaagggggcggcggagcgagatgcaggagagggaatcgatgcgagcgtgcaaggggagaggagaggagcgatgcgggagagaggggtttatgcgcgtggggccggtgaagcagcgagatgtgggaaaggagaggagcgatgcgaccgcttgattgagatcgaacggtggggagaaaatggggtgacgtgaagcaccaggaagcagagaattctagtagtgggaatgatttgtataggtatataggattcctgctaggggaaggtaataaacctgtgattccaaccacacaataatcttaattatctagactacagacactggtggagaaaccctttgtagtcccggttcgtaacccccctttagtcccggtttccaaaccgggagtaccaatccgggactaaagatcgctatctttagtcccgggtgaaataaccgggagtaaagatcgatctttagtcccggttggtaacaccaaccgggactaaagatcgagctgacctttttttttttgcatgcccctgttgctgcatggtttatatatatatatatatatataaaccatgcatatatatgtttcaatacatatatatgcatacatatatatatgtatatatatatatatatatatatatataatattatattatatgtatatacatgcataatatatatgtatttatacatatatatgttatgcaaatgcatatgtatatagatatatatatgaacaaaatatatttacattatagaaaatgtgtacacatgcatatagaaacatatgtagtcatgtattaattacaatccattatatgtcctagctagctacgatttcgacgtagtagtactcgctgctagctcagaagctaaggaccggtgaattgtgtttccgtcgtagtagaattcacccttgggatcaaggatttcttcgttgatgaatcccatgagttgttcttgaaccgccgcgataaattccttgtgtgtggtcaggttatccctcatgcgaataaactatatgaatgtatgaaattgattagtaattaaacaagaaatcgctacgtaatgaaattttgaatttatttgtacgtacatcgagctctcttgtggtgatgatttggtctgcaaggcagtggcaatactcgcacacgtaatagccgcacaagttagttccctgcttttgctttgcgcactacaaataaatgacaaacaacgagagatctaattaatatacacttgtatgtatttgaatcggagaaatataaatgtagagcatgtgtactcacaggaaatttgaacttccgcctaagtctttctctccatttgctgcggaccaaatgacggaaccgataccaagccctacatggagtttaaagctatgattcgtagtagcaattaacataacaagattttcttaattaacaaaggaacttatgacggtacctgtctataagttcgaaaaccttgtcaaacgtagactcttttttatccattgagtcatatacgttgacggtgcaggcctccaggtcgatgagtaaaagcacccagtggaatctgcaatgtgcgtgggatgcattacatatgaaacacttagcaagttcgtacgggaatgaaatttggtatgtaggaagacagtaaaattaaactaactctgtgttgtatggcaacagtatgaacgtcttgtaatgctgcgccttcaggagatggacgagattgtcctctgtttcttgtggatattggtcgagcattgcgacgtttactttccgagggtcgatgaatccagtatcgaaaaccctccgccgtcgggccctttgaatctccattctaaaacgataaaagggagtatattattttctatggtctacttatatacaaggacctaattaattaaaggagacgtatagtaagaaatctaactgaacgatatacttacaaaatccagcaactcataatagagacgtcgagggcgtccagctggtatagttcgtagattcccctgaaattgatccagagaatgtcatctccttgcaagaagtccgtgtccctgatcctcgctccgatcatctctctaccggtggcgctcatctccatgtacagctgatggaacttgtacatttgtgtgggtagggactgcagcagctcaggcttgacaagcggtttaccgagttcgtacatgtatttcacttccgccttttcgattggtgtgactcctagcaattgatccgtagttagaccggtgtcagtaataaattgttctatcgtcatttctttaccggtcaccaacggctcgatctcctggtttggttgctctccaagctgagggactggtttggactttccagaagatgctttcttcagtgttcgctcatagtccgatagcttgatggcctccttgacagatgcagacatacccctgaagaagttcctgacactggggtctataggaatcttcttttctggacttcgaggcttgaattgtctcttgacttctgatgcaacgtaagcgtcaagctcctcttgcgtgcaatcgtaccccgggtccttgatcttggcggcgtcaactttcgccttctttgttgcccttgtgtgggcaagcggtggagctgggggggcccttgactttgaaggtgccggaagaggagcttgcgggggagtaggtgtaggagcacgaggaggagtcggtgcaggatcctgaggagtcgatgctggagcctgaggtggagacggtgctggcggagcatgaggaggagacggtgcaggatcctgaggaggagatggcggagccggaggagatggtgcacgagacgccgcttgtcgcccagggaggatgatgtaccgcctgcgccatagaataatggcatggcatgtgtctcgtagatgcgtctcaccgtctcctccagggtaatccagctcgaggtcctcgtacgcgccttcgaccaactcaacttcgaccttggagtatcctgctggaatcggcctgcagtggtaagtacctgaagggtccgttgggatggccatgcccgacgccaccttcatgttgtgagagattatttattagtaatcaacatatataagcagcaactagcggaatggctaaatcttacctttattgataagttcttcaaaggaatatgcagctcacatggtgtccgctgagtgatgtcatcaacgggacaggtcgattcgtcctgtgtttgcatggcgtccatgctctgtgatcctacctgccccgttgaggcgcagctgctacggtttcctgacgggctcaccattgcaggaggaatggtcggctggggatcatgggaccgatgtgcggccatgcgttcatcaacctttccttgccacctcctcttgcatgttgagttcgtagctcgatacccggaactctaggtctgcaatcttcgcctcggtatctctcttgctcctcatccgactcctgtacgtgtggatgtcctccttgaaaccaatcttccaaggaatcacccctttccctcgagttcgtcctggatgctctggagtctgcagggcgagtgtcagctcgtccctatctctgtctggtcggaacgtgcctgagaggaggcttccactgcatctgttagtcgtcgcgcagcctcttgtatctgatagccgaagaccagtgagccatcagctgggttgagcgttccaccgtgagcatagtcccagaacttcgatcgttccggccaattggctgttgccggttcgatacccctctcaatcaagctagcctccatctgctcccacttcggcatcgcgacgctatagcctcctgaccccaagtggtgatggtacttcttcttggcggcattttctttgtttctttccatcatcgccttcccttgttcacctgtcttatatgcaacgaactcgtcccagtgatcccttagctttgggaatgtgtcgaagttcggtgtctgccccttcagtatatacttctggtacagatctcccttgaagctctgaaattgttctgccattttcttcagagtccaccttttcactttgtcctctgtacccgcaggaagggtgaatgtctcgagcattgtggtccacagcatctctttctccgaatctgggacaaagctctcatgatctccgcgtgcccttgttcttcgccagtacaccgtactgacaggcacgttatcccgcacaacccaaccgctgtgacgtacatagttcttggcggcttcggccggggcactaggacgtccatcttcttccacttccgttatgatgtgccgaccctcaagcttcttcgctgcacctcgttgcccgcgtgccctcttctgtccaacggagggttgactaccactagcctcctcctcctagttcccctccacatccctttccacgtgcccctgctggttcccctccgcatccctctccacgttcccttcctcgttcaagtactggtttggatcctcgttcccctcttcttcattccagtactggctgcttccctccgcgattgtatcgtacaatatctgttcctcatcgcggtcagccatctgttgatacaagaaacatctgctaagtcatgagacatttatgttttaacaatctaagtcatgtatgctaagtgtaaatgtcgtacattagaaccctacacaaccttacgtgctaagtctaattacaaatcgtgatataagctaagtctaggtgacgtatattatacaaccctagctagtaaataattatatactaagtctaattacaaataaaataatcttatattaaaactcaaataatattacatgctaatactaaaatagtcatgtatatgctaagtgtttcgtgcgtatatgctaagtctaattaagactacaatagtcaattgctacttgtcgcaccaattccgtagtcaataattacataccaagtctaattacaaataaagtaatattatattaaaactcaaataatattacatgctaagactaaaatagtaatgtatgctaagtgtttcgtgcgtatatgctaagtctaattaagactacaatagtcaattcctaggagtcgcaccaattccgtagtcaataatgtcatactaagtctaatttgcaataaaataatcttatattaaaactcaaataatattagaacactacacaatcttatatgataagtctaattacaggtctaataatcttaattaattgcattacaaatataacaatcatttatattattacgtcacttgcctgctccaattccttctagggctagctcttccactcaggcttgacggacgactccgacaacacgtcttttctgcaagataaaaaaaatgtattaggataaatgcgaagtaacatatatatatatatatatatacatgtatatatatatatatatatattgcatttcacgttaacgttcgtccttgttagttcgctcgttcacgttccctagctcgttcacgttcgttcgatcgttctcgctctcgttcgttcgatcgttctcgttctcgttcgttaacggcggtgtggcggcatcggggcggcggttggcgcggcggcgtggcgacggcggcggcggcgtggcgttgtggggccgtggcggcggcggcgtggcgtggcggcggtggcgtggcgtggcgtggcggcggcggcgtggcgtggcggcggcggcattgcgcgcgcggcggcgaaggcggcggcggcgtggcgacggcggcggcggcgtggcgttggcatgcggcggcggcgttgcgcggcgtcgaaggcggcggcgtcgaaggcgacggagagagatcgagatcggagagatcgagatgcatgaagggagatgcggcggctctcacccca

SEQ ID NO: 7249 - DNA, 19313 bp, Oryza sativa
aggcacatggtgacatgatgtggggttgtgtcttgtgggtacagtggtacacctctgatcagagtaaactattcgaatagccgtgcccgcggttatgggcgggtctaacaatgtctttcgtgattagtctcacacctctcatcattgtaaaagatgcttaaactggtaataatttgattagctcctggtttggaatggtacattcctggtttggagatagaactgtgcagccgggatggttgttcagaatggttgggcctatacaacagggtatgttgtatagcgttggattaatattgtttaattacttaactgttttattaaattctcaaatgtttgctaaatgctgcttttgcaaatgaaaccctattatgccatcctttgttatcctgtgcacttgcatatttgctgcgtggcttgctgagtatgtcatatactcaccttgcaatcattcatcagaggaagagttctacaatgaggctgatggtgtggaggattaggtgtagccttggtcaagctgcctgtggagtggagccgtctgcgccgtttatttattttccgctgcttagatctttattgattgagaggaactatctacctctgtaatgacattttattcgcttattaattagagtaatatttgtactctattatcaatttgttattgtgtgcctcggctgattcctggacgagggttcacacacatgtaagcgtttggaattttggatagaaattccgggcgtgacaagttggtatcagagctcccttgaccctaggttatgccaaatggttatccatagaagccctctaaaaatattggaaaagtagaactgttctcctccctttctcttttaattaaaccaaactaatggcacatgcatttcataatctcttttaatggttctcattcaaaatttattccagtgttattagtactgtacatctattactgtactaatggctcatttaccagcaaaagttttacaatactgttttatttaatcttgctgcaataaaataaatttagcatgttgattttataattttctttcatttcttttgaaaccagttattcaaaattacaaaatttgtgacctcgtttccaactgttttaacttatctcgcaagcttggtttactttatttacttacctttttactttgattttcaaactttattcaaattaatccaaaaacttgtgctattaattggatagatgtcttaactccctcctttcacctgtctttagatgccgcgttacaagcctgagtacctgtttggtgttgagggttttgtccaggagttgcgtacgatgtcctttgtcattggatttggaactgcccctttttatgcccagattgctcatgatcgtcatgaagagaagtgccgagtcaaagtcaccttgaacagtaatagtgaagatatcccctcagtgatgtttgaagctggaggaagaaactacatccatgcatgtcaggaggtggcaaggatcgccataggagagctccgtgatcgctacagtgatcaattggccgacactgagtatcgctaccatcctcgccaaccacagggaagtgaccgtggcagttaccttgagactgaaggaattgagaatgatgttaccacaaagcatttggttgagatgttgtgggctatggatgaaagtcgtgcggagactgtgttagcagcccaagatcgtgaagattggaatcgtggtaagatttgcaagttagaagacaaggtggatcgtttggagaaggaattagccgcattaaagggagaagcaccgccgcagaaggccaggattcgtcttaccgcaaggaagagagctctatttgttcctcgctatcaattggcgccaaaggttcgtgtggtggagaaagaagttgccccagctcaagcggatcctccggtcatcatcataagtagtgatgaagaagaagaatccaagcgcaacaattccaagattgagtgggtagcaacccaagttgataaagacgagccttcaatcgacctccgatgcttggaagaactagagtgacttgttaagccgttgtcttagatcgatgtgttagtttgcttgttttaagtttgcttgtgtgtgtgggtcttgcatgtgatttacatcagtggtgggatgtaagtgcatgcgtttgtttgcttttgagagttaggaagttggtgagtttagtggtgtgagagtctttagtttgtaataataaaactcagttaagatcaataaaagttaaagtaattctctatcttaagtagtttcccccggtttctcttcttgtgccctgcccatgccaaatggtgaacactcacagcaatgggaatggtcccaacaaccccaataacaacaacaatggagagaatcccactcttgctcaagttcttgctcaacagacacagcttatgaacatgatgatgcagcaatttcagaatcagcaaaaccaaggaaataatcatgcacctccccagaacaagttagcagaatttcttcgtgtgaggccgcctgttttctctagtaccactaatcctgttgaagctagtgattggctgcatgccatagagaagaagttggatttgcttcagtgtactgatcaggagaaggtctcatttgcatcacatcagttgcatggccctgcctctgaatggtgggatcatttccgccttaacaggactactgctgaacctatcacttggcttgaattcaccgctgctttccggaagacgcatataccatcaggagtagtgtctctcaagaagaaggagttcaggtcgcttacccagggatctcgctctgttacggagtatctgcacgagttcaatcgtcttgctcgttatgctccggaagatgtgcgcaatgatgaagagcgccaggagaagtttttgggaggacttaatgatgagctttcttacccactcatggttggagattatcctgatttccagaaattagtggataaggctatacgtcaggaggacaagtacaatcacatggagcagaagaaacgtcggattgctcacttcaaggcacaacagggaaataatcagaagccgcgtcttactttaggaccccagtccatgccacagggaggttcttcgtctgttgttcgtccgcagcgtcagttcttcaacaacaatgctggcaacaacatccgtaatcaagctccacgtcctgttgcagctccagcacagcaacaacctgccaagagagagcaaggcagcaagcccgtggtgtgtttcaactgtggagacccaggacattatgctgacaagtgtccgaagccccgacgcgtgaaggttgtccctgcccagaataactctgctgtaccagcatccaaggctcgtgtaaatcatgtcgctgctgcagaagctcaagatgctccagatgtgattttccttgttaactcagttcctgcaacagtacttttcgattctggtgctacacattcattcttatctatgagttttgcgggaaatcatgggatggaagtagaagatcttagacgtcctttgatggttaataccccaagtgatcaagcactttctttgcaacgtagcccctcggtcagaatagaaattaagggagtaccatttctggccaatcttatcttgttagaatccaaagaccttgatgtcatcctagggatggactggttagccagacataaaggtgtgatagactgtgccaacagaaaagtaactctcaccagcaatgatggtcgagttgtgactgttcatgcattgtcatctgagtctttaaggtcaagactgaaccagataactttggaagagattcctatagttcgggagtattccgatgtgttcccagatgatttacctggtatgccgcctaaaagggatatagagtttagaatagatttggtacctggaacgactccgatccataagagaccttatcgaatggcagccaatgagttggcagaagttaagaggcaagtagatgatttgcttcagaagggatacatcagacctagttcatctccatggggagctccggttatttttgtggaaaagaaagaccatacccagagaatgtgtgtggactatcgtgcattaaacgatgtgactatcaagaataagtatccgctacccagaattgatgatttgtttgatcagcttaaaggtgccactgttttctccaagatagatcttcgatcaggatatcaccagttgagaattaaagaggaagatatacctaagacagcttttaccactaggtatgggttgttcgaatgtactgttatgtcttttggacttaccaatgcccctgctttcttcatgaacttgatgaataaggtgtttatggaatacctagacaagttcgtggtggtctttattgatgatattcttatctactctcgaaccaaagaagagcatgaggaacatcttcgccttgcattggagaagctacgagaacatcaactgtatgccaagtttagcaagtgtgaattttggttgtctgaagtgaaattccttggtcacgtcatctcagcaggaggagttgccgtcgatcctagtaatgtggaatccgtaaccaattggaagcaaccaaagacagtttcagagattcgcagtttcttaggcctcgcaggatattatcggaggtttatagagaatttttccaagattgctaagcccatgacacgattgcttcagaaacatgtgaagtacaagtggtcagaagaatgtgagcagagttttcaagagttgaagaatcgcttaatatcagctcctattttgattttgcctgatccaaagaagggtttccaagtgtattgtgatgcatccaaacttgggttaggttgtgttttgatgcaagaagggaaggtggttgcctatgcatctcgtcagttacgtccgcatgagaagaactaccctactcatgatcttgagttagctgcagtagttcatgcattgaagatttggcgtcattatcttttcggtactcgtacagaagtgtacaccgatcacaagagtttaaagtatatctttactcagccagatctgaacatgagacaacggagatggttggaattaattaaggattatgacatgggaattcattatcacccgggaaaggctaatgttgtagcagatgctcttagcaggaaaagttattgcaatgctacagaaggacgacagttgccattggaattatgcaaggaatttgaaagattaaatttgggaattgtcagtagaggtttcgttgcagccttagaagcgaagcccactctaattgatcaagtaagagaagcccaaattaatgatcctgatattcaagagatcaagaagaatatgagaagaggaaaagctatcggtttcttggaggatgagcaaggaactgtatggttaggtgaaagaatctgtgtccccgacaacaaagatttaaaggatgcaattctgaaagaagctcatgatactttatactccattcaccctggtagtactaagatgtaccaggatctcaaggaaagattttggtgggcaagtatgaagcgtgaaatcgcagaatacgtagcagtatgtgatgtttgtcagcgagtcaaggcagaacatcagaaacctgccggtttgttgcagcctttgaagattcctgaatggaaatgggaagaaatcggtatggattttatcactggtttacccagaacgtcatcaggccatgactctatttgggtgatagtcgacagacttaccaaagtggctcatttcattccggtaaagacaacctattctggaagtcgattggcggaattgtatatggcaaggattgtgtgtttgcatggcgtccctaagaagatagtgtctgatcgaggcagtcagtttacttcaaatttttggaagaaacttcaggaagagatgggttctaagctgaactttagcactgcttatcatccgcagacagacggacaaaccgaaagggtgaatcagattttggaagacatgttgagagcttgtgctttagacttcggtggaagttgggataagaatctaccctatgcagaattttcgtacaacaacagttatcaagctagtctacagatggctccttacgaagcgctgtatggtcggaagtgccgcactccgcttttgtgggatcaaacgggagaacgtcaggtttttgggacggatatcctaagggaagcagaagaaaaggtaaagatcattcaagaaagattgcgagtggctcagtctcgacataagagttatgccgacaatcgccgtagagatttgagttttgaagaaggagactatgtgtatcttcgtgtcacgcctcttcgaggagttcatcgttttcacaccaaaggaaaattggcaccgcgttttgtgggaccttataagattgtcagtagaagaggagaggtcgcttatcagttggagttacctcaatctttggcaggagtccataatgtgttccatgtttcgcaattgaaaaagtgtttaagggtacctaccgaagaagctaatcttgatcagatagaagtccaagaggatctgacctatgttgagaaaccaatccgtatcttggaaacaaatgagagaagaaccaggaatcgagttatccgtttttgcaaagtccaatggagtaatcactcggaagaagagtccacttgggaacgagaagatgaattgaagtcagctcatccgcatctgttcgccagttcttccgaatctcgaggacgagattctgtttaaggggggtaggtttgtcacaccctgaaaattttaaaatttataaattgttgtttaaatggaatttctagaaataatttaaagtcttgaagagaagatcttgttttaattaataaattccaatataaaatggggccagataaaatttcattaaatactttgcttaattctataattcctagatttttctgggatttatttgagctaaggaagtatttttaataaatggaattgcatttaagaaataatttaaattgaaaaaggttttaaaaagtctcttttggctttgggccgaaagtcggcccaaatctcttctctctctcctcggcccagccggcccagtccgccgcgcgcgcgcgccctcgctgtcgctgacaggtgggtcccgcctgtcaggtccttcgtccttctccggccgccgccgccgaaaccctagtttcgcgccgccgccgtttcctttccaaatccggccgttcctttccttctccggccgaattgaaagaggggaaatgatccttgggatctcctctaccttttctcctttggaatctttggctaaatcgttttggaaagagttggattcgagttcgtctcggatttgttcttcccgagctttccttcgccgttgccgtcgccgtgggccttcgccgccgcctccgagcccctttaaaaggacccccggtgtctcctctacccgtcgccaccttcactttcgcctctcgtcgtcggaagagctctagcgccgtgtgccctagcttcgccgtcgccgccgccgctccagccgtgcgccgccgtcgtttcagccgtcgccgtcgctcgggaagaccaccgtcgtgctcgccaagtcgtcgccgtcctcgttcgccccttcgccgtcgccggagatcaccggagcagcttcgccgtcgtcgacccgaaggttcccgccgcttcctccttgtcgccgtcgccgtccgttggtcttccgccgccgtttaggtcaccggtgagttcgccgtgttgtcctctacatcttggtgccctccgtttgcgtcctagcgccgccgtttgccggtgagtgtgcgccgcccgagccgtccgctccgccgagccgctgccgctgtcggtgacgtcaccgctgacgtcatcggggtcgtccgccgtgagccggtcgtggaccgatcgatctcggccgtccgttttggattggatcgatctcggccgtccgttcgcgtgaaccgtcgcccgtgcgcccggtccaccaaaccctagcccgctgacgcaataattctcttttccttttcaaaaataattcattattgcgtcataattcaatttaaaccgatataagtgttttaatccgatttaatctttaaaaattcataactaattcatcttagctccgatttagttggttcaagtctctaaatttttctaaaattgagatctacacattaaaaatatccacatgtactgttcatgcttgtttatgtgctgttttggtgattttgctcttttctgcttagattccgtcgtttccggagagtccgttttcgcagaagaagagtttgaagagttccaaggccagcaaggcaagtcacacagatcccaaacaaccctttgagcatgttgatcctatttaaagctattgtttctattcaactattgcatctattttcgaatgtcattgggtggaattgacctattctttgttatggccctttcgtacttgattaccttattccttgataccttgggttattacaatttgactagttgagctttatttatattggttcaactagatattagatataattgcttagccctgcttagaaacattagtacacattcgggataactaatgactcactattatttaatgatggtttcatgatagttcacgatggtcaatcgtgattagttaattaattaatgtgccaactaaaacctggtaatggtgggttgtgagcacatggttttgttggtcgtgctcatgacaattaaggaccggttcacgagtttcggttgtgaaacattaaccgtgccaaccacaagccagcatgggcaacggctttatcttttgtatagcatggttcattgcggggcaccagactgagaagtggcggagataagcccacgggggtcgctggggagtccatgccttgtttataagggggtgattatgatctaggaaggtgcgctgcggtggattgtgttatgcgaggggtattgtcacaactcctttccgagataccgtggtggtattgaggcacatggtgacatgatgtggggttgtgtcttgtgggtacagtggtacacctctgatcagagtaaaactattcgaatagccgtgcccgcggttatgggcgggtctaacaatgtctttcgtgattagtctcacacctctcatcattgtaaaagatgcttaaactggtaataatttgattagctcctggtttggaatggtacattcctggtttggagatagaactgtgcagccgggatggctgttcagaatggttgggcctatacaacagggtatgttgtatagcgttggattaatattgtttaattacttaactgttttattaaattctcaaatgtttgctaaatgctgcttttgcaaatgaaaccctattatgccatcctttgttatcctgtgcacttgcatatttgctgcgtggcttgctgagtatgtcatatactcaccttgcaatcattcatcagaggaagagttctacaatgaggctgatggtgtggaggattaggtgtagccttggtcaagctgcctgtggagtggagccgtctgcgccgtttatttattttccgctgcttagatctttattgattgagaggaactatctacctctgtaatgacattttattcgcttattaattagagtaatatttgtactctattatcaatttgttattgtgtgcctcggctgattcctggacgagggttcacacacatgtaagcgtttggaattttggatagaaattccgggcgtgacaaggatccccctggatagggattggtgtagcggaccctttggttagccccctgttgattgaggaaattcgccaagtgacgcttgtgcgactccagttccttgtgcttggcttccaagcggatgctcttgtccaccagacgctggaaatccggataatccccggagaccagacgcacagatagctcagggtccattcctgccaagaacttctcctgcttttcctcatcttcccgaacatcctccggggcgtaccgggccaggttgttgaactcatgcaaatactccatcacagagcggttgccttgcttcaactcccggaattcccttttcttaagggccatgactctggcaggcacatgggtcctccggaaagcggcggtgaagcgggcccaggtaataggctgcccctcgggctgcgtagcctggaagtggtcccaccatagagatgcgggcccctgcagctggtgggtggcaaagatgactttctcctcatcgttgcactgcacggtgtctaacttcttccccacggcatgcaaccaatccaaggcatccacggggttattggagctagagaaggtaggcgggcggatgcgaaggaactcggcgagcttagaatgctgcgggggtggtggtggaggtggagcattatgctgtggtggattttggatgtggtggaggaaagcagccatcatgttggcctgctgggcgaggatttgagtgaggatggggttggtgtctggtggtggtggtggtggcgggggaggaggtagaggtgggccaccttggatgttggggttgctaccttcgggttggttgccatcaccagtagcagcagttctcctggttgtcaccatctgaaataccccaaaacaaaccagccaacagagagaacagactattaaaactaaccacccacgactaccaaaattattgaacttattactgatataaaatgggttcattaaggttcaggatgcttaagccaataaaataaagacaggctccgacacaatcataccacacaccggtacaaccatgccccacacgacttcaacaggaagacaaacgagaaagaacacactcgcaagcctactaactgctcgtctacttctgcgacgggccagggcggaaggtgagcagcagcgcatcctccgtgctaccaatgccggaggtttccccctcctgaggaaccacgggcgcgggctcggcacgaggggtctccacgaagcaggtccacgccagggactaacgaacaagctcaggcctggaggtgctcttgcgggcagtgatcttctggctgcggcagacgcggcggcgcttgggacggcagacctctccctgggcgaccttgagctgacacagctgcgcctccagcgcgtctaggtccttcttcagctgcagattctcctgacgcagctccaggatcttcatgttgttctcgaccatcccacggcgcaccatatgatggaagtcgatacgggccgcgtcgtacgcctccaccatgcgcgccaggtgcatgatggtagcgtcatcctccgagctagcatcccggaaggtggcgtagtcgcgggctcctccgcgacgagggtggtagcggtagggcgagtgctgcaactcgtccgggtagcgctggtgaagagtgccgatggcgaggagtgcggcgttctggcaagcagcggagaaggaatctcctcccgtggtgactgccaacgaagtcctctcgggagagccagtgaggatcactgcagtgacctcccaagcagcatgcgactctgcatcgtcaccctcctgctccgggagctgcttgccttggtagtccactccatgcggataccccaggacaacgcacatgccccgcagctccagaacaaagccggtcaggtccaggccacgacggttgatgctgccggccatctacaagcaaggacaaaaaagagagaaaatattttagagatcagcttttgatgacaaatgaagcagcaagacagagagagactaaaggattttcacaaataagagaggatttttatttcgaaaatattgctaaggcttgggatctaaggctcgtcctagggtcaaggaggctctgataccaacttgtcacgaccggaaataacccaacgggcgttccttacgtgcgtgtattattccttgtcccaggaggcaaggtacaccaaaagttgatacaattcagagtttaacaagcggaagcgtaaatagttaattattacatgggcagcgacggcccaacacactcaaagacaacgaaaaacagcggaagactaaggcgacgaccacaggcgcttgacggcaggcacgagctagacaccaaagccttcatcatccaggggctcctcttctgggtttgggaaaaattgagcaagactgagtacaaccaccgtactcaacaagacacacccacaagtgcagcataaatgcaaaggagtacaatggagttatagtataggggttaggttttgcaataaacagcatttaaaagactcttagttgctcaaagctaaatttaaaacacgatcctagaactatttaatattattaaacaaggccgtgaacccacacgaacctgccttaacccaaggcctacgatgattcagaccgaactggcaacccgaccctgggtcccagctcgtcccaagccaacccaggccaaccattccacattttagttattaagcaggttttaagaatttgaaacactaacttgggtacattgctaggcttgcccataaccgagggcgcggctattcgaataggttttactctgatcagaggtgtacatctttacccacaagacacgtcttcctcacgtgcaaccacgtgccacataccaccacggcatatggacggaagacatgacatagtttccaacccatcctagccatagacaagagtaccgacccaacccacctacggccagaacccccggacaggcaggcagaattgagcccctagcagcaggacaccagccctgtgctatgacatctcgactaccgggccgcagcccgtgtagccttcatttgtcctagagatgtccatcgacccccgacttcgtccatctccatccgtgtacttttgtttataaccagactgagccacaaactaagccttacccactagacatgtggaagtacggtagtgctttgcaacagaggcccgaagaccggtccttatgtggccgaggtgctactatcaaaacaatgcaccccaagcccagcctaaaaccattttgagagttttgaatagagggggaggtgtgcatccaattccacaataatccaaccattccaatatgtccaggtgatatgaatattcccaaagtctagagttataaaaccacctaatgttgcctaattaatcagcgaagcatctacctaaattcttgctagtggaaccattaatagagtgcccactagttggggttttgtttattctagggtgaacaaggtaataataacaataacaacaataataaggtcataacaaaggtaaataggcatggctaaataaaacagtgataacgcgggaatttaaataaagcgataatgcaataatttaaatcaaagtaatttcacaaagtgggatccaatatgttcaaagaatgatgtgacttcccttgctcgctttcccaaacgtcggcttcaacctccacgaagagcggatcttccgaagctgcagcgtctacacaaccaacagaaaagaaaagggcttttactctaataaactccatataacaagcaggaacaaagcacaaaaatgggttcttgacttcttaaggaaaaattagagacttgaacggtccaattccgagttcaaatggccaagttatggccatttgaagtttatatgcactttaaatgaatatttacgaatttcttcatttaaattttaatttaaaaatagatttattgcgtcagccgggagagagggcgcgcggaccgggtccacgggagtgggacccacgcggcagtctcacggtccacggtggaccgggtgcacccggctcacaccggccggccccgtgggccccacgcgtcagccgcacccgagggcgcgggcggctgatggccgggccccatgcggcagccgctaggcgcgcccggaggcggccacatcggcacggccggcgggaggcggcgcgcccgcgcccctatggtcgccggcggcggccataggcacggcggagcggcggccgagagaggggagggaaagggggaaacgaagcggcggtccacggctcaccccgggtcgacggtgacgacggaaacggcgaccggagcggaggaaggcggcggcgcggctcgggtggacggggtcgacggcgctccggcggtcggcgagcgaaacggaggggtggacgaggtcggcgaggatgcggcgaagccgaaggaggcggcgccgaggtgggaggtagtccggggcgacgacggcggcggaccggagctcggcggcgacggcggagagagagagcgacagcgcgagctcgattccggcggggagagagggcggtgagtggcggaaacggtggtggggagctcggggagggtttatatagggttggaagtgagagagggcggccggaggagggggaaatgggcgcgggagacccggccgccattaatggcgccggcgaggttaggggagaggtttccaaacaaatccgagggagagagggagggaaaaatggggggaaagggggaggggatcccggggaataattccccccactttattgcacgcggggacggcgggaggcggcgggattcgcggcggcgtcggcgctaggcgcgggcgaggcggcggaggcggcgggaggaaggggatgacgggtgggccccacccgtcagcgagggaggcgggcgggcccgcccgtcagcggcgcgcgcgcggggaggaggccaagtgggccgcggggaggaggagagagggggagggagatgggccgagccggcccattagaggggagaggtgatttttagggtttttctctttataaaatcattttaactttgtttatttcttaataattattatttgtgctctgaaaattccactaaaatttatttacacattttaggcttttagaaaatatacaaaaatcctccaagcccaatttgacttttaactttgcacattttaatttttgaaggctttcacaagcattttaattattctaggcataatttagaggatgtattttagggtcgatttgggacgcgacaattatgcaattgatgtctgaattgtatggaggggctaggaatgtaccctacactagaaaagacataagcaatttcaagtcaaagttggggagcgagtataggagtataggtgtagagatattcctgaaacaattgctcacttcgaggaaatcaaaaaggatgacccaaatttcttctacaagattcaacttgatagggaagacagggtgcagaacatattttgggttgatggagcagcaagaaatgcctacaatgacttcaaagattgcatctcgtttgactgcacatatatgacaaacatgtataacatgccttgtgcaccattcattgggataaacagacatgggcaatcaatacaggtactccttttttttgcaaaaaagtaattctaaaaaatctgtaataactttggaaattatagtacatcataagttacttgttgcattcattgagttacatcaagtcctgataaaagttacttccagtagaatgtgaagttacatttttttaaaaaaaaaaggtaaaaaagtaactaagtttacaagttacatttttagtgtttgttctatagttcaaaattgtactgatttacttccagcaaacacaaactgtacaaactacgcaaaattgtagtaacttacttgcttcaaaactgtactgacttccttatgtgtattatttttgatattcagctgggttgtggatttctatggaatgaaaagacagaaacctttgtatggttgtttcaagcatttctagaggctatggaaggtgtagagcccacaaacataataactgatcaagacctagctatgaaggcagctatagcgctagttttcccacatgctaagcatcgcaactgctgctggcatataatgcagaatgctcagaagaagattggccatatattagatcatgacaaagcattgtgtgatgcattcaatgactgccttgacaacagctggacagagcaagagtttgatgctaaatgggatgcaatgttgacaacatatcatttacaagatagtgagcacttccgacacctttgggaaatgagacggtgttgggtcccagcatactttatgcactgtttcttccctttcctccagactacagcacggagtgagggatttaacgcagtgctgaagcgctatgtaaatcctcaaaacagcatatacaacttatttttgcagtacaagaagattcaagaaaaaatcactgttgcaacagatcagaatgagtttgaagcagaagaaacaatcccttctatgtgggctaactatcccatggaaacaaaagcattggaggtctacacaaggcctatattcaacagatttcaaaaagagcttattgcttcaacatcatataaattgacctgaacttctgaaaacatgtatctagtagaaccgaatggaggtcctgttaggaattatggatcaagggcattcattgtagctgcaaatgtgttggacaggatatacaactgtgaatgctgtaagttcgaaagggatggcattctttgctgtcatgttctgaaggtaacagtctgttattgcagtaagctacttctcactgtgcattaagctacttctcactgcacattaagttacttcttaatgtgcattaaattacttcttatgcattacgcacttttggcaggtaataaaacatatgtttttttccatgcaggtgatgacatttgattttgtgggccaagtgagtgacattccagaacactacatattgcctagatggacgatggttaaagagcctgaattgcctccagttacaagcattggtgaacaaatgcaattgccccctaaatctctgaagctaatcaggtataccaatctgtgcacaaaatttacacagattgcaaaagatgcatcaagcaacgagaaagcctaccgtatggctctacagtgtatgagctcaatgactgatgacttagcagctatgaagcagagtagaaagaaacagaaaaaagcacagccagccccatctgatcctgcaagaggaatttcagatatcccctcagcatcaactaacccaacactacagataaatgaccccccccccatcatacaaaagcaagggagaccagtttcaacgagacgcaagcctggggtccatgcaaaggcgtcaaagacatcagttaggaaaggcctagctagtactgagaagtgaattagagctacgagatgtaacttataatgttgtgacaagattgttgaaacttacttgcacagttgcattaagttacttttagcttccatagtagttacttcacagtgatatgtaagttctcaggaagaccatgctgagttctttgcagaaccaagatgctattttaatttgttacccaacctaatttatgtggctataacttatgtgctggttctggaaaaaaaatgcagtgtttcattactttaccttaagtgtaggatcaggctctttgccccataatacttgcatccattgcacacgatttccttgaaacgagagtatcttgtgtgtaagtagtttcttaatgttggggatgtcacttggttcaaatgctggcaactgtttgccatcccacaactccacaaatttcagcatataaaaaccacaatcccggctgtttttgtttgcaaaaacaaaatagggataagtttgactaaagacaataaatgaaaatcactaactaaaaaaaagcatgttacgtacgtgttatcttgctttgggccatcaatgaaaatcagtgggtaattctagatggttttcttcgaaaacctcatgtaaaacctatcccacatggtcttgatggatgcaacaacaagatgagatgctgaaatcagtgcttcgtcatcttctcccctcagcgaatcataaacctcgaatctttcagctttcagattaaggcacaccacgaaatagtgactagccttatcattcccattacccaattcttggagaatgggaaaaaatgcctgcattcaagtgaaaagagggaggggagtggaaagaaggtttttcagtaaatataatcatgatttagtaagtataaaaggataataaaaagtgattcaaaataacatttcctgtcaatataacagaaaaagttacttccacaaacatgctgagttaatttgcaaagacatttaagttacttctacaagcagacaggaaaaagtaactttacatatcattgacagctggaatatatattttcttactaattctttatggtcaagatggttcgctctcgtttgatcgaagtgtttcttgagctcattcctgtccaactgcgaatccaacaaatatccctgcaccatgtggaaaaaaaaacataaggtgttgcaatgatagtaatagtacattaaaaagagattttaatttgtaaattttatatactcactcctattctggcaggaaaaattctcttcgaattgtccttgatatcagtagacagaacaattaatgccaattcacatgtgttattgtccagtgagcccataggtttgacagagttcgcaagatcgctaagataaatataatattctcctgtatcaatgatcttttggctacatttaccaaaagcaaaaagaaaaaaaataaataagcaaattagtataccatgtacaactactgtagcatgttaaattaatttcaatgacatggtaagttactttcaatgacatgttaagttacattcagtgacatgttaagttactttcagtgacatgttaagttactttctatgacatgtaaagttactgcacaggggtgtgtagaaagtttgtctggaaaaaattgctcggtcgtgtgcagaaccaatatgcacacaacaaaaaatggaaggtatgaaccaaaatgcagttgcttcaatggcatgtgaagttacttatataattttacttctctgagaagtgaagttagttctacaaagatcattttactaaaaaagtaaaaaagtactgtgtacagcaaaaaatatgtgattgtacctattccttcttgacttggttctccctccattcttgcaaatgtcatcatatacctcgtttataactcgagaaaccatgaactgcttcttgttctcataatcaattaagggtgaccttttgaatttcgctggtttcaccacccttttattgtactcatggggcacaggtgtttcttcttctacttcacaagcaataggttccttggagattacttcagcgacaggtgattttgtggcagatttgctggcaatggcctcatctgcttctctcccaaccttttcatagtcttcagtagtaaaacttccatagtcctcatttgtgataattccaggaaattctttaccttgagatgttcctgctgcttcttg

SEQ ID NO: 7250 - DNA, 26892 bp, Oryza sativa
cgccagccgcaccggcaccgcccacctcatcgccgaccccatctccatcctcctcgacgacctcctcctcgagtgcctcgccggcgtcccctatgcctccctcccgcaactccccaccacttcaccacgcttgtcgcctccgtcgcgcgcacggcgagctccgctcctctctcctcgccctctccgtcacgcccacggcgagccgacggatgttggcgtggtggtggtgatgaggacgaggagccggcggccaccgactcgcagctacgccccgtcgccgccgctacgctccaccgccggcgactggatggggatcccctttcttctttcccctgcaaagtcaacaaaatgactaggggcaaatatgccagagaatgatggaaaacatttggaaatcagttaaaatggttgaaatggcattatagtaagttggcttcatttgacaatggtattataacgaagccatattcggaagtggcattccagcgaaaccccatcctgaagatggctaaatgtcaattttctctgcgctctggaaggtgcaagtaagcgccgcagtcagaggagcgcggcttcaggggcatctcaccggcgcaaccaagcggccgccggcagagatcgctgtcacaaaagatggcgccaccaagaaggagccgaacccagcccatgaagactgggaagccaccgaccagcaagttctggggtaccttctctcgtcgctgacaagagaggtgctgatgcaggtcgctacaggcgacaccgcggctgaagtgtggagcgccatcgagcagatgtactccgcccacacacgagcaagagcgattaacactcggtttgctctcaccaatacaaagaaaggtaacatgtcaactcctgagtattttgcaaaaatgaaatccttaggagatgagatggctactgccggaggtcgcccgatcgatgaagaggagctgattcagtatatcatcaccggccttggcgagggctacagcgaggtggtgtcggctgtctgcgctcgggttgaaccaatctctgtgagtgatctgtactctcaagtgttgaactttgaagctcgccaagccatctaccgcggcgcacaggaggtcaccgtcaatgttgccaaccgtggaggcttcagccacggggggcgtggcaacagcaatggtggccaaggaggttcgcgcggcggcggcgacggcggcggccatggtcgcggcaacggaggaggtggccgtggtcgaggccgcacaccaggaggcgttgataaaagaccaatctgccaagtgtgtttcaaacgggggcacacggcagcagattgttggtataggtacgacgaggattacgttcctgacgccaagcatgttgcagctgcagcggttaactcctatggagttgacacaaattggtacatcgacactggtgctacagatcatgtcacgggagagctggacaagctcactatgaaggaaaaatacaacggtggtgaacaaatccacacagcaagtggtgcaggtatggatattagtcatattggtcatgctattgttcataatcccaatagtcgtaatatccaccttagaaatgttttatatgtgcctcaagctaagaaaaatcttgtttcagtacatcgcttagttaatgataactctgcctttcttgaattacatcgtgattatttctttcttaaggatcaaatcaccaggaaaactctccttaagggaagatcatggcgcaggctatatcctctaccacactcctccttgaagcaagcctacagtgccatcaaactatctttggaccggtggcatcatcgtcttggtcatccttccattaccacggttaaacaagtagtcaataagtttagcctcccctgttcagatttgtctagtgagtcagtttgtaatgcttgtcaacaagcaaagagtcatcaattaccttttcctatttcttccagtgtttccaaacaccccttagaacttgtcttttctgatgtttggggacctgctccagagtctgttgggagaaaaaaatattatgttagttttattgatgattttagtaaatttacttggatttatctcatacagcataagtctcaagtgtttgacaagtttcaggagtttcaagtcatggtagaacgtcaatttgatagaaaaattctagccatgcaaactgactggggaggcgaatatcaatcccttaactcttttttttctaagattggcattgttcatcatgtttcctgtcctcatactcaccaacagaatgggtcggctgagagaaaacatcgtcatatagttgagatcggtttatctctcctatctcatgcatccatgccattaaagttttgggatgaagcctttcaggcggcaacttatcttattaaccgtgtgcctagcagagttatccataatattagtccccttgaaaaactgttcaaacaaaaacccgattactcctccttgagaatttttggttgtgcctgttggcctaatcttcgcccctacaataaccacaaattacaatttcgctctaagcgttgtgtttttcttgggtttagcactatgcataaagggttcaagtgtcttgaggtctctacaggacgcatctatatttctcgcgatgttgtctttgatgagaatatttgtcccttcactgaacttcatgccaatgctggtgcccgtcttcgttctgagattgatattctcactcctgaactgctaggacccatacggtctgttgggaatgaacaatgcatgcatccagtgactaatccattatctgctgatgtttctgctgctttatctaatcgtgctaatgagccacatagagatggtgcagtacatcccgctgatgcagaagatccgccggcgacgcctcctctggatgccagttctggtccagaaccagaccgtgtcgtccaccactcccctgcggccacgtcatcaggccgtcatccgggtcccacacctggttctgtgccacggggggcagcatcatcgctagcagaggagacagcagaagactcagtgtcgcaggcggtgcaggagcaggagtcgcaggtggtgcaggagcaggagcagtcctcaccagcgcaggaacatgcacaggctgtcacagatgagactaatacattacagcatgcagatgtgactgacacaggttcagaggcaccggcaggaccgcgcaccaggttgcaaagtggagttcacaaagaaaaggtatatactgatggtactattaaatataagcattcttggtttactgcttcaggtgaacctacaaatgatttagaagccttaaaggataaaaattggaaactagcaatggattcagcgtatgatgctttagttaagaataaaacttggcatcttgttcctcctcagagagggagaaatattattggctgtaagtgggtgtataaaattaaaaggaaagctgatggtaccctagataggtataaggcaaggttagtagcaaaaggatttaaacagaggtatggtattgattatgaagatacctttagccctgttgttaaagctgccactatcagaataatattgtctttagcagtgtctaaaggttggagtcttagacagctagatgttcaaaatgcctttctgcatgggtacctagaagaagtttatatgctacagccaccaggttttgaggatcctactaagccacatcatgtgtgtaaacttgataaagctctgtatgagttaaaacaggcacctagagcctggttctctagactaagtaaaaagttgatggaccttggttttaaaggatcaaaagctgatacgtctctgttctttctgaataaaggtgatataactatgtttgttctggtatatgttgatgatatcattgtagccggctcttcagagagggccactgcagctttacttcaggatctaaaaggggaatttgcactcaaagatcttggtgagctgcattattttctcggaatagaggtaagcaaggttcagaatggcattgtactgaatcaagacaagtatgccaatgatttattgaagaaagtgggcatgatagattgtaaacctgctaatacacctctttcagtaagtgagaaactctctcttcatgaaggctcattgttagggcctgaagatgcaagtcactatcgcagtgttgttggtgctttgcaatatttgactcttactagacctgacatagctttctctgttaataaagtttgccaattcttgcatgctcccacaactgtacattggattgctgtgaaaaggattcttaggtacttaaagcaatgcactcggttaggacttgaaattcataagtcaggatctactttagttagtggcttctctgatgcagactgggcaggctgtttagatgacagaagatcaacaggaggatttgcaatatttctgggttcaaatctggtctcctggaatgctagaaaacaagccactgtgtctagatctagcacagagtcagaatacaaagctattgccaatgccactgcagaaataatgtgggtgcagactttacttgcagagttagagattaaaagtccaaaagctgctaaaatatggtgtgataatcttggagctaagtatttgtcagctaatccagtgtttcatgccagaacgaaacacatagaagttgactatcactttgtcagagaacgggtaagtcagaaacttctagaaattgattttgtttccactaatgatcaagttgcagatggattcactaaacctctgtcagtaagactcctggagaatttcaaaagcaatctgaacctggttaggtccggattgagagagggtgttagttagcatgaaaggttcggatcatgtgatcacgacctgacagcttgcatgcatgtagttgttgaggttagtttggattaggttagtctatccatgcggatcaggttagcctttcctccacatgcgataacagatgtttgttagagtttgttttctgttttctgttactgcatgcagtcgtttcatcaatctcggcttcggttgttctcagctgcgccgaactctgtatcgccacgatgggggctgttcccatcacatatatattaacacgaaggcgacgcacaggattagtgcgatcgtttccacccaaactaattcacacatagatctaagctaagcagttttaggtgagagcactatctattgtttatggtattggtaacatatgtacatgatcattaataagagaactagtaagagaactaggaaggtagcccgcgcatatgcgcgggcacttatttaatgttgcttaattttttattgttataaatgtttatatgtagattatattttcaaaatagatcttcactctatttaaaacatgttttagttattatctagttatgacatattacataaaaccatacagccttgaatttatgataatgacatgaatttataagaacaacatgtgtcacgataataaaacaataatagaataatggagttgtttcatatctatttgtactatatgtgatttttttacctaaataaagtgtttttttaattaccaccacggtaaaatctccaaaggaccatattgttggttatattttgataaatatctataattttgcgtctcgtgtttttcaacgcctattcttcataatcattcataatcacagaagacaccttgaccaattaatttggagaatgaatctattttcccaaacttatttataataactaattgattaaagtatacttctttgtcacatcaatagagtgcatgacatacattcatcgaattatgcctgatatgctggaattcctcaactataagaaaatatagagtgaacttcactgtgggctagtaatttttacccaagtttcattttggactaggggtggacaaatcttttcactttggaccaggtgattttacaaaaatttcaaactggactggccttcttctccatctctcttatggtttttttcttcatcgagatactgccatggattaaccggagcaagcacataactaggatttcttctctcggatccgttcctgagctcgaactcacgaaattaagtcactgggcagcttgttgctgcaactgtttcctgtgagatcacaatcatgtgattttttttcagctcacatgattttggtgggagaaaaagagcaaaaaaagaaaatcaaggtgctggttttttctttattgagatgctgccatggatcaacccaagcaatcacatgactagcattccttctctccgatccgttcctgagctcgaactcacaaaatcaagccatagggctgcttgctgctgcagctgtagcctgtaaactcacaatcaagtgattttttttttcagcccacatgattttggcgggagaaaaagagccaaaaagaaaatcaaggtgctaagtgatcaggatacattactggcgtgtttagttgtttgtgagctaaagaaatcaaggagtgagtggcagcacagtaggtcagaggcaaggaacaacaagaatggtccaatgtgcaatataaggtagcaaatcccggtccaaagtgaaaacatcaaacatagcctagtccaaagtgaaactttggcaataataagtggcctaaagtgcaattcactcgaaaatatatcgtgagtagtttattgcgtatgttacttgattgttcatttgttatcaaaactatttgacaaagagaaagacatacatatgggacaataaatctcatgatggactaaatggttgttttatagcaagatcactggcttgaaatatttttcataattattttttagatttatgtaatatttatgttgcccaattatcatatagttctgaaaattcaaaaaaaatgaaaatattaatctcaagaagtattctattaaatcatatctacttaaaaatacacaactaaattgtgttgttttcaattattttacatatgtagctttaaattagcattatatagtcatcaagtgttatttgacacctggaatatgatgtaaaattatttaaaataggaaaagcctagagccaagtcattatatagtttctcttgtagagaaactcatcacagctttagagccatccactccctggcagcttagagccaatcctaagcaaacactgaccttggcaggcagctccatcttggctggccggctgagatcaatcatcgatggaggtggccgttggtgcggcgagctggctcgtcggcaaggtggtgacgcagctgtccgatagcttggtggaggcctacgtggccagcaccgagcttggcctcaacatggagcagatcaagagcgatctcatgttcacgcaagggctgctccacgaggctcagatgaggagggacgtgagcaaccctggcctgcctgggcttttggagattctcagcaagaaggctgacgaggctgaggacacgctggatgagctccagtacttcatcatccaggaccaaattcatggcacccatgaggccaccccggtggtagacagcagcatacgtggccaggcactccatggccaccatgttcttcaccgtaccgttggtaactgcctttcatgcttttcttcttcttctacacgagatggtgccggtgaccatgttggcaagttgacattcaatcgagtagatatgtcaaagaaaatcaaatcaataatagaaggcatagatgccgcatgtaaccatgtatccaatttgctcaaaattatccatcctacagtaggaagggttctatcactgaagcgacctcccagcagctcaacaattacacagaatgaattatatgggcgggaagacatctttaaccagactcttgatgacatgtgcaccattcgtagtgaaacactatcagttcttcccatagttggccctggtggaatcggaaagactacctttgcccaacacctatacaaccacaaaaaaacagtggcgcacttctctaaaaacaaggcctgggtttgtgtgtctactaattttgatgtggttaggctcacccaggaaatcttgaggtggcatatgtcaaaatggaaatgagggaagtagtgaagcacataaaacatccaacttggatcagctccaaaaatccattgaagaaagactggatcctaaaagatttttacttgtcttggatgatatgtggaaatgcaacagtgaggctgaatggggaagtctactagctccattcaaaacaggagaagccaaaggaagtgtggttatcgtcacaactcgctttccatctatagcacaaatgataaaaacaaccaagccaatagaactgcaaggtctagaggatgatgaattcttgacattctttgaagaatgtatatttggtcaatacggcggtcggccttagagattggacaaaaggcatctgctcagaggctaaattgcaattccatatggcactcaatgtcatccaaagactcgacgtggcacaagagcacagagaactctcccccccccggaaacgcgactgagggcggctctcaagcggaaagtcctaggactcgcttctatagaaagggcaaggaaaaagcaagcctccagggtaactcacatccgtgaaggagatgcgaacacgaagttcttccacctcaaggttaatgcgcgaaggagaaggaatacaatccaaagattgaaaaaggacagtggttgggcggtgacgcacggtgaaaaggaatcgacgattcatgatcacttcgcaagcttcatggggaggccagggccgaggccaaacgagctaaactgggagacgttggacatcacaccgattgatctagccacgctgggggaacccttcactgaggaggaagtgcatagggcaattaaggaaatgccagccgacaaagcaccgggaccagacggcttcactggggccttcttcaaagtttgctgggaaatcatcaaggatgacattctgctagtcttcagctccatctataacctgagatgtgcgcacctgaatttgctcaactcagcaaacatcgtcctaatcccaaaaaaggatggggctgaaagcgtttcggactataggccaattagtctaattcatagcatcgccaagatcttcgctaagatgctagcgctgtggttaaggccccacatgcatgagttgatctcggtcaatcaaagcgctttcataaaggggagaagtattcatgacaactacctcttcgtaagaaacatgaccagaagataccaccgcctaagacgggcaatgttgctcttcaagttggatataacaaaagccttcgactctgtgcgatgggattacctcctagccttgctgcagcgcaagggcttctcgacaagatggatagactggctaggggctttactgtcgtcttcgacatcccaagtcctccttaatggctcgccagggcaacggatcaaacatggaagaggactacggcaaggggaccccctctcgccgcttctcttcatcttggcgattgatcctctacagcgtatcctttccaaggcaacagagctgggtgcaatttcaaaattacgaggaagaacaactcggctgcagatctcaatgtatgcggatgatgctgtgatcttcattaatcccacccggaacgatgttgcgactttcgcgaacatcctacatcgttttggcacagccacaggactcgtcaccaaccttcagaaatcccaggttgcggctataagatgcggcaatatagacctggaagaggtcctccaaggcgttccggcgaagcgggcaaatttcccactaaaatacttgggcctcccgcttgttctgggaaggctgcgaaaaacggacttgcaaccggtctttgacaaaatatcagggagagttgcaagttggagggggaaaaacatggcagtagccgggagaaccacgcttgtaaagtctgtgctttcagcgcagccaatttatctcctcactgccttgaaggtgacgaaggaatccctggagcagcttgacaagcagagacatcgcttcctttgggctggtacgggggatatcaccggggggaaatgcaaggtcaactgggcaaagacatgcttgccgaccagccaggggggccttggtgtcctaagcttggacaagttcacaagagctctgagattgcgatggttgtggaacgaatggagagatccaagcaagccttgggtgggtttggaaacgccttgtgatggtgtggatagggacctcttcgccgcctcaacaaagataactgtgggcgatgggaatacaacgcgcttctgggactccgcatggattaacggccaaagaccaaaagacctaatgccgttggtctatgagatctccaaaaataggaagaaatccctacggcaagggaaagaagacgactcctaggtgcatgacctgaccctcgatgcgggttcatctatcacaatcaaccttctcgatcagctagtccgcctgtgggaggcggtacggaatgtgcacttagacagcgaggagccggatcagattgtttggaaattcacaagcagcggccactatacagcttcctcggctaatcatgcccaatgtttgggggcgccaaacacaaacttcaactccctaatctggaaagtttgggcgccagggaaatgtaaatttcatgcctggctcatcattcaaaatagagtctggacgtcggaccgactcgcgacaaggggttggcggaataacggacattgccccctatgtcgttgtgacaccgagacagccttgcacctcgtcgccatgtgtagatacacgaagagaatctggcgcctcgttgctacatgggtgggatatcagcagttggaaccggcccaatgggaggaagcctggtcagtccatcagtggtgggagagcctagctaacacacccggcattccaaagaagggccttcggtcccttatcctgctagtagtttgggaaatttggaaggagcgaaatcggcgaatctttgatcacaaagagatggcaacaggtgttctcctagcaaaaatcaaagaggaggccagcttgtgggctttagctggggctaaaagattgcgcgagctcatcccgcactctgtatagtgtatagtctaaagatctttttgttttatccctaggggttgtattttctccttctatattcaatgaaaaagcactgctgtgctgttttttccgttcaaaaaaaatatatatatttggtcaagacaagcctgcatgttatgaagatgacttcattgatattgcaagaaaaatttccaagaaattgaagggttttccactagcagccaaaagcgttggtcgattattgaagaataacctttctcaggaaagttggatggaagttcttgaaagaaatgagtggaaaaatcggcaaggtgacgatgacataatgccagcactacatagtagctatgattatcttccattttatctaaaaaaaatgtttttcttgttgttccctttaccctaaggaccactggtttaataaattagagattactcattttttggaagcattaggcatcctatgttatggatgtcaaaataacaaagatgctgatataggattaaagtatttggatgaactggtaggtaatggttttctcatgaaggaaggtgatgatagtaggccatattatgtaatgcatgacttattacatgatctagcacaaaatatttcgtcacaagagtgcatcaacataagttcatatagttttaggtctaatagcatcccgcaatctattagacatgtatccatcaccttacaagataagtatgaggaaagttttgagagagaaatagaaaaattcaagaaaaaaatagacataggaaatttacagacattgatgctttttggagaaagcaatgcaagcatggcctttttcaaagacttattaaaacaaacaaaatgtcttcgtgttctgtttatgcatgcagactcactcgaatcattcccacacaacttctcgaaactgatccaccttcgatatctaaagttgaaaataccttataacgtaaaattgtctctaccaaacgcagtaagtagattttatcacttgaaacttttggacctagggaatagaaattgtattttgccaaaagacattaatcatctagtcaatttatgcctctttcttgcttcgaaagaactttgttccaacattcctgggattggcaagatgaagtatttgcggaggttggaagagtaccatgttaagaaagagggtattgggtttgagctgagtgagctaggggatttgacagagcttggaggtgaactgaaaatatttaatcttgagaacgtgacaacaagggaagaagctaatgaagccaagttgatgatcaaaacaaatctgaaaacattgaagctagtttggagtgtggtgcaacggacaacacgatctgatgttcttgacggtctccaaccacctcctaatcttaaaacacttgtcataataaaccatggtggttcggttggtcctagttggttgtgcagttatatttgtgtaaaatacttgaaatcattccatctagagggtgtctgttggggcaatctcccactttttggtcaactggtgcagctagaggaacttactttgaagagtatttcaggcatacatcagttcggacctgattttggtggtgtaacacaaaaaagtatctcgcacttgaagaaagttgaacttattaatatgccagaccttgtggagtgggttgggggagctcattgccatttgttttcgaagattacaagcatcaagtgtgaaaatctatctatcttctatctatctatctatctattatctattatatactaaaagtccattaaacttactataaacgctcccaagccgccacttggcgctctaataaattagagaaatctaagaaattctaagaaaaaagcaaaacatctgatcctcgattttcacttaatacagcgggcccattattttacaccattagatccatattaaacaaaataaaccccatctcccaaaaatcctctcccgctcccctcatgggcctccactcctcacataaacagtacgtacatgtactaacgttcctccctcgcatcctctcttttctccattccattcatcttctatttttttagataataaatttattatataaaaataattagataactaaataattatatttatttgcaacatattatatttatctatattagccatgtgttttgatatatgagaaatacatcatttgacaaaaactcctacaaatagcaaaaattaataacatatactatcatgtgatcgcaaataatttcatgtcctctttgcttgctcaccttggcctccttaatttctagctagcaaataataaatatccattaaattaaacatcgtgtatcataatatatctatctattatatactaaaagtccactaaacttcctacaaacgctctcaagccgtcatgtggcactcctacatacactcctaagccgccacatgtcatatctctaaagattctacaaattttgaatacaaagaaaatatccgaccgtcaattttcacttaaatcagtgacccattattgccaaaaaaaaggctgaacgctattcatcgggaaaaaagccaaaaagaacgaacatatatgtacgctcacctcaagtaatgaaaaaacacagaaaaatagcataccatccctcgcctgatcttataaaaacattagactattacaattaaatttaagagatgtaaaacaactaaaactgatatttaaaaatcatcgacggttacgaaattatgatatgttactataaatttaccattagatttataacaaaactacaagaaaaactaattccatttatttatttcatcataaaaattataacaaaactaataatatcgattatatcatcatatataacttcataaacatggataacaaaaattatatctatgattattcgaagtaaatatttcattcattatgaaactgtgataagttacaataacattagagtcatgataaaattatcagattgtcatataaactactttcatgtattcatatttttaagtttattgtgaatatactaatttcatgtattcatatttttaatttttattgtgaatatattgcaagaaagaccagatacaaagctcttactatggtacaacctacacagtttatacgtggataacttaaaggtatcaagcatatgtcccgttaatcttgaatgtgtccgacccacttacaaattcttatccaccaaacatcgagctacaattgctaacaaggtatttgtgcatcatatcatatcaaatatctaatatatgatgaacatgtgtaccattagacgcatatagagataaaggacattttataagggacatttgctcatttaacccttttctaaagcttaactaccaatttgatccttttttaaaacaaggtttgctcatttgaccatgtttttcaacatcgaagttgtcgtctgaccctactttcactacatcctgagtttttcatttagaagaaaagaaaaacatgtatttacaagcccaaatgactaaaatgacactgaatacatcaaccttatcctcaagcactcatttgctcattccttatccccccgtctctctctctctctctctctctctcttcaaagcgcgaagggcaggaggagcggtggcggcagcacgacagcagctgcggagtgcccccggctgcttcgcggagggtaggatcggtggcagagaggcaacattgactcgccgacgaggagggccgctggcagtggtcgaagagacggtgacaactcggcagaggggaggcagcagctccatgaagggtaggaggggtggcgtcggctcagtgacgaggaggactgccgacgatggcgaatgggaggcggtggctgtggaggggtggcagcaaccacagatatggtaggaggagcggaggcagagggatggtgtcggctcagtgatgaggaggataggcggtgacggtgaaggggcggcggcacggtgacgaggaggaccattggcgcccacgcacatctccgccattagcttgctaataaggtcaaataagtaagggtagaagtggtatttggggcttttgttaactccgattaatgctcttaagagaagaaggtcagagtgtagcttcggttttgaaaagaagggtcaaatgagcaaagtgaccaaaacatggtcaaatcggtagttagatatgcaaatagggtcaaatgtgcaattgctccattttatattatagattatatcattttgtatcattttataaacatacaaagccaaagacacgggtgatttacttaatctatctaaaaaaacatgtctacggtaataagaatcatagatactgaaaagacagaaaaactcaagagcatataccctaataatacctaatagtaaataaaaattatcaatggctaatccctaggacatataaaattataaagtattattttactagtttattaaatgccctaaagaaccctcctacaacgtctattaaagcctttaacaaataagaggaaactttaaatttcttctgtaatagataaagcatctaaaccttattcctcattaatttaatgctcccattaattttggccattgggccatttcaatgggtatatgtatacacacattatttaataaaaaaacattcatccaagcatgttttctaacaaaaaattatttgagatgtcaggtgaggttgtaatgacctgttgcatggtttagagggttgttgtcaggatgactagcattgagttttactaggttgccagccatccaatgcatcacaaaaagagcccatataggagatatttgtgttttgttgatcgagccaccatcaagagaagccaacatgggaaccccagtacaaatattttttatgactaaatcttctcttaactcaagtatctatgtaatattatttaagtcgtgttggcttgaagcatgcataatttgataacatggtatatctagaaggctacatgttagaacattcaattaacccatcttggaaataataatacttagcaagaaatcaaacaggtaacaaatttctatctttaattttgatatttaattttaatcattggaaagggggagatagagtgaatggttcaaacagttatgttaatattgtccaatttgcaagctaaatgtttttttaaaaaaaagagatatagcgggttgattctgaagtattatcgtactattcaagagtagaggaagtagtaatcgtatccaaaatacatacaaagaaccatcatacataattttagcattcagagaaatagagatgcacgcgcaacgcgcgggctatcttcctagttgtcctaatttctcttcgttgctgcggccatcctcggagtgctctgtctctcatatacaagacataaacaccacatggtttcccaacttgtgtgatcttgacattcggagttgccccaagttgtccctgccccccatgcctcatacttccacgctgacacgtgttagtgtgagaaaaggtgatgaaacactcttgtattttcgggaagaagagctgacagcataccattatgatggtgctttggcactccacaacctgggtaaagtaaaagctatggaaattgtagatatgctgcattttccattggctgacctccaaaatctaaactgcctaacacgacattctttcgaggattgcgataacattgacaatactgttgttctccattcagttcagtcgctctatctcgatgattgtcatcttactggaaaatcattgacaatggtattaagcatttttccggctcttacctacttcaatttgagaatgtttggtgaaaatcatgacatagaggaaatagtgctgcaggccccaataacctgctcattgtgccatatgtcgatatcctccagcaagaacctagttctgccagttgaggacggaggaggtctgcaggaactctcctcactccagtcactcaggatttcagattgtggcagaatgttctctcgatggtgcatggtcgatgcaggagctcgtaccagcaagcccctcccttcttccctcagggagctcagtatttgtagagagtcaagcatgcagtcgatggctctgctctcaaacctcacatctctcacacatcttacactattggaatgtgaagacttaacagtagatggatttgatcctctcattacactcaacctcaaggaattggtggttttaaataattgttatgagaacaattattcttgttccatagcagcagatttgctctcagaaatgacaaggaccaaagtattatctgcaggttccttacaactggaagcacttaaggtggacaatatctcaggagtgcttgttccctccatttgcagcctccttgccgccaacctccacaagttaattttcaaatctgacttgcagatggaaagcttcgatgaagaacaagagcatgcgcttcagctcctcacctccctcaagcaactatattttgccgactgcccaagtctgctttccctccccgatgggttgcatcacatttcttctctccagaaattgcacatatataattgtcctaaaattggattcctacccaaggagggcttcccctcttcattgagagatctagtgttatcagagtgtagcgtcgatctacaagatcaattgaagaaattggagacatcaaacccagatttatttgtacaccacatgaggtaaaaaggaaagaaaaagaagtgttctctcaactactacttatttcagcatccatctgtaaccttcaatactaaactaaaactgctctgctttgtttcctactttgctgtgaaggatgggccgaatcagtctggagatatagcggactatctgcatccgcatgcgagtaacacaatagcacatgcgggccaaaggatcgatcggttcttccctctgcaacaatctggaaggttcttgaaaaaccaactttttttaattttatgtggtcgggaatttatgatctcctttttttagtgcatgcaagcgaccactctgttattcgcccatgtagttcattgcttccttcacctaaccaatgttatattaactgtcagacagttttggtaaccttggctagagactcagcatggtgataatgcatgcagcaggctgatagctatgcggtaaatttgagacgcgccttgccctggtctgacctctacaacatcagttacacctaggtggtcagtaacctctcctcaactcatctcgtctctctctctctctcttgatctctccaaaatagggaagttagaggatatgtcctttaaaactactccctcagtcccgaaataagttaatataatatggcatgtaatattttcaagtaaagtatgctaaaaaaaacaagtatgctaaaaatgactctaaagtatgtatagggtaaaagtattctaggcaatttttaaaatgcctctaaaaggtgtctacacttttgaactcccgaatttagagacaatttgaaattctcttctacaaaagtgtctcaacataaggtttttgttgtagtgtgagcttggcattgagtgtgtattctttctgtggaaacctatcaatccaaaagcttgtccagaactcatcagtttgacatggtacagtaaagttcagacctgcctgccagttcatgtaatcatttgctctttagcttattagccttagcgaaaatttgaatttcagaacttaattttagggttgattttattaattgttttccatcatagtttgttttctggcattgtgtcacgcccacgcctaccatctttcattggcagcttacaacggacaaatgaagaacaatagaacatcattgcttaaaataaagacagatgatgatcaaaagatcaccacagttgacatgagttctgtggagcatcgattccatttcatcatctggtatgttcatctatgtaagcagttttagatgacagcatcaggcccaaatacgaattatacccttacatactcttttgtccttgctctaagtagaaatttaacaaatagtatattatgattgaaacaaatgagtttatatgttttacagcccatctaaacttttcattgagactggtcccaccaactccaaacaacatagaccacacagctctactagactactaataaactggcaatggattctggtgttggtaacagaggcatatatggtctttcttctttttttttaattgaagaggtgcatatggtcatcgataggagaatcattttgagcttattagtttgttaagtcccatttaatcattcattatggaatgctaaaccgattgcacataatactgatataactggaatgacataatatttcttgactactagataataccccgcgcgttgctgcggacataataaataactttcaaacatgcaatatgtgcataacatttgagaagaaaaaagaaaaaactacttattaccatataattgatggagtatatacagtggtaattataactaaatattacatgatggagtatctccccaggtagcagtggttggccaatgcaactaacagaattacaactcaaatatatggctgttgaccggatagagcaagtattaataaacaaaattgaaggccactaaacattactggaaaatgaaaaatatacaccaataaaattacccaaaattatgtactatgtgtttatgaacatagcatgtatgaaaaataacagtagaaaagcaagtaaggtgtcatactgttgtcctcgttaacttgatagcctttattcagcatgacatttttcctagtaccgcttccctcgctgacccattgatctcagttttggaaattctgtagttaatcttgcaaatgaatgccaattgattcatgaataaggtgctagaatatcataaataattgtggtaagaaatgtttatttaactggaagtagcaattattatgcatatcttatcgtataaatatgcgatgaacattaggagcgcatttgtagttgcatagctgatcaggaatgtagtcaaggcatgtagcaaacctaggtgatgagtgatgactactttacaattacaaaactgataataaccataactgaaacatcaatattttatatgtttaaacatctacaaatatagtccaattatcactgatagcaaggaaatcataactaaggtgtcaaactattatataataatggtagaaaattttcatgcttgagtaagatatgggaagttgggaaaaggattattacctcgtatatataattaagtactcatccttgattaactctttggagtgattttagctttcagaaaactccaaaaatatttatatcaccaagctaattcaagagtgacaaaagatacttaaaaacatatctagagtatacatgatcagaaaataaaatgaactttgagacggaagacaacctaatctatttaagagcaaacctgtgtgtctgtgtgtggagaatctgacatcattcttgatgaggaccttatcaaaagtgaaaagcacatcaacgacatagatgtaccgagatatatatagcttcaccagttaaagaccataattaaaataccaaaagaagaaagctccatccgcttagcagcccatatgattgttacttagctcgatgagttcttagatctgatcgggtgacgacaaatcaaccaatagatgcatatttgccacgtcttcaaccacttaagaatgagaagtggtctataattcaggataaataaagaatatgaatcaactaaatcagtagccaagaacctgaaacctggaaaaagaggatacagcaacaataaaattctctgttgggtatcagatttattgaacataaggaaaggggaaatcggtaggtaacctgtgttagatcattgaagtaattggagaggatcgaccaggtgagggctgcatatgaatccagcaagcagagttgcaagaacggtagtaaaacgccagcagcctggtagagtgtggtagatcgacgaataagcgagatgataaattggatatagatgcagaactgataaagggataagaggagaagaaaacgcattaagccattaatggatttacttgataacagccgtgaagtgttttcctcggtggttgtcgacggttttcattaatcatggcaacctaaaggggcgaacaacctttagacatgggagaggaagggggaagcagcgcacgagccgccatgggggcgacgggaggggaagcgccacaccctcatcctgcctccgtgtggcacgggaggcggatgacatgccagcgccggtacgggcgagcacgatgcgggagatggagaggatcacggcgagattgatacgaagggggcggcggagcgagatgcaggagagggaatcgatgcgagcgtgcaaggggagaggagaggagcgatgcgggagagaggggttgatgcgcgtggggccggtgaagcagcgagatgtgggagaggagaggagcgatgcgaccgcttgattgagatcgaacggtggggagaaaatggggtgacgtgaagcaccaggaagcagagaattctagtagtgggaatgatttgtataggtatataggattcctgctaggggaaggtaataaacctgtgattccaaccacacaataatcttaattatctagactacagacactggtggagaaaccctttgtagtcccggttcgtaacccccctttagtcccggtttccaaaccgggagtaccaatccgggactaaagatcgctatctttagtcccgggtgaaataaccgggagtaaagatcgatctttagtcccggttggtaacaccaaccgggactaaagatcgagctgacctttttttttttgcatgcccctgttgctgcatggtttatatatatatatatatatataaaccatgcatatatatgtttcaatacatatatatgcatacatatatatatgtatatatatatatatatatatatatataatattatattatatgtatatacatgcataatatatatgtatttatacatatatatgttatgcaaatgcatatgtatatagatatatatatgaacaaaatatatttacattatagaaaatgtgtacacatgcatatagaaacatatgtagtcatgtattaattacaatccattatatgtcctagctagctacgatttcgacgtagtagtactcgctgctagctcagaagctaaggaccggtgaattgtgtttccgtcgtagtagaattcacccttgggatcaaggatttcttcgttgatgaatcccatgagttgttcttgaaccgccgcgataaattccttgtgtgtggtcaggttatccctcatgcgaataaactatatgaatgtatgaaattgattagtaattaaacaagaaatcgctacgtaatgaaattttgaatttatttgtacgtacatcgagctctcttgtggtgatgatttggtctgcaaggcagtggcaatactcgcacacgtaatagccgcacaagttagttccctgcttttgctttgcgcactacaaataaatgacaaacaacgagagatctaattaatatacacttgtatgtatttgaatcggagaaatataaatgtagagcatgtgtactcacaggaaatttgaacttccgcctaagtctttctctccatttgctgcggaccaaatgacggaaccgataccaagccctacatggagtttaaagctatgattcgtagtagcaattaacataacaagattttcttaattaacaaaggaacttatgacggtacctgtctataagttcgaaaaccttgtcaaacgtagactcttttttatccattgagtcatatacgttgacggtgcaggcctccaggtcgatgagtaaaagcacccagtggaatctgcaatgtgcgtgggatgcattacatatgaaacacttagcaagttcgtacgggaatgaaatttggtatgtaggaagacagtaaaattaaactaactctgtgttgtatggcaacagtatgaacgtcttgtaatgctgcgccttcaggagatggacgagattgtcctctgtttcttgtggatattggtcgagcattgcgacgtttactttccgagggtcgatgaatccagtatcgaaaaccctccgccgtcgggccctttgaatctccattctaaaacgataaaagggagtatattattttctatggtctacttatatacaaggacctaattaattaaaggagacgtatagtaagaaatctaactgaacgatatacttacaaaatccagcaactcataatagagacgtcgagggcgtccagctggtatagttcgtagattcccctgaaattgatccagagaatgtcatctccttgcaagaagtccgtgtccctgatcctcgctccgatcatctctctaccggtggcgctcatctccatgtacagctgatggaacttgtacatttgtgtgggtagggactgcagcagctcaggcttgacaagcggtttaccgagttcgtacatgtatttcacttccgccttttcgattggtgtgactcctagcaattgatccgtagttagaccggtgtcagtaataaattgttctatcgtcatttctttaccggtcaccaacggctcgatctcctggtttggttgctctccaagctgagggactggtttggactttccagaagatgctttcttcagtgttcgctcatagtccgatagcttgatggcctccttgacagatgcagacatacccctgaagaagttcctgacactggggtctataggaatcttcttttctggacttcgaggcttgaattgtctcttgacttctgatgcaacgtaagcgtcaagctcctcttgcgtgcaatcgtaccccgggtccttgatcttggcggcgtcaactttcgccttctttgttgcccttgtgtgggcaagcggtggagctgggggggcccttgactttgaaggtgccggaagaggagcttgcgggggagtaggtgtaggagcacgaggaggagtcggtgcaggatcctgaggagtcgatgctggagcctgaggtggagacggtgctggcggagcatgaggaggagacggtgcaggatcctgaggaggagatggcggagccggaggagatggtgcacgagacgccgcttgtcgcccagggaggatgatgtaccgcctgcgccatagaataatggcatggcatgtgtctcgtagatgcgtctcaccgtctcctccagggtaatccagctcgaggtcctcgtacgcgccttcgaccaactcaacttcgaccttggagtatcctgctggaatcggcctgcagtggtaagtacctgaagggtccgttgggatggccatgcccgacgccaccttcatgttgtgagagattatttattagtaatcaacatatataagcagcaactagcggaatggctaaatcttacctttattgataagttcttcaaaggaatatgcagctcacatggtgtccgctgagtgatgtcatcaacgggacaggtcgattcgtcctgtgtttgcatggcgtccatgctctgtgatcctacctgccccgttgaggcgcagctgctacggtttcctgacgggctcaccattgcaggaggaatggtcggctggggatcatgggaccgatgtgcggccatgcgttcatcaaccttccttgccacctcctcttgcatgttgagttcgtagctcgatacccggaactctaggtctgcaatcttcgcctcggtatctctcttgctcctcatccgactcctgtacgtgtggatgtcctccttgaaaccaatcttccaaggaatcacccctttccctcgagttcgtcctggatgctctggagtctgcagggcgagtgtcagctcgtccctatctctgtctggtcggaacgtgccctgagaggaggcttccactgcatctgttagtcgtcgcgcagcctcttgtatctgatagccgaagaccagtgagccatcagctgggttgagcgttccaccgtgagcatagtaccagaacttcgatcgttccggccaattggctgttgccggttcgatacccctctcaatcaagctagcctccatctgctcccacttcggcatcgcgacgctatagcctcctgaccccaagtggtgatggtacttcttcttggcggcattttctttgtttctttccatcatcgccttcccttgttcacctgtcttatatgcaacgaactcgtcccagtgatcccttagctttgggaatgtgtcgaagttcggtgtctgccccttcagtatatacttctggtacagatctcccttgaagctctgaaattgttctgccattttcttcagagtccaccttttcactttgtcctctgtacccgcaggaagggtgaatgtctcgagcattgtggtccacagcatctctttctccgaatctgggacaaagctctcatgatctccgcgtgcccttgttcttcgccagtacaccgtactgacaggcacgttatcccgcacaacccaaccgctgtgacgtacatagttcttggcggcttcggccggggcactaggacgtccatcttcttccacttccgttatgatgtgccgaccctcaagcttcttcgctgcacctcgttgcccgcgtgccctcttctgtccaacggagggttgactaccactagcctcctcctcctagttcccctccacatccctttccacgtgcccctgctggttcccctccgcatccctctccacgttcccttcctcgttcaagtactggtttggatcctcgttcccctcttcttcattccagtactggctgcttccctccgcgattgtatcgtacaatatctgttcctcatcgcggtcagccatctgttgatacaagaaacatctgctaagtcatgagacatttatgttttaacaatctaagtcatgtatgctaagtgtaaatgtcgtacattagaaccctacacaaccttacgtgctaagtctaattacaaatcgtgatataagctaagtctaggtgacgtatattatacaaccctagctagtaaataattatatactaagtctaattacaaataaaataatcttatattaaaactcaaataatattacatgctaatactaaaatagtcatgtatatgctaagtgtttcgtgcgtatatgctaagtctaattaagactacaatagtcaattgctacttgtcgcaccaattccgtagtcaataattacataccaagtctaattacaaataaagtaatattatattaaaactcaaataatattacatgctaagactaaaatagtaatgtatgctaagtgtttcgtgcgtatatgctaagtctaattaagactacaatagtcaattcctaggagtcgcaccaattccgtagtcaataatgtcatactaagtctaatttgcaataaaataatcttatattaaaactcaaataatattagaacactacacaatcttatatgataagtctaattacaggtctaataatcttaattaattgcattacaaatataacaatcatttatattattacgtcacttgcctgctccaattccttctagggctagctcttccactcaggcttgacggacgactccgacaacacgtcttttctgcaagataaaaaaaatgtattaggataaatgcgaagtaacatatatatatatatatatatacatgtatatatatatatatatatattgcatttcacgttaacgttcgtccttgttagttcgctcgttcacgttccctagctcgttcacgttcgttcgatcgttctcgctctcgttcgttcgatcgttctcgttctcgttcgttaacggcggtgtggcggcatcggggcggcggttggcgcggcggcgtggcgac

SEQ ID NO: 7251 - DNA, 20235 bp, Oryza sativa
tcatcagtatattcatcttcctcagtgtcttccacttcttcttcatcagcaacaaaatcttcatcatcacttgaagttacatctaccaaaaaagaacaaaaagtaacttagtgtattgtaggaagttgtttggacaaatgtaaaaaaactaaaaattcagttgaaatcattgtaaaaaaaacagtgtggtagaacaatgatactaatgagattcaaattgtgcagagtggtagagcatggctaaattaattattctgtacaataattaatagaaacatagtgaaaaaaccaaacctagatcttcatcttgctgaactctttttgtccattgtgcaagtttcttccggttcattcgcattttccttggttggctacccctaggatccacaaaatcaaggccggaaatctgtctcacaaatttcgtgaccaaacctgaaaacccttcacacaaattttgcacagcgatcacaattctgtccttttcctgtataaaaagaaaaaacagagaagttacatatgcagatttcacaaagttacttttgcagtttgttgatgttacatttaccaagggtacaaaaagtaaaacagagaagtggggaaaaaatataaacctgctgctgcatagtattgggcacatttgaatttatgaaggttgaaaaatctacattgctcccaaacaaattggtcccttcatgctgaaaactgctcctaagctatattttcaattataaaatccgtaagttacgaacaaacaaaaaactaaaaatgatgcaagtatgccaactataaaaaaaactcactggtaaagctccaaaggagccgtctgctgatgtgtcagctaatattgcttgatttatcatttcattcgtccaaacagtagctcgataaccctccactggaacattgagatttttaaacgaaagcgagtccaaataaagaatctacaaaagaaattagagcatttagattaattaaaaaaagtacataacttgtttgatttaaaacctacaaaatatgttaacttccagatgtaatttaaatttaaaaacaaattggaaaaaaagatgtggcagggcatatatgaagaagtaacttaatgcacagtgagaagtggcttaatgcacaataagaagtagcttaatgcacagtgagaagtaacttaatgcacagagagaatttacttgacagaaaattatttataacaatttaacagaaagaagttacttcctaggaacatgttagttacttcctggacagcttaacttacttctaaaaaacataaaagttacattgggacagtgatcaaataaaaaaaggcgagcattgttaccatcatatacaggagacatgctgagttggtattcttcccagctttagcagctttttgcaaaatagatatgataaacttgcaccaattaagattcttgacatttccagcatcaacaacagaaggatagcatcttgggctgactgttgttgccgtcgttggtgctaaaacagaagaaatggcgtagatgatccacatgcgcaggtacttgtcatctgctaacttcaacttctccaattgaatcccaagagaagtcagtgatggtgagataccatcattgattccaagcaaattcagcacaaattctgtagcttcagattccatctcatatgagacatccttgtcgcccattgggataccaagtacagacttcactgactcctcgttcacatctatggctccacgtccagggaatacaagctgattggttgctggattgaaatgctccatcaaccagctgcacaaatcaggtctgagcttcgagcacttgagatctacgaggccatggaagccagccccctctattagtcgcttttgttcgccactcatatggggatacaactttataagtttcataggtgaagccctgctactttcttgctgcaaatgtataaaacaacaaaaagaaaaataaaaaaacatcagcatttgtttattttttaaaaaacatatataaaacagttgaaaaaagggtaactgaaccaagaagtaacttgccattaagttagttctagaaaataacttgccctcaagcagcagcatcaaaaatattttaggcacggtgagaagtaacttaatgcacatagagaagtaacttaatgcaaagagagaagtaacttcaggcacatcgagaagtaacttcttacttgttaacagaaaatctcaaagtaattttgacaggaagttacttctaacaaaacagtaagttacttcctaggaacatgcaacttacttccagataaacttgaatttacattccctagttacacagcatgatacattccatctagttgcctctcagagcaatttgaacagaaagttactcgttataaaactcaaaaagttacttcctagaaacatgcaagttacttccaaaaataaacttgaatttgcattccctagttacatagccatgagtactggtgttggaaatctcataggaattttaaaataagtaacttaatgcatagtgagaagtaacttaattcacagtgagaagtaacttaatgcatcataagaaaatatagtgcattggaaaaagcgaaacactgcttgagggcaaaaaatgcataaaaaaaggtggatgcttaatacctttgatctgctcctttttggaggaggttcctctatgtcatctgcatgatcatctccaatacttcttttcttagcacgttgcgaacccccccttgttttttcacttggctctggtttgcctaacatgcctttctgtacaatggtttttctttttcccattcctggaaatacattttggatgttagtaatcaacttgcaactaaccatcgatcaactaataatcaacttgcaactaacaatgttagtaatcattttggaaattcattttggatgttagtaatcaacttgcaactaaccatcgatcaactaataatcaacttgcaactaacaatgttagtaataattttggaaattcattttggatgttagtaatcaacttgcaactaaccatcgatcaactaataatcaacttgcaactaataatgttagtaataattttagaaattcattttggatgatagtaatcactagtaatcaacttgcaaccggaaaaatcaacataagccagagagagagaaatttaaataccttcaaatggaacccgagatccacaagccgacgcttgagggggcgaattccaccgcaaccttgcgctcgccgagaggatgaactagcacctgatgaatgagggagagagagaggggaaatgagggaataggggagaacaaaccgggaggtttgagaagcaatttgcgcagtgaaaaactgcccaaacctctccacctccccggcacaaaaaacgcagggaaaaacagccccatcactccacctctttggctcaaaaaaaccgcaatgaaaccgccacaacttaccgaaaaaaatggccgccggatttggaggagagaaaactacctccgccgcagcctacgcttcccaccgcaactgccggcgcgatgagaggaaaccgtcggctccgccgactctgccgacgccggcgcgatgggaggaaacaacagcaactccccgcaccccccccttcgccacggatttcgccggagattcacgccgcctccgccacagatttcgccggagattcacgccgcctccgccacggatttcgtcggagattcacgccgcctccgccacggatttcgccagagattcacgccacctccgcctctctcactctccgcctctctctctctctctctcgtcgagcgccacccaaaaaatttgaacagtacccttcgctcgttcggtcggaaaaggcgacgcgtgagctcgctcggtcggccggtcgggacgcgcggcgcgcgccgtgatggacgccacgtcaccacggctgccacgcgcgtcgcacgatagcgctaaatggagaggcctctccgtttagattttacgagcttagaatgaggtcaataacatagccaactatcggctgcaatagatgggcacatcatctggagttggattcagcttatctgacttcaaccctcacgatggcaaagagcagtagaggtcatccagctgtccatgttcgatcgaaccgtctgcccaggaagcgcatcaaatacaggtcagccgcatcgtgagtctgggccaaggccggcccaacaagcctcgtcccccagccgtgctcgtactcctcgtctggccaccgccatcgccgtcattcttgtcctcctcgccgccctcgctctcaccgtcgtgctcgtcctcctcaccgccctcgctctcgccgtcaggctgcggtactcggctgagaagatggggaccggaaggcgcgcaagatgcagcgcccggtcacggccacggcgcatcggtgccacgagctcgatgtgcgcgcgcggagctcgagcaggccatgcgccgcgacaggcagcgcgcggcgaatggaggaggggagtgcgcgcgccgcgtggctccatttcgccgatcagaggaagaccgaagctgtggtgcctgagctgctcgttgatctgaattacctgcgtcgggcctcggcaggcagggagaggaggaactcctcatcgccatctctcagcagtgagcgagtggaggaacacagcggcctcctcttcagctccttgatgctgcgtctaggagtgttgctttgttgcttgtctgaccaaaccgaatggcattctgaagatactgaatgttcagttataagaatgatagattgttctttacacgggcagcagaagcagaccacttgttctgaaaaatggggttgcatgtgttctgtaatttgtatagaaagcagaaaaactctataaattgtttgcaatgagaatgacttgtccaacagaatgatgaaatggccatttgtaacttatcactgcaatgaaattatgttccaattctgggcatatggcttgttcaagagaaccaacggttttttttttccaaaatgcacaaacatatatgcatgacccaacctttccatctgatttccttttgtttgagtacctttctctaacctcgaaacctttctgaccaccatagctaacccaaaacatccaagcctcatcaacagtattgaattccatgccaacttcaggtaacaaactaggtagcacacccactctacaggaacaaaaaaaatgatttggtggtcatcgaacaagtaaaatctacccgatcatggtgaaaaaagtaacaaccatagcttacagacctgttttcttccatctcaaatatgtagattttgctggaggcttctttgatgaattccaacagtctaatggaggaggtggaagacaatcaaataatttgctaaaaaaaaggaagagaagaggccagaacttcacctgtgcttgatcaatggttgaatccgtggttcgctgtcccagcatgttgtcagatgatcgcctggggccatggcctcgtttggcgccaaaaaggcgagcgcgaccgccaaaacgcgtttgttcgcggtaaaaaagataggagcgatggcgctgggacgaggcttgttgggccagccttggcccagactcacgacgcggctgacctgtatttctgggcggacggttcaatcgaacgtggacagttggatgacctcgactgctctccgccgtcatgaggggtgaagtcagatgagctgaatccctggagaaagcattatagctaagtgatacaatagatatatcatatacttactgtaacacaaatattctttttgtttttataggcccaccatccctctactctctttcttgccggaggaggagatgcgtgggaatgtgggatccttcacgtgctcaagtccaaggacgaacatcagtacatcatggccgccgcgttcatccggtccggcccgcgtgcacgtctggcgctgctgtactaggagacgacgactgtggtggacggggatggcggccgctgcaaaggcggacgagggtggtaggacgggtgtgtgtgaggacgacaggatggatgaggacgaggatggcgcggcgcagcggatgtgggcgaggacagcgggatggacgaggacgaggacagcggcccggcgcggtggatgtgggcgagaatgacaggatggacaccggtgacaacggcagccgctgaggatgaggacagcggcggccgcgcgggcgacgatggcagccacggcgtggctgatgcaggcggccgggctggacgagaaccacaacggcgacggccaccgccgccgtggacgaggtccgcagccgaggcggtcgcggtgggcaagggccactgccaaggcgagcagaggcgatggagacgacggccatggcggacgagggtggcgacaacggtagacgagggcgatggagacgccggccatggtgcacgaggtggcggcccggtggagcgcgacgacggcagatgagggcgacggagacgctggccatggtcgatgaggcggcggcccggtggagcgcgacgacggcagatgagcgtgacggcaacaacggggaacacaagcggagcgaacgcgctggtggtgataccggcggacgcgggccgagtggatggcgatgcagacgcgctggtgggccccgctgcctcgggcgagcgtgcagtcaagcgactaattaggccatccccaaccaataaactattagtttccatacttgtcatgtcatatagacactatatgtagacactatgtattcaatggatggtgtatctatctatcttctatctatctatcttctatctatctattatctattatatactaaaagtccattaaacttcctacaaacgctctaaagccgccacgtggcactcctacaaatattcctaagtcgccgcatggcactatctaatcttaccgttgattttcacttaaatttgtggacccgttattttacaccattagattagatctattattaaaaaaataataacttccacatgtttataacatacaaacgctagctgctactgtccgtatgtatgagattgtacgatacaaacgctactgatgttctttccgtaacatacaaacgtacatgattgaaaataaaatgatcaagctttcttaaccttcgctggaagaaaaaaaaaaccatacacttgtacataaaaaagacagaaacaacatacatccataaaaatcaaccgtttttaaaatatgattttctacaatataaagataaaatatattacttcacatgtataaatatatttagttaaattaagatctataataaatatccaatcaatgttctttaaaccatcttctaaatctatctattatatactaaaattacattaaactttgtacaaactcttttactctgctatgtggctctcaaataaattagagaaatcctagaaatctattatatacttaaaagtctattaaacgtactgcaaatgcttctacattgtcacgtggcgctttaataaaattacagaaatcctagaaattcagaataaaaaaagaaaagcatccaaccttcagttttcacttaaattagtggacccattattttaaacaatggattagagctcttaaaaataccatgatgctaatctctatcctggaaaaaacataatgcgcttacgtcatacgatcgtctccctcccggaaaaaaaacaaaacttaaatacctacatcatatactataaaaaaaataaagccaaaaaagaacaagaaaatatgcataggtacatagtagaatcggaaacatatactaatcaggaaaaatcatcagtgtcggcactgatttgttgtcaacagcctttaatctacgattttattaaaaataatactacacatatatgcacaattaaacttaatataaacttattatagtgataaatatatcatgacaaatgacgctaacatgtaatagttaatgcgataataatgtttcaaataatttcatatcatattttacagtgtcaaatatcacttgacaaaaatatacaacgttaattttaatctacatgtgtaaaaattaaaaaaacaaaacctatcattgttttttaagtacatctgtttaggtttatttaattttaggagagattgagattctcaaattatttcgaagttttcaaaaattttcttatttgaggtgtgagaagcacaaataatagatagatgagaaaaattaaattaaattttagccagtgataataaaaatatataatttagctttggtttttaagtagacctttttaggtttattttgggtgagattgagattctaaaagtatctgaaagtttttcaaaccttttttattgctatttgaggagtgagaagcatacaagatggatagatgtgaaaaaataaataaataagattttagacagttattttactacaatacaacccgtaattcatcacgagaattatgtatgttctttgccaaatagtattggaaaaaatgaataatccaataaaatatgcataaaactacttatgttatatttttttaattgatagaaattctaatatagcgggtataattgatggacgaatgacatataccactgaaactcagcagtaagtgcactctagcgaattagatagtgtaaataagtttgtgaaaataagtacattattacaattagtaaatgagtctcatttagttataaacaatatatggttaaaaaaatctagcgctaaagtatgaatctttatcaaaatataaataatgatatggtgttttgtagattttcatggtggtacgtctctttagctatagctctttttttctaaatagtgccgaatgattaaccccactcatttgaaaaacataatactgtttgtattgcattaaactttgagaagcacttattactaacttcatatacacattgtctattctctaccaaaaatcgactcgaaacttttaaaaaaattgtttcaatcacctcctttctgtccctctttgtcctttaatgtaaggtgcagtacttgctatgctatcgtaaatattgcatgggcatgcacattgttgagttaaggtactgtccatgaaaggtcaccatagacaatgtaactaaagtgatagacttatcaatataatcatttgtgagtgtaacaatagtaaactaagtgttaaaatagtactctacgatggttttttaggggcatggctacatcgacgtggaacctatatgtttcaaggcattacatatgaaagccttggttggcagatacatttgacttcatccgttagagaggtattcatgtttatttttaaagatgttatcgtattattctgtagatatgttatatttatactatttatacatagatgtgaaaataagtgatgaatttttataatgtaacaataatgtatcatttattttagtggtactaatatagtttcatttattaaaggtgcacctaactcttaaaacaatgatagtaagtaatgatgataaacaaccagtttatatatgactaggacaaaggaatttttatttaaattcgagggacattcttatcacattagtagtatattaaaatctatcgtctattttatggtaaatatatttatttttttactgtaggataatctaaattcccttacactatatatagtgatataatccattttagcatttttttaataaaaaataagatgcccatgcatctgtgagaaattccttaccgatttatattctggaaatgttttccaatttatattacgtcgttatagtgtttgaacacaacctatcatacatgcccgcgcgaatgtgcgggctaccttcctagtttaaattaaattctcatccagtcacatctcttctctctccttttatcagcatattctcttatttttattcttagttcttgtgtagagatggtttcttcatctttttacctctcttctcgttaactttcttgccacatactccctccgtttctaaatatttgacgccgttgaattttttacatatgtttgaccgtctgtcttatttaaaaaatttaagtaattattaatttttctcctatcatttgattcattgttaaatatacttatatgtatatatataatttcacatatttcacaaaagtttttgaataagacgaacggttaaacatatgctaaaaagtcaacggtgtcaaatatttagaaatagagggagtatgatttttgcttatgtgatgtatttaatgctatggaaactagatggcatggagggttggggatggccttagttgtccgctgctactctctcctccatatcataaaaaaaatcttacatggaccttatatcgcccattattgtacccgctcttatggagaggaatcactagacatgatactttttgacacgcgactgttgatcaaattagtgcataactaaaaaacaatcttttccgtacttatgaattgctgcacgacaacaaaaccaatgttttctataattacgaacaaaattagttactactattccttttgcaggatgattatgatttctcgatttgtcatgtaattttttaaaaaaaaaacaaatcagcacaagattgtgtccactctattactagctacctccgcaaaagaaatatatttctacgaatttcagaaagataattataccacctataatcgtatccggttttgtcagaaatacaacataactagcttcagaaaaactaaccgacgatatcccgtatgggggaagtggggacgggatacataatgaacggtcatcgtccttatccgtctgcatccttttccgcccgactcgatccccaatctcctttgtcgctcttctcttgcacctacgcctcgcatccgccgccactcttctccttcctctcctcttcttccttgcctagctagaagcttgaaaatggctagagctcctttctcctgctacacctaccctcctgttccgtccccctcaccatcaacgagccaaggagagggctgccagcaccagatctggagatatctagggcctccccgtcattggatccgcctgagccatgtcagtgatgaggtgatgatcgcaccggcccctgtggcctccacctcgatgtcatgccatcgaggaggatgccgatcgatgtgaatcctcctcccacgcaactgttagtggtgatggagaggagacaaatgaaggtgctagatttggagtttcaattgacaatcgacgtggtgttgcagacatcgtgttgctcgtcgacgttgtgcgcaggtatgtcgtgcatgtggcgtatcaccatggcttagctggtacctacaggtattaggcatggtacgaatggtatcatgttgatacctacaggtttcagggctggtacctatggtatcatggttgatacctacgggtaccagacctagtattagtggtatcatggttgatacctacaagtttcagacatggtacctttggtatcatggttgatacctacaggtttcaaggctgatacctgtggtatcatggttgatactcacaagtttcagacctggtacctttggtagcatggttaatacctacaggttttagacttggtataggtaccaaccaatatcacataggtaccaagtacaaggtataacgtgcgtcactgccgcttgggcaggtggtgagctgtcgaccaccagcgttttgtctcgtcttctcccttctattcctttccaaatctccatgccttttcttctcaatctggtgttggtacaagggtcaccaggctgctacagcctgcagggaccaactttgccacctaagccactactggtactgtggccttctcctagcgcctcgcgcgtgctcctccgccagctagggcgtgagcgcgtagggcggcgctgagtggtggactcgtgagcggataaagtggtggcggagctaacgtcatcaatataaagtatctcgtttagacgggatgccgtaccctagctagcagccctctatagctttatatggaacgaaaataccatatacctagatttatatggaagggtatatatatattcgagtatgaaatttctattggcttaaaaaaataatatgggaattctacgaataacatgtaaatgccattcaatatgtcagaatccaatcgattcgtgtaatataaggtcttatatgctcctatcccacttgtagttttcaagttctaattgaacggtcatacccgtataaatacaaagacttccattgagacatagcatcaaattataaaccatagccataagccagatcgaacaccaactagccatgaggaaacctaaagctagccgccgaggcgccgactacaagtcatcggattagtcctcattgaagactacttaggcttagattagttagcttgcttctaattttataatcggtgtgaaacatcatcgaacgatacatataaattggattagggctatttacctatcaagaggtttgaacaagctagtataaacaatatatatttccgaaaactgaaccagtatatttcttgtctccgtgtcgacgggggatactagcacactggaagaatagggtatagggtatgttggtacgaggatctacacaatacgacatcaagcaaacccggagacaaggattatactgattcagacccctcgtaaggtaatagccataatccaatctatatgagattgatatgaaagaaccacggattacaatagagaaccaacgattccgagattaccagcgagatccttgtcgagatggtttcgacgagatcttctagcgagtaggcttcacgtcctccggattgtaggctatggtggtggtgttggtgctatgattcgatgatctggaccccttaaggggtgtgtcttttataacatgaatcaccttagtctccaagtaaaactcggtgactatggaccccacacgatatagtataacctaaccctttttgagtaggactctgttgttcacttgctcgtgaggataatttccataatctcttgttaatttcctcatcgtatacggaaatatatcgtacaaacgaaggtatgtcgtatccatatattccataaatcgtaggataggagatataccttatccgtaaccatgataggctagtagcattgttttgccacgccagccacggtggcgtggcaagaggctagcatgacaggacagcactgccatgccagctgcgcgtggcatgccaaagttatttggccaagccaggcgggctggagtggccaaaaggttcagattcggacatattttttcgaaaggtctatttataaaattaaaaaaaataaaaagtctaaaaaataaaaaaatttcgcaggtaactggagcctcttatttcttaacagaaaaactctcgaacctctattctagtgtgataggtatagcagttctttcactagatgctaccttgagacaatctcaccagaataagttgattgaacaggtttctgggtactgcaacagtgttttaggaaaacaaattcagccacactccatatattcattgaaatatctcaatacaaattccacccccgggaacttgggccagccagcaggttctaggttccatagattacatagaaccagtgttcacctagtcgctaaacgctagtcggacggtcacctactgactagcgactaggctgattaggcggcgactagatggattaggcgaattaggcgttttttatatttctttcacagaaaaatactgattcttgacattcggtactcagtaaatataggcatttagacaaatagcattgggtttagtacaaattcataggaatagcgaacatacattagtatatatatatagcatagcaggctaggggagtagcagtacagcatcaacaccaacaaatcacatacatacagatctaaggagctggagctaggagagaggaagaaaaatttatctggaactggaagaacagaagagatgaggtggtggaggggagcctgatcccctgatggcctgatctagggttggcgcaggctgcttgagtggttccgtgcttgactgcttcaattggtgtgtttgccaccttccattgacggtaaggatgaaggatgagagggagagcagtagtagcagaggaggagggggaagaacgtggagcagcagaggaggagatcgggaagaacgcagcggcacggtggaagatcgatgggcacggtggcggagccgtcgctcgtggcggcgtgaaaaaggggagtaggtaggggttgcgctctctctctaggctctcaaataaggtaacctaaatccccttctataccgagctggtcccgcgcggcgtttctaaatttaattgtgcccaaattttgatttctatcacctagtcgccgcctagacacactgtcccattgtccaattgcgcccaggcaccgtcctgtccaagctgtccaggccgcctaggaccgactaggaccgtctaggcggtaaaacgactaattcactgcctagggtataaactggacaaattgtcgccgactagcgattaatcaccgtctagacgggctaggcggctgtttaggcgaacactgcatagaacagaacttatcacacagcagagatcaaaaactcaggttgtcccatcaacatagcaacatgtttgagaattcaagcatggtaattcagagcattgttccagatccaacgcccagcagcaaagcaacacttcgtacatcttcttggtcctttattctcacaaaaaaatgtttcccatttcatcacccatattaccatataaaatgcctataaaatatgtcagacagccaaaaaaaatcgatactcatgtgagaagctccacaacaaccacctctgatgcagaacaaacatcggagcggaggtactcatgtgagaagctcccatccagcaggtaccatcgatactgtccggtatgaaatctgagccatccaatcagctcaatcggatggtggaaaatctgtggtacctccaggtacaaatttgcccatgaggtggtaccggaatatttggagtggtggaagggtaattttgtcttttcgcgtagaagtgtccaggggagggaaatagggtcttctaccaaatcggcggcgagcaaatatccccttcccatccgatccgatccgatccgtgagagtaggcggcgtcggcgacttgcttcgtcggcctggagttgctccgcgggaggcggcgggatccgtgggaggcggcggcgacttgcttcgtgggagatggcggcggcgtcggcgagttgcttccgtcggcgcctacttgctttgtgggaggaggcggcgtcggctgatccgtagccgccggcggcggctgatccgtttgaggcggcggcgaggtgctccgtgggaggcgaggcggcggcgggggaggcgaggcgacggcggcggctgatgtgtaggaggcggccggcggcgaagtgctccgtgggaggcggaggcggcggcggcagcgggttgttcgtggcagcgaggttgtggcgggcgcagtggtgcctggcgcggcgaagccctggtgctgcggtgctgctggtggcgggcgcggcggtggcctggtggcggccgcgttcacgaggtggcggcggcggctggtgcgtgggcagccttggctgcgaggtcgtggcgtgcgcgatggtgccggccgcggtgacgaggtggtcgtcgcaaccggtgttgtggcggcagcgggtttgggctttgcgcggctgcagtggcgaggtggtcgtgtagtcttcttagccggcgacgaggcagtgtatgcatcgattttttttcatccaatctaaatcattagcttctgttggttgcagcggtagatactttcattttctgggctgcatatgctcttcttcttcattgcttataggatttgtattgtacgatttattggatgttttaatgagctcagtcgttgcttgttctatgtgaattttcaaatgttcaataacctcccctatcaatgagtgactgcaaaatgataataggatagaagaaagaaattgttgatagcataacgagtggtacactgatgagttgcttgttttaacaaattgttttcccagcatacttctatggtttattcagggaacagaaactaacctatcaggctatcacaggtggtagccagcctaataaattcttctctgaatctagtttttcaaatccaaaagatataacacaagacatgtagaatctggaggtcgacatatcatttctgacaatgaaaataaaagatgaaaccaccttatccacatcctatacacacactttagatagaaattctgtcatgggtatttcatcgaacaccttttatgcgaaataaatacctaatgcttatcagagacatcctctgttacctctgtaaattgcaacatcacataatcacgcacagaagattcaaattttgtgaaaatcttactgacttttgctagataagaaatgccatcgaattcccttaacttggataaacaggagaatagcatatgcataaaaattctgtgatgttctctaaacaggagaaacattgcaagtagttacaatgatgtctatctgaatcttagcctagagctagttgccttcatttgcctcggtcactaggcgtttaatatcttgctgcacttcaatcacttcgttcatagtagaattaatgaggttggctgcaaccttatgtttgaaagtggtggttgtatcctgaaaagcaagttatgaaaaaaatatcaagtaatgtcattttatttacaaagagtactgattgcaatttaaaattaccatttcattgaactcaggggagagttcttttccattccaatgctgtatgaatttcaatgtgtgcaagccacatgaccagctgttgcaagcatgtcctttgttagtggtaattcgttatagataatttgcgacaaaaattaactgtttgtttgacctgtcactttgctgagggactttcattgggcagaatggccaattggtaatcttggtgttcttccatttgttttcaacttcatcttctagccttgcatactggataaacttttcaattccttttatctgagttatcaaatagagtattacatatctaatgtaacaagttagtaaggaatagtgatgaatctaaaggcacaatgtagcatactgtattattgaggtctttatctttgtcgtagtagctcttgtccatgcgcatcgagtctagtatttgaattttttctttagcaccattgagaacagccacgtaccaatgagttgagtttctattgagtggtaggaaaatctacatagaaaatgaaatgtaagtcatgcagttattattatgaaggatatttgaggacataatataccatatcatgttgcaaatattttgctgtaacttttgctctcttgtcttgatattgcttgttgcgggttccaatttgttcaccatttgttttccaggcctggcaatgtgctgtactttctagaaatgcagtaccattctctcttggactttcacattgcatgtctttaatcaacataatgtatgcatctatgacctgtgaaagaataaagaacaaaatttagatactgataatattatgttgtatggaaatggctgaccggctttcagacatggaattttcattcaagaagaagttgtccaagcagaaaaaagagactgatgacattagaaattggttcgtaggaacagtagttgtagctgtgttccttctcatgaagttatttgataatatgtactatgcttgccgttgttgattttctacatgtcagttagctatgttaaggtaacagactttttagtttgtcatctcatttgtaataaacgaatatcaggcccttgattgccctctaaattgattagctgtgcattgttcattttggttgataagtattggatggatggttgctgcaaaactggaaaactggaatgagatactgtgtaataaacgaatatcaggccctttattgccgtccaaaattttcagatgtgcattgttcattttggttgatgagtaatggaaggatggttgttgcaaaactggaatgagatactgaaagaagtgtactacaaaactgtaaaacttaggtgtactgaatcattttgtacatttttaaggtgtacttagccttgttgtgctactgaaatgacatgtattactggaataagtattactggaaaactggaatgagtgctctcttttgatcactccacagaatggcatgtatttcacaggagttcgagtaaaaacagcacaatggtgctagtagacaaacaataaacaatgtatgctctgttcacagctgacagtaattaagacaaaagctccattcaatgatatacatgctttgttctccagcaaaagcttgtgcttttcacacaaattcattacaagaaccatgacagattgaattgttcattaaaaaaaactagaccacacaatataatcctctgtccaacaatacaacttcccaaacaaggcagattcaacttccaccagtgcaaagaaacacttcaaactccagattcaacttccaccagtgcaaagaaacacttcatacttctcatacatcttcttctactttgctgaaaataaaatcacagatcaaattagtaatatatagagagagtttacataaattgacatattcaaaataatcatattatatttcaccttaggaaaattggacaggttcgaacagtgtgcccatggccacgacaataaccacaacgcctaacacgcttctccatgaatcctcgtagtcttttttgttggagctcctttaggcacaatttccataggatcatggaccttatcatgactctcaatgtctgtacgtgaactttgagctagcacatgaccacataaagtcaaatctgagttgtttgtctcacattcatcagtttctaagtctaatttttctagcatctccatcaccattaaagtagtttccttagacaccgaacacttgaaaaacacttctgtgcccatgctacgcagcctgcgatatctctccatctggtctgaccatgtatatacttcgccatacctatcagaaggaaacatgtgtttcgctttaattgtccacctacgcactatgcatgcttcaggaatggcatcgagcttcaaatgatgcataattgcaaccatatgctcacatgggaggcattcacgatccatttttctgcatgtgcaatttatgctcttcattgttgattccatatatgtacaattcaagatttgtagcatctcagaatcacctttcatggaaataacatacttaaccaagttgtcctcttctacacaatctatcacctcccaatccatcgacttagcaataaccaacttcaacttcttaaaaactgcaggtgcaaatatacgggcagcatctttctcagtaagactagcatcattagaagtgaaagggattgattgtgaagctttacaatctagatcagcctccctatacctcatacgtgataagcaatgctcataatactctaccaaaaggacaaggctcattttacgatccaaatacctatgaagtttagaattcagactttcactacgttggttgcttttcatcccaagaaaaaacaaacctttagtgtacgcagtagcccatttcttcctcaaattgtacatcctcgcaagccattggttgtcttcacaacctttatgcttcaccttaaactcgacccactttctctcaaactcttcatgatcatatggtgcgtggacaagtgctcgaaaatctgaaagcatatcaggacgaagatgtcttgccatgttctgctcaatgtgccaagtgcacaaccgatgctcagaatccggcatcacagctgctattgctctatgcatggcattgtccccatctgtgatcaatcctctaggatgcttctgatacatgcaatctagaaactgcttaagaatccattcataagttgcaaccttctcatcagctacgatagcacatccaaaaataccagtggaaccatggtggttcacaccacgaataggataaaaggtaagttatacctattcacccggtatgtgctatcaaaaactacaacatccccaaatgcatcataatcgatacgggattgagggtctgaccaaaataaccgtttcaaacgaccagcttcatccgtctcatactcaaaaaagaactccatgtcatgtttttgcctccattgaaaatactttataacacgctttgcatccccacctaaaatatgtttcttccttagcctagtaaaata

SEQ ID NO: 7252 - DNA, 40718 bp, Oryza sativa
taaatatcttttcccgctatttcgaaattctttttaaacccggttagggttaagaaccgggactaaagattataccactgcatatgattttcgcttacatatgtgtttataaaatagaagttaatgcattaacattatttaaagtacaaagattgatgacaattacttcgaaaaattatttttgtctgtaataaattaagtggataaatcgtaataagcaaatatatgacttataattaataaaaattccaatatatatatattcttagcatatatatgaatgatattattatattggtaaaaactctaattaagatattaatgtacatactgcatgatttaaaattaataaaaattgtaatcatcatatgtacttagcgtaggaattatattaaattaaatactaaaaactctaattaacatatgtaaatgccacatgcatgatttaaaccttttaaaaattcgaatagtcatatataagtagcatatgaaagatagtaaattaaattgtgaaaaactctaatatatgaatgatagttttaaaaatatattaaatttaatacttttaaaaattctccagtcaattataattagcatatgaatgatagtaaattaaatgttaaaaactctaattaacatatgaaattgccacttgcgtgatttaaaacttttaaaaatcctctagtcaattataattagcatatgaatgctagtaaattaaatgttaaaaactctaattaacatacatatgaaattgccacctgtgtgatttaaaacttttaaaaattgtaagtatcacatataactaacatatacatgatttaaacttgttgacgctcttcagcgtgccatcgcaacattctagcattccccttgttcctgaacaaacgccttagccgtggtattatagggaaataccacatcaccttagcaggaattctcttctttgttagctgtcacatcctgattttcgtttcaggatttataaattatttaataaattaataatagaatttatattaaatgttcattaatttacatgtgaagttaaatgtgggaaataaaatttcctaaatataaagcatggatggatttaattttttattaaattctccatgattaagtcaactctctggaatattctcggatttttcggagctcaattcctaatttttaatcttacaaagagcatttcagtaattacccacatattaaattaatcattaaatggtctaattataattttgttaagtactttgagtgtccaagtattttcaagatttttcttggaattatttgagcataggaagtatttttcacaattcaaagatcatttcagtgattaatttaattggaaaagtatttaaaatccccttctccttttcgggccgaaataggaaaagttcagcttctatcctcggcccattctcccttcctttcggctggccttatccctcctccaaagtctgctttgtgtccctttttcaatcgggccaagaagtagaagcccagcaaaaagtctagtttgcctccctgctacagtgtcatcttcaatctccagccggctggagacagagcccgagccagccgcacagtacctgtatagccgcggttttcccctccaaatctgacctttccccttgtgtttttctaaaattagttgaggggaaatattcctcttatcctcctctatctttacctccaaaaatcggagcaaatcgttgagtatcttatccgaatcaaactcgttttcgagtttatctccaaaaccgagtttttgatttcccggatcgatttcttgcgggaggagtccgatctcttcaatccaaggctataaataggaccccctagtcctcctctttcgtttgccccctctcccgtggtctcccgtgcctcgtagcgccgccgccacgtgctccaccccgccgtcgtcgccggccgagctccatccgcgtcgcgccgtcgcctccgtcgtcgccgccggtcgccgtcaccgccgtaaggtgcgccgaggtgtggagaagcccggccgctctctccccgctgtcgccggtcaccggagccccgtcgccgccgtcgaccgaagccgtgccgccgctagacctcgtcgccggccgtcgtcgttcgtcgtttggttcgagggtgagtaccgttgggttcgtctcgtcgtcctctacgtgttcatgtcctccaaagtcgcagccgaccatccaatctccggcgaggtcgccatcttggtccggccattgatgaggtcatcatgacgtcatcatcgtttttctttttcctgtttttctaatagattaaatcttcggaaattcataactaaatcatcgtaactcggttttgagtggttcaagttgctaaattcatctaaaatcatgatctacatgtttgtttactttatatgtactgtttatttggtttttattagtctttttcttcgttttgcgtgttagcttgtcgtttccgtcgttgcgaaggttcgtgagtgcgccggaagtattcgagaagattaattgaagaccgattattgcaaggcaagtcacacagatcctaaacacaatcctttgagcatgttgatcctatatttaaattctctatttatttcaactgtgcatttattttcgaatgtcaccgggtggtgtgaacctattcctttgttatggccagtttgcattgattaccctattccttgataccttgggttattataacttgactagttgggctttatatattggttcagctagatattagttatgattgcttagccatgcttagaaacattagcacactattgggataacttatgactcactattatttaaggatggcttaatgatagttcacgatggtcaatcgtgattggttaattaattacttgccaactaaaacttgataatggtgggttgtgagcacatggttttgagagtcgtgctcatgacaattaaggaccggttcgcgagttactgttgtgaaacatttatcgtgccaaccacaagccagcgtgggcaacggctttatcttttgtatagcgtgattcattatagtgcgccagactgagaagtggcgagaagtccacgggggtcgctggggagtccatgccttgtttataaaggggtgattatgatccaggaaaggtgcgctgtaatggattatgttgtgcaaggggtattgtcacaactcctttccgaggtaccgtggtggtattgaggcacatggtgacatgatgtggggttgtgtcttgtgggtacagtggtacacctctggccagagtaaaactattcgaatagccgtgcccgcggttatgggcgggttgagcaatgtttttcgtgattagtctcacacctctcacaataattatggatgttatacttggtaataatttgcttagctcctggtttggagttagatctgtacagccgggtatggttgttcaggatggttgggcctgtgcagcatgggtgtgctgttcagtgttgattaaaatttttaattaattactctactgttttactactcttaactctttgctaaatgctgctttcgcaaatgagcctatattatgccatcctttggtatccttgtgcacttgcatatttgctgtgtggcttgttgagtatgtcatatgctcattcttgcaataatcaatcaaacctcagttgaagataaaggatccagaaggagaagacgtttggcttataccccagttgagctgcctgtgggagtggagctgaagccatcgctagaccgttaattccgctgctgttttcttttcttttgtaagtatgtaacgttattattatgatggatttgtatattaaattgtcagtttgtgtacctcggctgattcctggacgaggattttatgcacaaataagttcggaaattactagtgaatttccgggcgtgacattagctgcccgtcaacttctcctggatcgtcccgtctaatcttgtatcgtagtgctttgcaaacagggcatgcttctaggttctcatactcctcaccgcgatataggatacaatcgttcggacatgcgtgaatcttatgaacttccagtcctaacgggcagactatcttcttagcctcgtacgttgtctcgggcaatttgtttccccccggaagaatgttcttgacgagtttcaataaatcgccaaatgccttgtcactaaccccattttttgccttccattgcaacaactccagagtggtatccaactttttgtgcccctgctcgcaacctgggtacaacgaagttctgtggtcctccaacatcttgtccaatttatgggcctccttttcactttcgcagtcttccctggcgtcctgcaacatctgaccaagatcatccgcaacgtcgttaccatcagcagctatttcctcctcgcccgtttgatttccttcaaatccaacatactgagcaaagtccggaatattgtcgtcttccacttcatcttcttccatttcaacaccttgctctccgtgggatgtccaacaattatagcttggcatgaaccccgactcaaacaagtggaaatgaatagtcctggatgcagaatactccttctgattcttacacttattgcatagacaacaaataaaacccctttgcctgttagcttcggccactctcaaaaaatagtgcacgccgtcaataaactctttggaccgccggtcagcgtacatccattgccgatccatctacatgagtcaaaaaaaccgcacacaaataattattcttacaataatgacagtcatacaataattataagatatctttattcatacaaaaatcataaaatattacaccaaataattcttaaaaactatttgtaaagttttaaactaattttaatgtgttttacttcttttaatttttattttagtttgttttctattatttaatattaactttcactagagttttccttctcaactattttataaaaccttgtttagcaaatgaactaaatttctatatattctttcttccccacacacattttctctctcatcaacttacaactaaattttggagacaaaaaaagtgtgcaaaacataggtgcaaatgtagtatgacaaaaaaaacattggaggatgaagttgcaaaccttttaggcacctccgatttgtatgtaatcaccaaaataaattcaatagaaattttggcatgacctcccctcttttttgaagaaattttgaagcttgctcgggcagctggaggaggaagaagacatatatataggggtgggactttagtcccggttggtagcaccaaccggggctaaagatcaccgggatcattagtcccggttggtattaccaaccggggctaaagttaagatctttagtctcggttggtgctaaagatcccgggggggcctgacaggtcctgacagcattcgaaccgggactaaagatgatctttagtcccggttggtaacacaaaccgggactaaagatcaaatatgcccgttacccttttgaaccgggactaaagatcatctttagccccggtttttattgcatccgggactattgtggaaatcggccgaccgacgaaagatggtttctccaccagtgagagtacaaactgcatatgcagataatactgatgtacgatggattgatggctcagtactagcctacgaaggaacttatgatctagcagatgtttttcgtcctaactcaatgcaaatgttatatctggagtttaccatgcattagcctcgtacttttttttttctttccaggtgacttccaggacaaaattggtgttccatccaacgacagcgtgtaacgcaacctgcactatctgtctccatatcttgaaagaggcaaagagctgcttcttcgttccgggcattccccctgctgttcctactgaagatcacaaaagagatagccggcggtggcgatggtggtggcggaaattgagagccgcggcctgaatgcggggccggcggtggcagacaagcggaggcggcggaaaatgctcgtcaacctggtccgctgggagacgagcagtttccgcgcgtggggttcggctggcgggcgacggcgctctgctctgggtggtggcacactggagagatgaaacatctagagggaaaatggaaagagggggagaaatttgttttgttgccaaaagaaaacaaatttcttcgagtacatattatatatacagtatatcaaatggctctgatttcttcttgtcttggaaattacagcctaacttattagcttagaaggacgcgactataccgagaccggtatcacgatagggctatcgcgcgacgcgcgcatctggcgattccgcaccgcgcgcgcgccccatgccaaaaacggtaaccacctttttcccgggcccccgcgcgtgccatcgctaaaaaaggaaagcacgcgcttgcgcgcgcaagcgccgtgcgatgcacgcctcgctagctggcgtgggccccacctaaaacagcgcgatgcgcctctctccctcactccaacccatccggagacatcaatccacacacagccgccacggtggtaaaaatcagaaaaaaatcgccatcttggaagaggagaaggaggagaagcaaatccaagaaaaaatatccaagtaaagtacacatgaagttcaaattctgtcttctgtgagatccatccacaaaaaaaaactaacctagaaacttttagatcttctctgtattcttcgacaaacaaattgatatgaatctgtgctgtaattttgtgagtaattttgtgagtaatgagctgtagtcttgttttctgtcttccttcttgatttctgtcttcctttataccccaaattcacattctagtgctactcttgatttctgtcttcctttataccccaaattcactttctagtgctgctgagaaaaaaagttgtagagaaggcatgagtactggtgtttcaaaaaactcagagcaatttctaggaacatgcaacttacttccagataaacttgaattcacaatccctagtttacagtttagacagcatgaaaacatcccatctagttacctctcagtgcaatatgaacagaaaagttactttacttcccaaaataaatttgaatttgcattccctagttacataggcatgagtgctggtgttggaaatctcatagcaattttaacagaagtctcagtgcatttttaacagaaaagttacttctaacacttcaatgagttacttccaagaaacattaagttacttctcaccgtgcattaagttacttctcactgtgcattaggttctcatagcaattttaacagtctcagtgcagttttaacagaaagttacttgtaacaattcaattagttacttcctagaaacatggaagttacttccctataaacttgaatttacatttcctagttacacattttgtaccttgtgtctatatacagcatgatgcatcacctagttgcgtctcaatttcatcttgtactgcatcaaaacaaattgtgaaaaaaaaattcattaatatagccactggtcttaatttgagaaaattgcttcctagaaagcatctaaaaaagacatgctgcaaaaactaaaagttacttcttcccccctcccccccaaattactgaattacctcaatgaatgctctgtataaactaactttgttactaatagcctgaaacacatgcagcaaaaatggactttgacctcaacagtatcccggaattagtttctggtgaaaatgaacctccagtacaccatttactagttgatgatgaagacagaaatgaaacatacttccctataaatctgactgacactagcatggagattcctgctataaatttggacgacacttttgactttgaaactatgtatactactggtgatgctggaagtttacaagcacacaatgtagccaatgatgagatgcaagtatttgaagccaatgatgagatgcaaatatttgaaggcgatgatgagatgcaagtatttgaagaaatgtcagatcgtgcagacacaatgcatactagtgttgcaactggcgcaacaactgctactgccaacacaatttcaagtgaagacactggaacagatgattcagaagcacagtcagcgccatcacaggatattccgtgcagcacacaagtgccgtacctcaccttgactttcaactcagaggaggaagcaagggctcactacaacaggtacgcaaagcgcgttggattttcaatcaaaatcaacacttcaaggaagtcagccaaagatggagaacgtgacaaagtaatgtttgtttgcaacaaatgtggtccagaagaaaaaacgggtgaagcgtgccccccaaagaaaatgaaaagaagtagaacaagacaggctgcctgcaaagcaaggatgacagtgaagaggaaaggagctaggtgggaagtaattcagtttgttgaagaacacacacatcctctggttagaaagttttcactcaagaaattcctaaggtcacatagagcaataccgaaagaggaaaaagatttcatcacaatgctgcacggagttaatctctcagctggtacaattattgtcacgaccggaaataacccaacgggcgttccttacgtgcgtgtattattccttgtccaaggaggcaaggtacaccaaaagttgatacaattcagagtttaacaagcggaagcgtaaatagttaattattacatgggcagcgatggcccaacacactcaaagacaatgaaaaacagcggaagactaaggcgacgaccacaggcgcttgacggcaggcacgagctagacaccaaagccttcatcatccaggggctcctcttctgggtttgggaaaaattgagcaagactgagtacaaccaccgtactcaacaagacacacccacaagtgcagcataaatgcaaaggagtacaatggagttatagtataggggttaggttttgcaataaacagcatttaaaagactcttagttgctcaaagctaaatttaaaacacgatcctagaactatttaatattattaaacaaggccgtgaacccacacgaacctgccttaacccaaggcctacgatgattcagaccgaactggcaacccgaccctgggtctcagctcgtcccaagccaacccaggccaaccattccacattttagttattaagcaggttttaagaatttgaaacactaacttgggtacattgctaggcttgcccataaccgagggcgcggctattcgaataggttttactctgatcagaggtgtacatctttacccacaagacacgtcttcctcacgtgcaaccacgtgccacataccaccacggcatatggacggaagacatgacatagtttccaacccatcctagccatagacaagagtaccgacccaacccacctacggccggaacccccggacaggcaggcagaattgagcccctagcagcaggacaccaggcctgtgctatgacatctcgactaccgggccgcagcccgtgtagccttcatttgtcctagagatgtccatcgacccccgacttcgtccatctccatccgtgtacttttgtttataaccagactgagccacaaactaagccttacccactagacatgtggaagtacggtagtgctttgcaacagaggcccgaagaccggtccttatgtggccgaggtgctactatcaaaacaatgcaccccaagcccagcctaaaaccattttgagagttttgaatagagggggaggtgtgcatccaattccacaataatccaaccattccaatatgtccaggtgatatgaatattcccaaagtctagagttataaaaccacctaatgttgcctaattaatcagcgaagcatctacctaaattcttgctagtggaaccattaatagagtgcccactagttggggttttgtttattctagggtgaacaaggtaataataacaataacaacaataataaggtcataacaaaggtaaataggcatggctaaataaaacagtgataacgcgggaatttaaataaagcgataatgcaataatttaaatcaaagtaatttcacaaagtgggatccaatatgttcaaagaatgatgtgacttcccttgctcgctttcccaaacgtcggcttcaacctccacgaagagcggatcttccgaagctgcagcgtctacacaaccaacagaaaagaaaagggcttttactctaataaactccatataacaagcaggaacaaagcacaaaaatgggttcttgacttcttaaggaaaaattagagacttgaacggtccaattccgagttcaaatggccaagttatggccatttgaagtttatatgcactttaaatgaatatttacgaatttcttcatttaaattttaatttaaaaatagatttattgcgtcagccgggagagagggcgcgcggaccgggtccacgggagtgggacccacgcggcagtctcacggtccacggtggaccgggtgcacccggctcacaccggccggccccgtgggccccacgcgtcagccgcacccgagggcgcgggcggctgatggccgggccccatgcggcagccgctaggcgcgcccggaggcggccacatcggcacggccggcgggaggcggcgcgcccgcgcccctatggtcgccggcggcggccataggcacggcggagcggcggccgagagaggggagggaaagggggaaacgaagcggcggtccacggctcaccccgggtcgacggtgacgacggaaacggcgaccggagcggaggaaggcggcggcgcggctcgggtggacggggtcgacggcgctccggcggtcggcgagcgaaacggaggggtggacgaggtcggcgaggatgcggcgaagccgaaggaggcggcgccgaggtgggaggtagtccggggcgacgacggcggcggaccggagctcggcggcgacggcggagagagagagcgacggcgcgagctcgattccggcggggagagagggcggtgagtggcggaaacggtggtggggagctcggggagggtttatatagggttgggagtgagagagggcggccggaggagggggaaatgggcgcgggagacccggccgccattaatggcgccggcgaggttaggggagaggtttccaaacaaatccgagggagagagggagggaaaaatggggggaaagggggaggggatcccggggaataattccccccactttattgcacgcggggccggcgggaggcggcgggattcgcggcggcggcggcgctaggcgcgggcgaggcggcgggggcggcgggaggaaggggatgacgggtgggccccacccgtcagcgagggaggcgggcgggcccgcccgtcagcagcgcgcgcacggggaggaggccgagtgggccgcggggaggaggagaaagggggagggagatgggccgagccggcccattagaggggagaggtgatttttagggtttttctttttataaaatcattttaactttgtttatttcttaataattattatttgtgctctgaaaattccactaaaatttatttacacattttaggcttttaggaaatatacaaaaatcctccaagccctatttgactttcaactttgcacattttaatttttgaaggcttttaattattctaggcataatttagaggatgtattttagggtcgatttgggacgcgacaaacctacccccttaaacggaatctcgaccccgagattcggaagaactggcgaagagatctggatgggctgccttcagctcgtcttcacgctcccaagtagcttcttcctcggcatggttgctccatcggaccttgcaaaaacggattacccgattcctggtcctgcgctccatggtgtccaggattttcactggtctttccacgtaggtcaagtcttcgcgaacttcaatctgctctgagtcggcctgctcggatggcactcgaagacatttcttgagttgcgacacatgaaacacatcatgcacgttgcccaaggaggcgggcagctccaactggtaagcaacttctccgcgtcgagcaatgatgcggaaaggactcacgaaccgaggggcgagcttccctttcgcttgaaacctgtgtacaccccgcaacggcgttacccggagatacacaaagttatccactgcgaattccaggtcacggcgtcggttgtctgcataactcttctgccgagactgtgccacctttaggttttcccgaatggtcctgaccttcgctttagcttctctcaagatatcggtcccgaacacttggctttccccaacttggtcccacaatagtggtgtcctgcatttgcggccatacaacgcttcgtatggtgccatctgtatgctggcttggtagctgttattgtaggagaactcggcgtaggggagactcttatcccatgtcttcccaaaatctaggacacatgcgcaaagcataacttcgaggatctggttcagacgctcggtctgcccatctgtctgcgggtggtacgcggtgctgaaatttaatcgggttcccaactcttcctggagtttcttccagaaatgagaggtgaactggcttccccgatcagagacaattttcttaggaatgccatggagacttacgatcctagcgaagtagagttcaactagtttgttccctccataggtggtctttacgagaatgaaccgtgctaccttggttagtcgatccacgactacccatatagaatcatatccgccttgggtttttggaagtccggtgataaaatccatcccaatttcatcccatttccattctggcacttgtagaggttggaggagtccggccggtcattggtgctcgactttgacacgctggcacacatcacaaagggccacgaactctgcaatttcccgcttcatactaacccaccaatatttctctttcaagtccaagtacatcttcgtgctgccaggatggatggaatagggactttcgtgagcttcctgaagtatcaactgtttaagttccctgacgtctggaacgtgtggacccccgtttttataacaggaatcaatcgtgtaaacagtaccatttccctggatcaagtagtttggtacccacgaattcatagctggaataccaagtgcacatacacgagtgtctaatacgaattattacatcataggcccgcaggcatagtcttaaatcatcggaccgagcggtccggaatacatccaaaaacagaaatagataaggtagcggaattcaggcagcggcatgccattgccacaggcaacgaccgtactaagacctactgggcaccatcgtcttcgtctccctcctggtagtaggcatagggatcctccgtagcttcatcgcccgcttctgattaattttatatttgcaagggtgagtaccaaccgtactcaacaagccaccacagcaacaatgcatatgaaagggggagagttcaaaggatggctatagttcttttgcgcaaagcaagttttgtaattcttttcacaagcctaagacctagcattgactgatcaaattttagtaccagagtttgtatttaaacaacgacggttctgtccaccatccagtgtgatcccaaggatagtttctcgccattgattcgtcatggttttcggaggacgtccaccttcctgcctctcaggaagtggctccaacggcatagaaatcatcatgcaatatcccatcccacacaggttaagaatttagagtctagccaagtgtaatacatgtcccggtgctcaataaccgcgagcacggctattcgaatagatttggtttacttacactgcagtggatgtacactttacccgcactccacgactgcccaacatatgagcctcgtcccaacacatgagacgcgtcacggcaaagcttttcgataacctcgcattggcagtacccgctccatgaacttaaatcctcatgcactctaggcgtccatgtttctagcagtgagaggagttctggcgctcccgggacagagaagtctcacacatattaaattatggttcaagttaagttctctctctcacacactcatggcagtcctaccaatggcgacaccgatgtagggcacgcctctcggccctacctcaacggctgtcccatcgtagcgcacctgcctcactcaggggtgaaccatctatgcagggatactgcctccgctcggctatctaatccgctaggtctatactcattcgagaagtacggttgtacgggggtcgtttcatgcttaacttcatggctcggtccttaattgaccggggacggtactagcctttcccagataccacccaaatcctccgtccgccccagtcgaaaacaattgtttaattttattttttctttcacaaatcatgtcatcaacatcatggcaatgtggcgctcatgtctccacatgccgcatctcaattaccttcccaaaggtaattgcccaagcatatagcatttgataattatgagtatgcatgattctagaatagcatttctaagcatttgtcatagttgactagggactcatacgtaaacatggttacaaagatttaagggtaaacaataatcaaggcatggcataatcacaagtaggatgttcatcattgcatgcaattttatttgtaaacaaaacaatttcgcaattgggatcaacatgttcaaggaatagtgatgacttgccttgctcgaggtcccgcgggtcttgtccttcacctggatccgcggctccctcggtctctatagttacgtgcgaaaattgatttgaattcggttagaattcaaataaaaatccaagtaaatccaaatggaagtcgaatgcgaaagtcgattcttttatattaactttactattcgcgaactagggcaaaccccatttcaatttaaactattttgcgagtataaatattttgttgtcatgagtttttaatttaacctacccgagcaacatatcaattaataggttagaaatttctatcgcgagctaaacatcggacgaaatcctagaatattatacgacttaatttagtctatgattaaatataatacacggctaacatcctagtaattaaatccgaatcgctaccgttaatcgattacttatagagattacccagaaataatccataataatttacgagaattcatacatttgtttaattattaattacatctaaattaataccgcgaattgattccttatggagagtaataaaataatctataatctataggaattcatccaattatattttcattaatcctatatttaaaagccagtgttttaggtatttaattagtaagatttcatctaactatattttcattaatcctataattaaattctaatatttgcaaatattttaaatttcccccaaaatttttcctttttcttttccctctctctctctctttatttttttcttctcttttctttcctttcctttttcctctcctctcttttcttttcctcttttcttttcttttcattctctcctctcttttcttttcctcttttcttttcttttctttcttttctttcttttctccccctctctctcttttcttttcttcttcctcctcctggctcctttctctcttcccttctcttctctcggaactctctctctccctacccgtggcggcggtgacgacagcacgcacggaggaggggggggggggggcggcggcttaccgacggcggcgggggcgacggcggcgcaaggcggcaacgcacggcgcggtggctccggggcggcggcgcggcggcacgatggcggcggcgcggcggcacgatggcggcggtgcgtggagaaggaggaaagggagggggaaatggaggggatgggtgtgggatggagaagggaagggccgggttttataagggcacggggaaggggcggccggcctaatggcgacgcgacgggcggcacggttggcggtgatggcgacgagcgggcggcgcggcgcggggctcggcgcgactcggcacggggctcggcgcggcgacgagacgggcgagcggcgcggcagcggaacggcgatggggacggcgcggcagcggcggcgcgcggctcggagcgacgatgggacgcgcgcggcgacgggatgggcggtgacggggcggcagcggtggcgcgcggcacgaggagggatgcgatggtgacggcgacagcgcggcagcggcggcacggggcgcaaggcgacgcgacgggcggcagcggcgacgcgacagcgggcggcacggcgcggggtgcgatgacgcgataacaacggcgacggcgacgcggcagcgacggcgatggcgcgcggcgggacgaggcgcgaggcgcgacggggacggccgagcggcgcgcggcgcggcaggcgacagcggcacggcggcaggcggcgacggcgacggctcggggcgcgaggcgcgcatggcagggaaggggaaggggctaggggacacggtcgagcacgtggcggccgatgaacagtgcactttcctatttttctcattttagtctattacttttataaatttgattccacaattcctaatttttgcataaatgaagtttactccatatttgtgttatcctaactaaaaaaattcaccctaatttaatatcactcatattttgtttatataatttatttaaatttttaattagggttaattctcatttcatcatactaaaatttaattattgctaatatggttgcgataatattttatttattttccaatcccacctaatctttattttaatttatattttaattatttatttagccaacttgatttttagggtttattcctagttagttattcattattcgcgattaataaattccgagatcaaaatccaatgaaacaggcgaataaaatcatgatgcaatttattacttaaaatgttttgaaactccgtatttttggtgttttgattttgttggtcgaattttcagggtgttacagaacgcatacccgattcccgttccatagggttccgtgttcatcctctgtgaaaccagcggctttaccctgtttcatgttcttgaggagcccatgcatatccggatcattcttctgagcctcgcggatttgatcgagcaaggtaggcttggcttccaacgtagccaagaatccacgaccaactatgcttaggttcagggcttccaactgttgattaagttccggtggaatgccacggacgccaagagtgttgcaatggctttttcgacttagagcgtcggcgactacgttggccttgccaagatgatagtggatccccacatcataatccttgatgagttctaaccatctcctctgccgaagattcagatccgactgagtgaagatgtatttcaaactcttatgatcagtatatatttcacagcgattcccaatgagatagtgccgccagatctttaaagcatgaaccacagcggtcaattccaaatcatgggtagggtagttgccttcatgaggccgtagctggcgtgaggcataggctaccacatgaccttcctgcattaatacgcaccccaatccttggcgcgaagcgtcacagtacaccaggaagtccttgcgagtatccggtaagattaacactggcgaggaaaccagcttttctttgagagtttggaatgctttctcacactgcggactccacacaaatttttcttctttcttcaacaactgtgtcatgggtcgagcgattttggagaagttctcgatgaacctccgatagtacccggccaaacccaaaaagctgcggacttgagtgatcgtcttgggttgcttccaatcggtgacggcggtcaccgtttcggggtccacagcaactcctttagcagatatcacgtgccctaagaacttgacttcggacaaccagaactcacacttgctaagcttggcatacagttgatgttcccgcagctttcccaacaccagacggagatgctgctaatggtcttcctctgattgtgagtacaccaggatgtcgtcgatgaagaccacaacaaacttatccaagtattccatgaacactttgttcattaagttcatgaagaaggcaggagcattggtcagaccgaacgacatcaccgtgaattcatacagcccatatcgcgtggtgaatgcggtcttcgggatatcttcttcacgaatacgcaattggtgatatccggagcgaagatcgattttagaaaagatggtggcacctttgagctggtcgaacagatcatcgatccgaggaagagggtacttgttttcgatagtgacttcattgagagctctgtagtcaacacacatcctcttcgtcttatccttcttctccacaaaaatcacgggagcaccctagggggaagtgctcggccgtatataccccttttccttcagctcttccaattgcttcttgacttcggcaagttcatttgctgccatacggtagggccgtttgtacagaggagttgttcttggagcaagatctatccggaactcgatctcccgcttgggcggcataccgggtagttcttccggaaacacgtcaccgaactcactgacgatggggatttctgacaatcctatctgatgaagttctgaactgccaacagaggttgggggtgcaaagaacacaactggttgttccggccctcggtacagagtgacagtgcgccttgcgcaatccactaccccttggaattgagccaaccaattcatcccaaggatcacatccaagttcttggtgtccagaagaatcaaatccgaggggaaagggattccctggatttctataggaacggccgggctgtaatactttgctgtcatatcccctccaggggtggtgatgagcagagggttcctaagccgttctacccccagttgatttcttcccacgaaaggcacagatataaacgagtgggaagctccagagtcgaacaaaatggtagcaggaatggaatgaatgaggaacgtaccaacgatgacgtccggagttgtcagcacatcctcggcagtcacgtggttcacacgaccccgagcgacgtccttaccaccgttgttggggcggggaggcgcttggccttgctggcaccgcggcttcgggcatttgtccgcaaagtgtccgggctcgaagcagttgcagcacagacgctgctgtccttgagcgtctctgcggccttgaccaggctgcacagctggcgcaggaggacggggtgcacgggtcccttgctgaccctgctgttgctgcggctgtgggacgcgcaccacgaattggggtcggggcgcggagcgaggttgctgctgctgctgctgcgaggaggattgtcacgccctgaaaattttaaaatttataaattgttgtttaaatggaatttctagaaataatttaaagtcttgaagagaagatcttgttttaattaataaattccaatataaaatggggccagataaaatttcattaaatactttgcttaattctataattcctagatttttctgggatttatttgagctaaggaagtatttttaataaatggaattgcatttaagaaataatttaaattgaaaaaggttttaaaaagtctcttttggctttgggccgaaagtcggcccaaatctcttctctctctcctcggcccagccggcccagtccgccgcgcgcgcgcgccctcgctgtcgctgacaggtgggtcccgcctgtcaggtccttcatccttctccggccgccgccgccgaaaccctagtttcgcgccgccgccgtttcctttccaaatccggccgttcctttccttctccggccgaattgaaagaggggaaatgatccttgggatctcctctaccttttctcctttggaatctttggctaaatcgttttggaaagagttggattcgagttcgtctcggatttgttcttcccgagctttccttcgccgttgccgtcgccgtgggccttcgccgccgcctccgagcccctttaaaaggacccccggtgtctcctctacccgtcgccaccttcgctttcgcctctcgtcgtcggaagagctctagcgccgtgtgccctagcttcgccgtcgccgccgccgctccagccgtgcgccgccgtcgtttcagccgtcgccgtcgctcgggaagaccaccgtcgtgctcgccaagtcgtcgccgtcctcgttcgccccttcgccgtcgccggagatcaccggagcagcttcgccgtcgtcgacccgaaggttcccgccgcttcctccttgtcgccgtcgccgtccgttggtcttccgccgccgtttaggtcaccggtgagttcgccgtgttgtcctctacatcttggtgccctccgtttgcgtcctagcgccgccgtttgccggtgagtgtgcgccgcccgagccgtccgctccgccgagccgctgccgctgtcggtgacgtcaccgctgacgtcatcggggtcgtccgccgtgagccggtcgtggaccgatcgatctcggccgtccgttttggattggatcgatctcggccgtccgttcgcgtgaaccgtcgcccgtgcgcccggtccaccaaaccctagcccgctgacgcaataattctcttttccttttcaaaaataattcattattgcgtcataattcaatttaaaccgatataagtgttttaatccgatttaatctttaaaaattcataactaattcatcttagctccgatttagttggttcaagtctctaaatttttctaaaattgagatctacacattaaaaatatccacatgtactgttcatgcttgtttatgtgctgttttggtgattttgctcttttctgcttagattccgtcgtttccggagagtccgttttcgcagaagaagagtttgaagagttccaaggccagcaaggcaagtcacacagatcccaaacaaccctttgagcatgttgatcctatttaaagctattgtttctattcaactattgcatctattttcgaatgtcattgggtggaattgacctattctttgttatggccctttcgtacttgattaccttattccttgataccttgggttattacaatttgactagttgagctttatttatattggttcaactagatattagatataattgcttagccctgcttagaaacattagtacacattcgggataactaatgactcactattatttaatgatggtttcatgatagttcacgatggtcaatcgtgattagttaattaattaatgtgccaactaaaacctggtaatggtgggttgtgagcacatggttttgttggtcgtgctcatgacaattaaggaccggttcacgagtttcggttgtgaaacattaaccgtgccaaccacaagccagcatgggcaacggctttatcttttgtatagcatggttcattgcggggcaccagactgagaagtggcggagataagcccacgggggtcgctggggagtccatgccttgtttataagggggtgattatgatctaggaaggtgcgctgcggtggattgtgttatgcgaggggtattgtcacaactcctttccgagataccgtggtggtattgaggcacatggtgacatgatgtggggttgtgtcttgtgggtacagtggtacacctctgatcagagtaaaactattcgaatagccgtgcccgcggttatgggcgggtctaacaatgtctttcgtgattagtctcacacctctcatcattgtaaaagatgcttaaactggtaataatttgattagctcctggtttggaatggtacattcctggtttggagatagaactgtgcagccgggatggttgttcagaatggttgggcctatacaacagggtatgttgtatagcgttggattaatattgtttaattacttaactgttttattaaattctcaaatgtttgctaaatgctgcttttgcaaatgaaaccctattatgccatcctttgttatcctgtgcacttgcatatttgctgcgtggcttgctgagtatgtcatatactcaccttgcaatcattcatcagaggaagagttctacaatgaggctgatggtgtggaggattaggtgtagccttggtcaagctgcctgtggagtggagccgtctgcgccgtttatttattttccgctgcttagatctttattgattgagaggaactatctacctctgtaatgacattttattcgcttattaattagagtaatatttgtactctattatcaatttgttattgtgtgcctcggctgattcctggacgagggttcacacacatgtaagcgtttggaattttggatagaaattccgggcgtgacaagttggtatcagagctcccttgaccctaggttatgccaaatggttatccatagaagccctctaaaaatattggaaaagtagaactgttctcctccctttctcttttaattaaaccaaactaatggcacatgcatttcataatctcttttaatggttctcattcaaaatttattccagtgttattagtactgtacatctattactgtactaatggctcatttaccagcaaaagttttacaatactgttttatttaatcttgctgcaataaaataaatttagcatgttgattttataattttctttcatttcttttgaaaccagttattcaaaattacaaaatttgtgacctcgtttccaactgttttaacttatctcgcaagcttggtttactttatttacttacctttttactttgattttcaaactttattcaaattaatccaaaaacttgtgctattaattggatagatgtcttaactccctcctttcacctgtctttagatgccgcgttacaagcctgagtacctgtttggtgttgagggttttgtccaggagttgcgtacgatgtcctttgtcattggatttggaactgcccctttttatgcccagattgctcatgatcgtcatgaagagaagtgccgagtcaaagtcaccttgaacagtaatagtgaagatatcccctcagtgatgtttgaagctggaggaagaaactacatccatgcatgtcaggaggtggcaaggatcgccataggagagctccgtgatcgctacagtgatcaattggccgacactgagtatcgctaccatcctcgccaaccacagggaagtgaccgtggcagttaccttgagactgaaggaattgagaatgatgttaccacaaagcatttggttgagatgttgtgggctatggatgaaagtcgtgcggagactgtgttagcagcccaagatcgtgaagattggaatcgtggtaagatttgcaagttagaagacaaggtggatcgtttggagaaggaattagccgcattaaagggagaagcaccgccgcagaaggccaggattcgtcttaccgcaaggaagagagctctatttgttcctcgctatcaattggcgccaaaggttcgtgtggtggagaaagaagttgccccagctcaagcggatcctccggtcatcatcataagtagtgatgaagaagaagaatccaagcgcaacaattccaagattgagtgggtagcaacccaagttgataaagacgagccttcaatcgacctccgatgcttggaagaactagagtgacttgttaagccgttgtcttagatcgatgtgttagtttgcttgttttaagtttgcttgtgtgtgtgggtcttgcatgtgatttacatcagtggtgggatgtaagtgcatgcgtttgtttgcttttgagagttaggaagttggtgagtttagtggtgtgagagtctttagtttgtaataataaaactcagttaagatcaataaaagttaaagtaattctctatcttaagtagtttcccccggtttctcttcttgtgccctgcccatgccaaatggtgaacactcacagcaatgggaatggtcccaacaaccccaataacaacaacaatggagagaatcccactcttgctcaagttcttgctcaacagacacagcttatgaacatgatgatgcagcaatttcagaatcagcaaaaccaaggaaataatcatgcacctccccagaacaagttagcagaatttcttcgtgtgaggccgcctgttttctctagtaccactaatcctgttgaagctagtgattggctgcatgccatagagaagaagttggatttgcttcagtgtactgatcaggagaaggtctcatttgcatcacatcagttgcatggccctgcctctgaatggtgggatcatttccgccttaacaggactactgctgaacctatcacttggcttgaattcaccgctgctttccggaagacgcatataccatcaggagtagtgtctctcaagaagaaggagttcaggtcgcttacccagggatctcgctctgttacggagtatctgcacgagttcaatcgtcttgctcgttatgctccggaagatgtgcgcaatgatgaagagcgccaggagaagtttttgggaggacttaatgatgagctttcttacccactcatggttggagattatcctgatttccagaaattagtggataaggctatacgtcaggaggacaagtacaatcacatggagcagaagaaacgtcggattgctcacttcaaggcacaacagggaaataatcagaagccgcgtcttactttaggaccccagtccatgccacagggaggttcttcgtctgttgttcgtccgcagcgtcagttcttcaacaacaatgctggcaacaacatccgtaatcaagctccacgtcctgttgcagctccagcacagcaacaacctgccaagagagagcaaggcagcaagcccgtggtgtgtttcaactgtggagacccaggacattatgctgacaagtgtccgaagccccgacgcgtgaaggttgtccctgcccagaataactctgctgtaccagcatccaaggctcgtgtaaatcatgtcgctgctgcagaagctcaagatgctccagatgtgattttccttgttaactcagttcctgcaacagtacttttcgattctggtgctacacattcattcttatctatgagttttgcgggaaatcatgggatggaagtagaagatcttagacgtcctttgatggttaataccccaagtgatcaagcactttctttgcaacgtagcccctcggtcagaatagaaattaagggagtaccatttctggccaatcttatcttgttagaatccaaagaccttgatgtcatcctagggatggactggttagccagacataaaggtgtgatagactgtgccaacagaaaagtaactctcaccagcaatgatggtcgagttgtgactgttcatgcattgtcatctgagtctttaaggtcaagactgaaccagataactttggaagagattcctatagttcgggagtattccgatgtgttcccagatgatttacctggtatgccgcctaaaagggatatagagtttagaatagatttggtacctggaacgactccgatccataagagaccttatcgaatggcagccaatgagttggcagaagttaagaggcaagtagatgatttgcttcagaagggatacatcagacctagttcatctccatggggagctccggttatttttgtggaaaagaaagaccatacccagagaatgtgtgtggactatcgtgcattaaacgatgtgactatcaagaataagtatccgctacccagaattgatgatttgtttgatcagcttaaaggtgccactgttttctccaagatagatcttcgatcaggatatcaccagttgagaattaaagaggaagatatacctaagacagcttttaccactaggtatgggttgttcgaatgtactgttatgtcttttggacttaccaatgcccctgctttcttcatgaacttgatgaataaggtgtttatggaatacctagacaagttcgtggtggtctttattgatgatattcttatctactctcgaaccaaagaagagcatgaggaacatcttcgccttgcattggagaagctacgagaacatcaactgtatgccaagtttagcaagtgtgaattttggttgtctgaagtgaaattccttggtcacgtcatctcagcaggaggagttgccgtcgatcctagtaatgtggaatccgtaaccaattggaagcaaccaaagacagtttcagagattcgcagtttcttaggcctcgcaggatattatcggaggtttatagagaatttttccaagattgctaagcccatgacacgattgcttcagaaacatgtgaagtacaagtggtcagaagaatgtgagcagagttttcaagagttgaagaatcgcttaatatcagctcctattttgattttgcctgatccaaagaagggtttccaagtgtattgtgatgcatccaaacttgggttaggttgtgttttgatgcaagaagggaaggtggttgcctatgcatctcgtcagttacgtccgcatgagaagaactaccctactcatgatcttgagttagctgcagtagttcatgcattgaagatttggcgtcattatcttttcggtactcgtacagaagtgtacaccgatcacaagagtttaaagtatatctttactcagccagatctgaacatgagacaacggagatggttggaattaattaaggattatgacatgggaattcattatcacccgggaaaggctaatgttgtagcagatgctcttagcaggaaaagttattgcaatgctacagaaggacgacagttgccattggaattatgcaaggaatttgaaagattaaatttgggaattgtcagtagaggtttcgttgcagccttagaagcgaagcccactctaattgatcaagtaagagaagcccaaattaatgatcctgatattcaagagatcaagaagaatatgagaagaggaaaagctatcggtttcttggaggatgagcaaggaactgtatggttaggtgaaagaatctgtgtccccgacaacaaagatttaaaggatgcaattctgaaagaagctcatgatactttatactccattcaccctggtagtactaagatgtaccaggatctcaaggaaagattttggtgggcaagtatgaagcgtgaaatcgcagaatacgtagcagtatgtgatgtttgtcagcgagtcaaggcagaacatcagaaacctgccggtttgttgcagcctttgaagattcctgaatggaaatgggaagaaatcggtatggattttatcactggtttacccagaacgtcatcaggccatgactctatttgggtgatagtcgacagacttaccaaagtggctcatttcattccggtaaagacaacctattctggaagtcgattggcggaattgtatatggcaaggattgtgtgtttgcatggcgtccctaagaagatagtgtctgatcgaggcagtcagtttacttcaaatttttggaagaaacttcaggaagagatgggttctaagctgaactttagcactgcttatcatccgcagacagacggacaaaccgaaagggtgaatcagattttggaagacatgttgagagcttgtgctttagacttcggtggaagttgggataagaatctaccctatgcagaattttcgtacaacaacagttatcaagctagtctacagatggctccttacgaagcgctgtatggtcggaagtgccgcactccgcttttgtgggatcaaacgggagaacgtcaggtttttgggacggatatcctaagggaagcagaagaaaaggtaaagatcattcaagaaagattgcgagtggctcagtctcgacataagagttatgccgacaatcgccgtagagatttgagttttgaagaaggagactatgtgtatcttcgtgtcacgcctcttcgaggagttcatcgttttcacaccaaaggaaaattggcaccgcgttttgtgggaccttataagattgtcagtagaagaggagaggtcgcttatcagttggagttacctcaatctttggcaggagtccataatgtgttccatgtttcgcaattgaaaaagtgtttaagggtacctaccgaagaagctaatcttgatcagatagaagtccaagaggatctgacctatgttgagaaaccaatccgtatcttggaaacaaatgagagaagaaccaggaatcgagttatccgtttttgcaaagtccaatggagtaatcactcggaagaagagtccacttgggaacgagaagatgaattgaagtcagctcatccgcatctgttcgccagttcttccgaatctcgaggacgagattctgtttaaggggggtaggtttgtcacaccctgaaaattttaaaatttataaattgttgtttaaatggaatttctagaaataatttaaagtcttgaagagaagatcttgttttaattaataaattccaatataaaatggggccagataaaatttcattaaatactttgcttaattctataattcctagatttttctgggatttatttgagctaaggaagtatttttaataaatggaattgcatttaagaaataatttaaattgaaaaaggttttaaaaagtctcttttggctttgggccgaaagtcggcccaaatctcttctctctctcctcggcccagccggcccagtccgccgcgcgcgcgcgccctcgctgtcgctgacaggtgggtcccgcctgtcaggtccttcatccttctccggccgccgccgccgaaaccctagtttcgcgccgccgccgtttcctttccaaatccggccgttcctttccttctccggccgaattgaaagaggggaaatgatccttgggatctcctctaccttttctcctttggaatctttggctaaatcgttttggaaagagttggattcgagttcgtctcggatttgttcttcccgagctttccttcgccgttgccgtcgctgtgggccttcgccgccgcctccgagcccctttaaaaggacccccggtgtctcctctacccgtcgccaccttcgctttcgcctctcgtcgtcggaagagctctagcgccgtgtgccctagcttcgccgtcgccgccgccgctccagccgtgcgccgccgtcgtttcagccgtcgccgtcgctcgggaagaccaccgtcgtgctcgccaagtcgtcgccgtcctcgttcgccccttcgccgtcgccggagatcaccggagcagcttcgccgtcgtcgacccgaaggttcccgccgcttcctccttgtcgccgtcgccgtccgttggtcttccgccgccgtttaggtcaccggtgagttcgccgtgttgtcctctacatcttggtgccctccgtttgcgtcctagcgccgccgtttgccggtgagtgtgcgccgcccgagccgtccgctccgccgagccgctgccgctgtcggtgacgtcaccgctgacgtcatcggggtcgtccgccgtgagccggtcgtggaccgatcgatctcggccgtccgttttggattggatcgatctcggccgtccgttcgcgtgaaccgtcgcccgtgcgcccggtccaccaaaccctagcccgctgacgcaataattctcttttccttttcaaaaataattcattattgcgtcataattcaatttaaaccgatataagtgttttaatccgatttaatctttaaaaattcataactaattcatcttagctccgatttagttggttcaagtctctaaatttttctaaaattgagatctacacattaaaaatatccacatgtactgttcatgcttgtttatgtgctgttttggtgattttgctcttttctgcttagattccgtcgtttccggagagtccgttttcgcagaagaagagtttgaagagttccaaggccagcaaggcaagtcacacagatcccaaacaaccctttgagcatgttgatcctatttaaagctattgtttctattcaactattgcatctattttcgaatgtcattgggtggaattgacctattctttgttatggccctttcgtacttgattaccttattccttgataccttgggttattacaatttgactagttgagctttatttatattggttcaactagatattagatataattgcttagccctgcttagaaacattagtacacattcgggataactaatgactcactattatttaatgatggtttcatgatagttcacgatggtcaatcgtgattagttaattaattaatgtgccaactaaaacctggtaatggtgggttgtgagcacatggttttgttggtcgtgctcatgacaattaaggaccggttcacgagtttcggttgtgaaacattaaccgtgccaaccacaagccagcatgggcaacggctttatcttttgtatagcatggttcattgcggggcaccagactgagaagtggcggagataagcccacgggggtcgctggggagtccatgccttgtttataagggggtgattatgatctaggaaggtgcgctgcggtggattgtgttatgcgaggggtattgtcacaactcctttccgagataccgtggtggtattgaggcacatggtgacatgatgtggggttgtgtcttgtgggtacagtggtacacctctgatcagagtaaaactattcgaatagccgtgcccgcggttatgggcgggtctaacaatgtctttcgtgattagtctcacacctctcatcattgtaaaagatgcttaaactggtaataatttgattagctcctggtttggaatggtacattcctggtttggagatagaactgtgcagccgggatggttgttcagaatggttgggcctatacaacagggtatgttgtatagcgttggattaatattgtttaattacttaactgttttattaaattctcaaatgtttgctaaatgctgcttttgcaaatgaaaccctattatgccatcctttgttatcctgtgcacttgcatatttgctgcgtggcttgctgagtatgtcatatactcaccttgcaatcattcatcagaggaagagttctacaatgaggctgatggtgtggaggattaggtgtagccttggtcaagctgcctgtggagtggagccgtctgcgccgtttatttattttccgctgcttagatctttattgattgagaggaactatctacctctgtaatgacattttattcgcttattaattagagtaatatttgtactctattatcaatttgttattgtgtgcctcggctgattcctggacgagggttcacacacatgtaagcgtttggaattttggatagaaattccgggcgtgacaaggatccccctggatagggattggtgtagcggaccctttggttagccccctgttgattgaggaaattcgccaagtgacgcttgtgcgactccagttccttgtgcttggcttccaagcggatgctcttgtccaccagacgctggaaatccggataatccccggagaccagacgcacagatagctcagggtccattcctgccaagaacttctcctgcttttcctcatcttcccgaacatcctccggggcgtaccgggccaggttgttgaactcatgcaaatactccatcacagagcggttgccttgcttcaactcccggaattcccttttcttaagggccatgactctggcaggcacatgggtcctccggaaagcggcggtgaagcgggcccaggtaataggctgcccctcgggctgcgtagcctggaagtggtcccaccatagagatgcgggcccctgcagctggtgggtggcaaagatgactttctcctcatcgttgcactgcacggtgtctaacttcttccccacggcatgcaaccaatccaaggcatccacggggttattggagctagagaaggtaggcgggcggatgcgaaggaactcggcgagcttagaatgctgcgggggtggtggtggaggtggagcattatgctgtggtggattttggatgtggtggaggaaagcagccatcatgttggcctgctgggcgaggatttgagtgaggatggggttggtgtctggtggtggtggtggtggcgggggaggaggtagaggtgggccaccttggatgttggggttgctaccttcgggttggttgccatcaccagtagcagcagttctcctggttgtcaccatctgaaataccccaaaacaaaccagccaacagagagaacagactattaaaactaaccacccacgactaccaaaattattgaacttattactgatataaaatgggttcattaaggttcaggatgcttaagccaataaaataaagacaggctccgacacaatcataccacacaccggtacaaccatgccccacacgacttcaacaggaagacaaacgagaaagaacacactcgcaagcctactaactgctcgtctacttctgcgacgggccagggcggaaggtgagcagcagcgcatcctccgtgctaccaatgccggaggtttccccctcctgaggaaccacgggcgcgggctcggcacgaggggtctccacgaagcaggtccacgccagggactaacgaacaagctcaggcctggaggtgctcttgcgggcagtgatcttctggctgcggcagacgcggcggcgcttgggacggcagacctctccctgggcgaccttgagctgacacagctgcgcctccagcgcgtctaggtccttcttcagctgcagattctcctgacgcagctccaggatcttcatgttgttctcgaccatcccacggcgcaccatatgatggaagtcgatacgggccgcgtcgtacgcctccaccatgcgcgccaggtgcatgatggtagcgtcatcctccgagctagcatcccggaaggtggcgtagtcgcgggctcctccgcgacgagggtggtagcggtagggcgagtgctgcaactcgtccgggtagcgctggtgaagagtgccgatggcgaggagtgcggcgttctggcaagcagcggagaaggaatctcctcccgtggtgactgccaacgaagtcctctcgggagagccagtgaggatcactgcagtgacctcccaagcagcatgcgactctgcatcgtcaccctcctgctccgggagctgcttgccttggtagtccactccatgcggataccccaggacaacgcacatgccccgcagctccagaacaaagccggtcaggtccaggccacgacggttgatgctgccggccatctacaagcaaggacaaaaaagagagaaaatattttagagatcagcttttgatgacaaatgaagcagcaagacagagagagactaaaggattttcacaaataagagaggatttttatttcgaaaatattgctaaggcttgggatctaaggctcgtcctagggtcaaggaggctctgataccaacttgtcacgaccggaaataacccaacgggcgttccttacgtgcgtgtattattccttgtcccaggaggcaaggtacaccaaaagttgatacaattcagagtttaacaagcggaagcgtaaatagttaattattacatgggcagcgacggcccaacacactcaaagacaacgaaaaacagcggaagactaaggcgacgaccacaggcgcttgacggcaggcacgagctagacaccaaagccttcatcatccaggggctcctcttctgggtttgggaaaaattgagcaagactgagtacaaccaccgtactcaacaagacacacccacaagtgcagcataaatgcaaaggagtacaatggagttatagtataggggttaggttttgcaataaacagcatttaaaagactcttagttgctcaaagctaaatttaaaacacgatcctagaactatttaatattattaaacaaggccgtgaacccacacgaacctgccttaacccaaggcctacgatgattcagaccgaactggcaacccgaccctgggtcccagctcgtcccaagccaacccaggccaaccattccacattttagttattaagcaggttttaagaatttgaaacactaacttgggtacattgctaggcttgcccataaccgagggcgcggctattcgaataggttttactctgatcagaggtgtacatctttacccacaagacacgtcttcctcacgtgcaaccacgtgccacataccaccacggcatatggacggaagacatgacatagtttccaacccatcctagccatagacaagagtaccgacccaacccacctacggccagaacccccggacaggcaggcagaattgagcccctagcagcaggacaccagccctgtgctatgacatctcgactaccgggccgcagcccgtgtagccttcatttgtcctagagatgtccatcgacccccgacttcgtccatctccatccgtgtacttttgtttataaccagactgagccacaaactaagccttacccactagacatgtggaagtacggtagtgctttgcaacagaggcccgaagaccggtccttatgtggccgaggggctactatcaaaaccatgcaccccaagcccagcctaaaaccattttgagagttttgaatagagggggaggtgtgcatccaattccacaataatccaaccattccaatatgtccaggtgatatgaatattcccaaagtctagagttataaaaccacctaatgttgcctaattaatcagcgaagcatctacctaaattcttgctagtggaaccatgaatagagtgcccactagttggggttttgtttattctagggtgaacaaggtaataataacaataacaacaataataaggtcataacaaaggtaaataggcatggctaaataaaacagtgataacgcgggaatttaaataaagcgataatgcaataatttaaatcaaagtaatttcacaaagtgggatccaatatgttcaaagaatgatgtgacttccctttctcgctttcccaaacgtcggcttcaacctccacgaagagcggatcttccaaagctgcagcgtctacacaaccaacagaaaagaaaagggcttttactctaataaactccatataacaagcaggaacaaagcacaaaaatgggttcttgacttcttaaggaaaaattagagacttgaacggtccaattccgagttcaaatggccaagttatggccatttgaagtttatatgctctttaaatgaatatttacgaatttcttcatttaaattttaatttaaaaatagatttattgcgtcagccgggagagagggcgcgcggaccgggtccacgggagtgggacccacgcggcagtctcacggtccacggtggaccgggtgcacccggctcacaccggccggccccgtgggccccacgcgtcagccgcacccgagggcgcgggcggctgatggccgggccccatgcggcagccgctaggcgcgcccggaggcggccacatcggcacggccggcgggaggcggcgcgcccgcgcccctatggtcgctggcggcggccataggcacggcggagcggcggccgagagaggggagggaaagggggaaacgaagcggcggtccacggctcaccccgggtcgacggcgacgacggaacgggcgaccggagcggaggaaggcggcggcgcggctcgggtggacggggtcgacggcgctccggcggtcggcgagcgaaacggaggggtggacgaggtcggcgaggatgcggcgaagccgaaggaggcggcgccgaggtgggaggtagtccggggcgacgacggcggcggaccggagctcggcggcgacggcggagagagagagcgacggcgcgagctcgattccggcggggagagagggcggtgagtggcggaaacggtggtggggagctcggggagggtttatatagggttgggagtgagagagggcggccggaggagggggaaatgggcgcgggagacccggccgccattaatggcgccggcgaggttaggggagaggtttccaaacaaatccgagggagagagggagggaaaaatggggggaaagggggaggggatcccggggaataattccccccactttattgcacgcggggccggcgggaggcggcgggattcgcggcggcggcggcgctaggcgcgggcgaggcggcgggggcggcgggaggaaggggatgacgggtgggccccacccgtcagcgagggaggcgggcgggcccgcccgtcagcagcgcgcgcacggggaggaggccgagtgggccgcggggaggaggagaaagggggagggagatgggccgagccggcccattagaggggagaggtgatttttagggtttttctttttataaaatcattttaactttgtttatttcttaataattattatttgtgctctgaaaattccactaaaatttatttacacattttaggcttttaggaaatatacaaaaatcctccaagccctatttgactttcaactttgcacattttaatttttgaaggcttttaattattctaggcataatttagaggatgtattttagggtcgatttgggacgcgacaaacctacccccttaaacggaatctcgaccccgagattcggaagaactggcgaagagatctggatgggctgccttcagctcgtcttcacgctcccaagtagcttcttcctcggcatggttgctccatcggaccttgcaaaaacggattacccgattcctggtcctgcgctccatggtgtccaggattttcactggtctttccacgtaggtcaagtcttcgcgaacttcaatctgctctgagtcggcctgctcggatggcactcgaagacatttcttgagttgcgacacatgaaacacatcatgcacgttgcccaaggaggcgggcagctccaactggtaagcaacttctccgcgtcgagcaatgatgcggaaaggactcacgaaccgaggggcgagcttccctttcgcttgaaacctgtgtacaccccgcaacggcgttacccggagatacacaaagttatccactgcgaattccaggtcacggcgtcggttgtctgcataactcttctgccgagactgtgccacctttaggttttcccgaatggtcctgaccttcgctttagcttctctcaagatatcggtcccgaacacttggctttccccaacttggtcccacaatagtggtgtcctgcatttgcggccatacaacgcttcgtatggtgccatctgtatgctggcttggtagctgttattgtaggagaactcggcgtaggggagactcttatcccatgtcttcccaaaatctaggacacatgcgcaaagcataacttcgaggatctggttcagacgctcggtctgcccatctgtctgcgggtggtacgcggtgctgaaatttaatcgggttcccaactcttcctggagtttcttccagaaatgagaggtgaactggcttccccgatcagagacaattttcttaggaatgccatggagacttacgatcctagcgaagtagagttcaactagtttgttccctccataggtggtctttacgagaatgaaccgtgctaccttggttagtcgatccacgactacccatatagaatcatatccgccttgggtttttggaagtccggtgataaaatccatcccaatttcatcccatttccattctggcacttgtagaggttggaggagtccggccggtcattggtgctcgactttgacacgctggcacacatcacaaagggccacgaactctgcaatttcccgcttcatactaacccaccaatatttctctttcaagtccaagtacatcttcgtgctgccaggatggatggaatagggactttcgtgagcttcctgaagtatcaactgtttaagttccctgacgtctggaacgtgtggacccccgtttttataacaggaatcaatcgtgtaaacagtaccatttccctggatcaagtagtttggtacccacgaattcatagctggaataccaagtgcacatacacgagtgtctaatacgaattattacatcataggcccgcaggcatagtcttaaatcatcggaccgagcggtccggaatacatccaaaaacagaaatagataaggtagcggaattcaggcagcggcatgccattgccacaggcaacgaccgtactaagacctactgggcaccatcgtcttcgtctccctcctggtagtaggcatagggatcctccgtagcttcatcgcccgcttctgattaattttatatttgcaagggtgagtaccaaccgtactcaacaagccaccacagcaacaatgcatatgaaagggggagagttcaaaggatggctatagttcttttgcgcaaagcaagttttgtaattcttttcacaagcctaagacctagcattgactgatcaaattttagtaccagagtttgtatttaaacaacgacggttctgtccaccatccagtgtgatcccaaggatagtttctcgccattgattcgtcatggttttcggaggacgtccaccttcctgcctctcaggaagtggctccaacggcatagaaatcatcatgcaatatcccatcccacacaggttaagaatttagagtctagccaagtgtaatacatgtcccggtgctcaataaccgcgagcacggctattcgaatagatttggtttacttacactgcagtggatgtacactttacccgcactccacgactgcccaacatatgagcctcgtcccaacacatgagacgcgtcacggcaaagcttttcgataacctcgcattggcagtacccgctccatgaacttaaatcctcatgcactctaggcgtccatgtttctagcagtgagaggagttctggcgctcccgggacagagaagtctcacacatattaaattatggttcaagttaagttctctctctcacacactcatggcagtcctaccaatggcgacaccgatgtagggcacgcctctcggccctacctcaacggctgtcccatcgtagcgcacctgcctcactcaggggtgaaccatctatgcagggatactgcctccgctcggctatctaatccgctaggtctatactcattcgagaagtacggttgtacgggggtcgtttcatgcttaacttcatggctcggtccttaattgaccggggacggtactagcctttcccagataccacccaaatcctccgtccgccccagtcgaaaacaattgtttaattttattttttctttcacaaatcatgtcatcaacatcatggcaatgtggcgctcatgtctccacatgccgcatctcaattaccttcccaaaggtaattgcccaagcatatagcatttgataattatgagtatgcatgattctagaatagcatttctaagcatttgtcatagttgactagggactcatacgtaaacatggttacaaagatttaagggtaaacaataatcaaggcatggcataatcacaagtaggatgttcatcattgcatgcaattttatttgtaaacaaaacaatttcgcaattgggatcaacatgttcaaggaatagtgatgacttgccttgctcgaggtcccgcgggtcttgtccttcacctggatccgcggctccctcggtctctatagttacgtgcgaaaattgatttgaattcggttagaattcaaataaaaatccaagtaaatccaaatggaagtcgaatgcgaaagtcgattcttttatattaactttactattcgcgaactagggcaaaccccatttcaatttaaactattttgcgagtataaatattttgttgtcatgagtttttaatttaacctacccgagcaacatatcaattaataggttagaaatttctatcgcgagctaaacatcggacgaaatcctagaatattatacgacttaatttagtctatgattaaatataatacacggctaacatcctagtaattaaatccgaatcgctaccgttaatcgattacttatagagattacccagaaataatccataataatttacgagaattcatacatttgtttaattattaattacatctaaattaataccgcgaattgattccttatggagagtaataaaataatctataatctataggaattcatccaattatattttcattaatcctatatttaaaagccagtgttttaggtatttaattagtaagatttcatctaactatattttcattaatcctataattaaattctaatatttgcaaatattttaaatttcccccaaaatttttcctttttcttttccctctctctctctctttatttttttcttctcttttctttcctttcctttttcctctcctctcttttcttttcctcttttcttttcttttcattctctcctctcttttcttttcctcttttcttttcttttctttcttttctttcttttctccccctctctctcttttcttttcttcttcctcctcctggctcctttctctcttcccttctcttctctcggaactctctctctccctacccgtggcggcggtgacgacagcacgcacggaggaggggggggggggggcggcggcttaccgacggcggcgggggcgacggcggcgcaaggcggcgacgcacggcgcggtggctccggggcggcggcgcggcggcacgatggcggcggcgcggcggcacgatggcggcggtgcgtggagaaggaggagagggagggggaaatggaggggatgggtgtgggatggagaagggaagggccgggtttta

SEQ ID NO: 7253 - DNA, 41694 bp, Oryza sativa
gtaattcttccttacactaaaccctttttctttggcatacctgttatagaagaggaaaccttgtttctctgtcttaaatctcatggcagtcattgttctgtactcctcttgttcttctaagcttataaaattgtctcccatttcatcacccatacaagttctgtaaaaagaaaacacataatactcagaaatcatctaaaatcaacaaacaaactgctacctatctcttggttccaaccaaaaaaaaattataccacaagaaaatcacatacctgagaggaaaccctaaaccggtagggggcatatgctgcttgagctgtccagggggataggggcaaaaaatacccacggcaccgtcgctccttgcgcagatggatgggcactggatgagataagaaatcggcagcggtgggggcgtgaatgaagccgctggtgaaggagcgctggttcccccgccgcgggcggcaaatgcggggcgagcaagcgagcgcacaggcgggggcgtggatgcggggcgggcagatttggggcgagcctgcgcgcggctcaagcgggcttcgcacgggcggggctgcgctcgccgaggggaggaaagaaaagagattaggtgagaaagcggcgccgcacggagggaggaaacgagaaagagcgaagaggagaagagggggcgcgactactttctctgttttccaatcgtacccttctaacatggacggatggatttatctctgtacctcccagtaccagtacctaccggtacaagttgctggatgggagcaacgctcaagcagtcgaatacatgaatcatccaacttggaccagctcccaaaaatgtattgcacaaagactgaaatccaaaagatttttactcgtcttggatgatatttggaaatgcacagtgaagatgagtggaaatgcctactatcaccattcacaaagggggaggccagaggcagcgtggttcttgtcacaacccggtttccatatatagcacaaatggtgaagacaactaatctgatagaactgcaaggtctagaacacaatgagttcttcgcattctttgaagcatgtatatttgctgattgcaaacctgagatttatgttgacgacttaattgatattgcaaaagaaatttctatgaaattgaagggtttcccactagcagcgaaaacagttggccggctattgaaaaagaacctttcccaggaatgttggatagaagttcttgaaaggaatgagtagaaaaatatgcaaaatggcgatgggatgatgcctgcactaaaaattagctatgattaccttcctttctatctaaaaaagtgtttttcatactgttccctttaccctgagaactaccagtttaataatttagaaattacttttttctgggaagcaataggcatcataaattctagtgatcataataaagctgaggatataggattaagttatctggacgaactagtaggtaatggctttttagtgaaggttagtgatgataagaggcaatattatatcatgcacgatttattacatgagttagcacaaaatgtttcctcacatgagtgtgtcagtatacggtcatatagctttaggtcaaataatgtcccacaatctgttcgccatatatccatcaccttacaagataaatatgacaatgattttgagggtgaaatggaaaaattcaagagaaaaatagatataggaaatatacggactttgatgtattttggagaatacaataaagatatgactatatttttcaaaaatatattcaaagaaacaaagtgcattcgtgttctatatatgtttgcaaactcccttgaatcattcccatacaacttctcaaaattactccaccttcgctacttaaaacttgaattaccatatgactcggaattttctttaccaagtgcaatgtgcagattttatcacttaaaattcttggacctagggtatagtaagtgtattttgccacaagacatttcttgcctagtcaatttgcgccatttaatttctaaaatggagctatgttccaatattcctgggattggaaagatgaagtatttacagtggctggaagagtaccatgttaagaaagaggacattggatttgaactgagtgagttggggaatttgacagagcttggaggagagctaaagatatttaaccttgaaaatgtggcaacaagagaagaagcaaatgatgctaaattgatatcgaaaaggaatctgaaagcattgacactagtttggagtgcaaagcaactctccataggatctggcgttcttgatggtctgcaaccacatcctaatcttagagcacttgacatacgaaaccatggtggttccactggacctacttggttgtgtggtgatgtttgtgtcaaaggcttgaaatctctccatctagaaggcttatcttggggaactttcccacctttcgggcaactaatgcatctggaggaacttactttgatcaatattgctggcatacgtaagtttggacctgattttggtggtgttacccaaaagagttttttacacttgaagaaaattaaatttgttggcatgccagaacttgtggagtgggttgggggagctcattggcatttgttttcaaagcttgcaagcatcagatgtgaagattgtcccaatttctcggtgctactgttgccattctctaagtgctctgtcatttgcacacaagacataaacacagtatggttcccaaacctgtgttctcttgagattcgaaattgctccaagttgtcattgccacccatgcctcacaataccatgctaacacgtgttactgtgaaagaagataatcaagcaaagctgcattttgaagaagagacactgagaatagatggttatgggggtgctttggctttccataacctggacaaagtaaaagatatgacaattgaaaacatgttccacatttcattgactgatctccaaaagctgaattcattaacaagccttgatgtcacaggatgcaaaagcatgttatccagtgaagtagacaatggttttatcttttgttcagttcagcaactcaatctcagagattgtcatcttaccgaaaaatcattgggtaagttattaaattgtttcccagctcttacccatttcttcttgagcatgtttcctgaatctgaagaggaagaggaagtagtactgcgattcctatcgcccagctcattgcacgttgcctcaatctcaaatcacaggaatctggttcttccagtggaggatgtggatggaggctgtctccaacatctctcctcactcgaaacactcgagatcgatggatgtggcaacatgttttctcagtggtccatggtagaggcaggagctcagaccaggaagcccttccctacttccctcaaggaactcagtattgtgggagagtcaagcatgcaatcgatggctccactctcaaacctcacatccctcaccagtttaacactaaagcactgtgttaacttaaccgtggatgggttcaatcctttcatcacatacagccaatactcttataaatagagaatttttacggcaataataatcatcgctgctccatagcaacggatatgttctcagaggtggcaaggaccaaagttatgcctgcaggtggctccttccaacagctggtacgacttgatgtggacagtatctcagcagtgtttgttgaaaccatttgtagcctcctcgctgcgaccctcatcgagttgagattcacgtctgacttgattacagaaagcttcacagaaaagcaggagcaggtacttcagctccttgcctccctccaatacctagaattctatgggtgttctcgcctaaagtccctccctaaagggttgcatcgcttttcttctctctatggactagacatctctcgatgtcctcaaaaagaatgttgccaaaggagggcttccccgcttcactgcaagatctaagtatggaggcatgcagcatcaatctaatggatcaagtcaaaaaattagaagcatcaaacccacatttaaaagtacatgatacatcagtgacttatatcgtgaggttagttcatcgaaaaccaacttattaccctcaatttttgtgattttttctgcactaggcagtaggtactagctagcaaccactgtggctttcagcccctatagtccatagagttcctttatctgttatctaaccaatgttacattagttgtacaattatggtagtttactacttcctctgctattacacttttttttcttgaaacagaaaggtgagagcaagatgtctcaggggcagaggcacattgacccagtatggtccactgggcacaatgtaaatttgcttctcccctgttgtcagagccatgtggatacatgatttgcattaccagtgggatctcaactcctaagccgaactgtcagcaagcccaagataaactctttatcttgatcagatcctttaaaccgaaggtactttcaatttcttccaagtatttcactttatcttcggtgtaatcacaattttctgtcctgaggacttgattgattgccccccccccccctcccaactgcccaagtggcaccgcacacccacccaaagtatataatagtgtcaatatagttggtatatgtcagggaatacaaggcagcgaattgaaagattaaatgtactccctcattttcatattataagtcgttttgactttttcttagtcaaacttcttttagtttgatcaaatttatagaaaaacatagtatcattttcaacacaaaacaaacatatcatcaacatatattcaaagtaagatttagcgaccccgcaaaaaaaagtaagatttagcgaaaccgatttgatgttttagacattgcttttttttaataagttttatcaaatttaaaaagtttaactatgaaaaaagtcaaaataatttatcatataaaagggatgtctactttttcttagatggttaatgaaataaccctcgtggttagatattgtgttttgatgctgatggtgctcattttatatgtgttttatttttcgggaatacatttttatgtgtgtttcgtactcctactttcaataatgcacttgcgatagcgatacaattatcttgttttgttgagcattaatgtaacatttacaaatgaatggttccttttgtactagattcaccctggcgagcctttttcagccatgtagtacggcaaatgtctgacgacataatataactcctcaaaataacgttaaattaatttgggacttgcttttgcatttgcttcctcaaatcaaattgtttccgtgagttcaacctggagattctgcagaacagttattacagtccaatgcattgttttttccaggtggtttccaagacaaattggtgttccatcggacgagtaatgcagccgccatctgtcgttatatcttgacagagccgagaaggaaaatcctccagagattaggcaccatttgcatggtcagttgattctccattagtccattaccctacccttgctgctcctatagaagctcagaagcgcttgttttgcgatgaaccacttacactgtatctgttcatcattgcaggcttgcagcaaccggatggcgagcaaggttacagagacggcgccgggggccctctccaatgggctgtggcttgcctgggccgaatgcgctcaaacaaatcagcccatgtgtgtgtttggggtggcccaggggccagccagactcttgggcttctcctctctctactccaccacgcattgcaagcagagaggcgcgaggtctcttcttcctccacgcatgacgcctccggatgagtagcgaactaacgatcgcatcctgcacgcatctcacaagggacgccgcgtcgacgccgatgccatccgccgtcacgatccgcagaagcatgcatctgctcaggcgcctcgcgctccctctggcgcgggatgatacgcttttagatcattggatggcagcgggtttgttcgatcgagggataggtttttgcttctctcgaggctcgagctatctccctctgcaacccttctcgctttgttcgacggataagttttagctgtgattggtggtgttggcgtgggtcgttcagtggtgggttcatgtctaggcttagcgctctctgatcttgcttagcggtggttggtgcagcgttaattttcttttattgttatatctatctatctatctatctatctatctatctatctattatatactaaaagtctattaaatttcctataaacgctcctaaaacgccacatagcacccctaaaaacactcctaagtcgccacgtggcgctctaataaattttagaatccgatggacccgttagttctaaccattaaatctattataaaaatacaattaaatttatctaaaaactcttattgtacgtgcacatataggtattccaaaaaaaacaaaaagtacgtccatattttgatacgtacgtacgacgttgggcccacatcattcttttttttctatctcacttattatggaaaaccaaactgtctatatttactatgcaaaatatatgttatttagagtttctaattaggcgcatttcatggaaacatccatgaaaaatataaataaaataaaaaatagattatatgatagctaaattaggctttcatttctaaaataaaaacaactctaattgtgactaacaattctaaaaaattttccactccctaggtaaaatataataatatgtcaaaatgatattactaaattatcatgaacgtattttcaggtattatatgttttctctattctataatatttgaaaaattaaagatcttatatattcttttgacaccatgtcgatgtcttctatctccaacttaattagactttgatctagctcaatagctgagcttatcttggacacacgaaacgacacatgtcattagtgcaagattaattaaatattaaatattatgaagccaaaaatagatttagcttttatatagaatatatttctaataatacacacgtttcacttaaatatatacaatgtagtccatgattatcaatttatttataaggaatataatggtttagatggacttagatattgttatcaaaaggtattaatttcttttataaaaattcctagaacaatcgaggaaacgtgctcataataaataagagagtagccaatccgataagtactttacaacttattgcatacatattaaaacccttaatatgtagtatataatatactttataaatacaaaatagtctaatacaatcgtatattcccactaatcataagtatataagttctgtattagtgggaatattgcttacgaggcattcgtgcacagtgcacctaataattagctgatatccaataagcacatgtgtcatcaagcactgaagataggactatactaagtgggcaacttcaacaaatgataggtaagaagagtatgccactaaaccacaacaaacaatagttgacagtgagtaggttgccagtgtgagtaataacatttctacactcctacaagcactcttaagatgccacgtgacaactctaataaattagaaaaaaaataagaaaaattataagaaaacaaaatatttggccattgatatacacgtagctccattattttcaaccattacattagatctattccaactaaaaaccatttaatcccttcgtatgtacgtatgtacacaagatatgtaaaaaagaataaaaaagaagagttcatatacgatctgctctatctgatagtttttttttctttaatttgaggcactaaagtttttttctcaaattgtgcatatatgatatatgtaatgacactcatggcaatcttctcgaagaagtcgtgtcgctgtggcaccgcttcatgccatcccaccaaactttttgaaagtattttttttactaaccatgtaaaaggcaatcgtaagcgctcatataaatgtgtgcacaccatcctatgaatacacatactactattcacaaaaagaaaatatacatacttagaataaaaaaatgtcacatggaaacatattatatccttatgtaattatgccattctcatataaaaagtgttaacaaaattagcacaaataattttgacaatggattattccttcgtatattacccatgaacatgcgcaggtgacttagatgtatagtaaaagaaaaaaacaaaactcatattaactcgtatgtttgtgaaagatggtgatagacgagtttacgtataaccaggataaagtgaatttgtttgaatataatagacattgtcatttagtatataaaattttatggtttatttcatggtgtaagtatttctttcttttatgattataatgtaatttatagttattacagttgaatatggtgagatacgattttttatattcttttttataaacaacaaataaattacccatgcatcggcacgggtttccttgctagttatatactaaaagtccattaaacttcctacaaacgctctcaatccgccacgtgtcactcctacaaacactcctagaccgccacatggcactatataatctcaccgtcgattttcacttaaattggtggatccgatattttagaccattggattagatctattattatttaagaaagtaatcccttcctctactgtgggccagaaaaagaaaaaaaaattatgaaaaaaaacgtccgtacttacgtgtggcttcgtataaccgtgggccggaaaaagaaaaaaacataagaaagtagtacgctcttcctgtctcttcctcttcctattcttttatatctccatctctttcttatcctaattattttatattatcaaattaaaaacaagttaagttgaccataatttaaatgtacatagctaatttatattctattaaaacattgctctatttataactaaattgacaattttacatccaatgttttgctatatataagcaatatgttattgtggtatagactgtgcattttgcaagtttgcatgccatctaaataaattaaatacttattaacaacatataatatatctatatatctatctatctattattatatactaaaagtcgattaaacttcctataaacactcttaagttgccacatgagactcttataaacactcctaagccaccacgtggcactccaataaattagaaaaaatatataacttgaactggtgggccaattggatttatctcataaaaaaatcattcctcaactactaccgtacgttctcatctccttcccctcaatcctttctcctcatccctttcttttttttctctatggtagttaagatttttgttttattacttaataattaatttcttcacttctatctcacgagaatggccgtggattcttgattgcatgtcccatgcctaaatatataaatgattaatgatctgatgcatgcttttataaataataaatctatttttaaccaacaatttagaaaaaagataatagttacatagcaaaataatcataattttaaaaagttactccctctatttcatattataagccattttaacttttttcttaattaaatttctttagatttgaccaaatatataaaaatatttaacaacatctatcacacaaaattgttttgttagatataacgttccatatatatccataatatatttttttttgaaaattttactatattttctataaacttggtcaaacttaaaaattcactgaaaaaagtcaaaatgacttataatatgaaacggaggttagtttgtttgaacggttgtttcataattagacagctaaataatttaaaatcaatattaccaatatttcactataaaaaataaaatatgttatttgaatttccacctattctttacctgacaacccaaataacatcctatttttaatttatttgaattgttgatttatgttactcatattttactatgaaaaatttaaaatacgtaatttgaacatagaccaacaagcaaacaacactgaaacattaaaaaattgacaatatatattatgtcatcttaatcattctacataataaaaattagaaaaatacaaagtcaccatgtatgaccttttagagacatgttaaattaccaagtgtcacatttaaaaaattagtaaaatcttatatattaaaagaaaaaaataaaacatctagctaacggttttcacctagatcgataacctattaacattattttcaactatataatctacttttagaaaaatatatcttaataagtggcatgtcacatcttttaaaaaaaaaacttgcaaatcttaggaaaattacatctaataattggctttcacttaatcacttagaaaaattacaaaaaaaatcccctccacacgcgcccatcactacacacccgctccttcccctctctggctcaagctctacacttttcattcctcttacgttcctatttaactaaaatataaataatctataattataagtttcacgtctaatttctaatctaactattgctctgtttataatcaaaccaatgatataagattcatatgcctatagtttactatataacaaatacgacattttaacacaatcggcctattacttacgagtatctcaaatgcaacctacgatatatgccggcgcgaatgcgcgggctaccttcctagttatatactaaaagtccattaaactttctacaaacgctctaaagccgccacgtggcactcctacaaacactcctaagtcgccacatggcactatctaatcttaccgttgattttcacttaaattggtggacccgttattttacaccattagattagatctattattaaaaaaataataacttccacatgtttataacatacaaacgctactgatgttctttccgtaacatacaaacgtacatgattgaaaataaaatgatcaagctttcttaaccttcgctggaagaaaaaaaaccatacacttggacataaaaaagacagaaacaacatacatccataaaaatcaaccgtttttaaaatatgattttctacaatataaagataaaatatattacttcacatgtataaatatatttagttaaattaagatctataataaatatccaatcaatgttctttaaaccatcttctaaatctatctattatatactaaaattacattaaactttgtacaaactcttttactctgctacgtggctctcaaataaattagagaaatcctagaaatctattatatacttaaaagtctattaaacgtactgcaaatgcttccacattgtcacgtggcgctttaataaaattacagaaatcctagaaattcagaataaaaaaagaaaagcatccaaccttcagttttcacttaaattagtggacccattattttaaacaatggattagagctcttaaaaatacgatgatgctaatctctatcccggaaaaaacataatgcgcttacgtcatacgatcatctccctcccggaaaaaaaacaaaacttaaatacctacatcatatactataagaaaaataaagccaaaacagaacaagaaaacatgcataggtacatagtaaaatcggaaatatatactaatcaggaaaaatcatcagtgtcggcactgatttgttgtcaacagcctttaatctacgattttattaaaaataatactacacatatatgcacaattaaacttaatataaacttattatagtgataaatatatcatgacaaatgacggtaacatgtaatagttaatgcgataataatgtttcaaataatttcacatcatattttacagtgtcaaatatcacttgacaaaaatatacaacatcaattttaatctacatgtgtaaaaattaaaaaaacaaaacctatcattgttttttaagtacatctgtttaggtttatttaattttaggagagattgagattctcaaagtatttcgaagttttcaaaaattttcttatttgaggtgtgagaagcacaaataatagatagatgagaaaaattaaattaaattttagccagtgataataaaaatatataatttagctttggtttttaagtagacctttttaggtttattttgggtgagattgagattctaaaagtatctgaaagtttttcaaaccttttttattgctatttgaggagtgagaagcatacaagatggatagatgtgaaaaaataaataaataagattttagacagttattttactacaatacaacccgtaattcatcacgagaattatgtatgttctttgccaaatagtattggaaaaaatgaataatccaataaaatatgcataaaactacttatgttatatttttttaattgatagaaattctaatatagcgggtataattgatggacgaatgacatataccactgaaactcagcagtaagtgcactctagtgaattagatagtgtaaataagtttgtgaaaataagtacattattacaattagtaaatgagtctcatttagttataaacaatatatggttaaaaaaaatctagcgctaaagtatgaatctttatcaaaatataaataatgatatggtgttttgtagattttcatggtggtacatctctttagctatagctctttttttctaagtagtgccgaatgattaaccccactcatttgaaaaacataatactgtttgtattgcattaaaatttgagaagcacttattactaacttcatatacacattgtctattctctaccaaaaatcgactcgaaactttaaaaaaaattgtttcaatcacctctctttctgtccctctttgtcctttaatgcaaggtgcagtacttgctatgctatcgtaaatattgcatgggcatgcacattgttgagttaaggtactgtccatgaaaggtcaccatagacaatgtaactaaagtgatagacttatcaatataatcatttgtgagtgtaacaatagtaaactaagtgttaaaatagtactctacgatggttttttaggggcatggctacatcgacgtggaacctatatgtttcaaggcattacatatgaaagccttggttggcagatacatttgacttcatccgttagagaggtattcatgtttatttttaaagatgttatcgtattattctgtagatatgttatatttatactatttatacatagatgtgaaaataagtgatgaatttttataatgtaacaataatgtatcatttattttagtggtactaatatagtttcatttattaaaggtgcacctaactcttaaaacaatgatagtaagtaatgatgataaacaaccagtttatatatgactaggacaaaggaatttttatttaaattcgagggacattcttatcacattagtagtatattaaaatctatcgtctattttatggtaaatatatttatttttttattgtaggataatctaaattcccttacactatatatagtgatataatccattttagcatttttttaataaaaaataagatgcccatgcatctgtgcgaaattccttaccgatttatattctggaaatgttctccaatttatattacgtcgttatagtgtttgaacacaacctatgatacatgcccgcgcgaatgcgcaggttaccttcctagttaatatgaaacatcgtactaactttgtagttttgtttattttaaaagatgtccaaacatgagtagggatggaggcatggagctactattgagagggggtgtctgattaagaaattttttaagctatattagttaatctattttgactatatatgtatctttctcaatgtaaatttaagaacctgtatcaatttaaatttggataaaaaaagagtaagggaagcatgtgacacccccttttcattttgctataactctgccctgaacatgaaagaaacggtgcggaaagagagataatttgcgtcctagagtatccgaaagctttagacactagattagtatgcatgcataggttcgtacctacagttcctaatctcttatcaatgttgacaacctttattggtgatcgctatgtaattcatatcatcatatgtggtggactacttcctcagtcccattttaagtgtagccaactcacatgccattaaggacccttgatgctgtactcttaatgtaacaatgattatcatgctaggctagtgtaccaataattgcagagcaatgcaaatcatttacacttaccacttgtgcaattgccatcgtatgagcaggattgcaagagacgactgacttgcagcctttcttgactactttactttgtttgcattttattagtttatttaaaaggcctgatcacggattagtggttagtatgtgaaaactcatctgtatcgagcgagcagccatcaccgatggggtcatctttgttggacctaaataaaaacttgttactgataaggttttacctagtgcgcgaggcatcctataatccatcacgatgactcattcgtgacgggctccaactcttactcataaaaggtgactttgtcatccgactgagtcttgctctccattcttggtccaacatgtgttgttgtccttcatgaatcctcgacatattagatgagggtgtatatctactcttccgacaaacatcttctcatttttttcaatctacacatgaacaagtcatagatcgtattatgtacacgtcaaaaatatcaatgacatagatggccccgttgactgttacaatggtactgacaaaccatgccttactagtctagactctagagcccacatgttgttatagatctaatttccgaccaaagatgataccaaaatatgaagcaactaaaccctacaatgacatagatggcccgttgagaatttgcttttcaatggagtagccatgtcattgtccagcaaaatcaagacaattatagagaaggtagtaggtgcgcgtgttgtctctgtctccaactttgccccaaatagacattggcaatagtattagtagtaagctttacttgactccaaatgacatgacttattttgttcttcccatagttggatgatatacggaaattcaatagcgacagtggctcgaagtagatcagcttcattcatacaaaggggtaaacgatgggcaactcaatctcccatctatatcacgtactagtacacatcctggcagaataactgctaggtttttcgatcataattttgatcatcgtggtttaatggtttaaatcttttttctgttcttttattaatgtgagaatttctagtcttcatagtataaatatggtggcttctttttaagatattttaataatataatgatccctataataaatagatagattggtagaaccaccgatttttttacatctaaacacatgcagtccaataattacatatgtgagcacgcattgtttggaatctatctattatatactaaaagtccatgaaactttctaaaaacactctcaaatcgccatgtggcttccttaaaacgctcctaaatcgccacgtgacattataataaatagagaaaattcgaaccattgattttcacttaaaataggtggacccattattttgagccattagatttaagctaatccgtatcctctcatctccgaacgccgcgtacctcctccccgcacgcaagacgtagatagctaggtacgcatctactcctctccatctccccttttttctccaaggttgttaagctacaaagcataatttgttacaataagttaagaattttggggggggagaaaaaaaggggcccccccctctcttgggggggcccccaaaagggggaagccttcgctgtgcaccatgcatgctacctaaattataggagtgatcacagtgatacacttgaactacacattcagtttattatacacttgaactactgttttttaatcaaatcaacggtttaagactcatattagttagctatattttggtggtaaagaattattacatgttggtctttttcaatttatcacatgcacgtatcattttcatgagtcctccccaaaattgaaggaaaccctaagaatttccttcaatatcaagtctaattttttattcaaatcggtggatcaattatgatacaataaggcaatagtaactaattaactacatacgtactctctcctcctcctctcctttctcattcaattcttcattcttctaatttttaactaattagcaacttaatataaaaacaaaaaataattagaaagctaaatgattataattcttaagttatatatggtttttatgttcaacaatataaaagtaaaatatattacttcacaaatataaatatatttagtaaaattaagatctatatatgataaatatccaatcaatgttctttaaaacatcttctaaataattcaagatctatattacccaatttcactgtaaataatacgtcatttgtagacacctatgcgtgtcaaccaaataaaaaaaatcaaacaaactatatcaccttaaatcatcgtacattctcaatagagcacttacatgtcacgtgttatgtcttaaattaaaaacaaaatcttagaaattatagaaaaacacatttgaccaccggttatgaattaaatatgtatatccattattttaaaccattagatctattttttttaaaaaaatcttaagccgctaggtgttacattttaataattaaaaaatattattcgaaattttaggaacaaaacaataaatcatcggtttttatttaaatcatttataaaaactaggaaataaaccccgcccccaccccccaaactttaccccctcctcacatatgcacaaacacaacactacccgtcccctcatcccccggctcgcactttcccctataccctccttgatatttttataaccaataaaaagagaaataatcaataatattaaagcatacatatcttttgagccacacatctgattctaatataaattgctctatttataattaaaccaacaatttaaagatccataacgcctatattttaaacttaatttttcactaaaattagaacaattatacatgttcctattttttaagtgcttagatattattgactttcatgacattatgagttcctctgcacattattgtatatatataagccacacaatgtttgcggtttatagttggttgagaagttacatttgtaattactaaaatgttcagactcatattgactaggtattttcttttttttaaaaaaagaaagatactatagatcacacatatattagggaagggagatctacgatatatctttagaaatttatatataaatatataacaaattgcgtcaataaaatatattcattaaaaaataaaatatattcattttcaataatagttatttaggatttgctaaaaaaaagaaagaccctaaacattttattaaacaagacaaaacatcacatgtttccaaacaaattaaatctaactcctttctagataacgaagagatcatagataattgtttatatgaatgtattaaatattatgtattttaaaagctaacaaatagattggaaaaattatctaagcaacactgatgagataagttatggataaacagtacttatgaaatgacaagtgtcatctggctgatattctgccatcttatatatttttttcaaacataatttatagtgcatgcccgcgcgatgcgcgggctaccttcctagttctaattctaacaaaccttcgcacaagtacttgaccactgtcaatatcgggtcgaccaagaggacctaacgaagtagtatatgggggttttgcggtcttgtttctagcactaacatgcgagcagcccaatagtattaatcctcttctttttcttcaactaatagcaatagttttggtctcatagctcacattgtattgtagagcatatgtaaataatgtaagaaatacatatgctacaatgagttgtgaaatgaaaacaacacaattaaaccatgcatgctcccgtaatgatgcatttaaccaattggtgatgtgggttattgcgctaacgttcttaattcagcggcccattagtctgttggtcaagtggttcaatggaagcaccgtgcttcatgtgagcatcttgcctatgcatctaaatgtggttgttgcgtgcttatttttgtaattactggattgcatgtgcttacatctaaaaaattcgggtgataccaccacttaactatactaatgctccaagtggatacttctatttttcgagtagttgtgtcaatcaacaaattccttttattttacgctgacgaactaatatcattagaccacattcacaaatcaaggggctcctcatcttcgtcaccaccaggctcagggctatttaaaacaaatcgatgcatcttcttccatataaactaaataatccttttaaaagagaaaaaaacagaacaatccatgtccttatcaaacacaaaaattggtggtggcaatggacagtattgaacaacaagattttggacagaatcaacacatagccatgtgacgaatgccatattgatgcttgggacgtcatgaggcagacatcaaacatgagtagtttgtttcatcaagcaatcaagcctggtacaaatagaatcatcagggactcagagccaatctgaagtctgaaacttatacgtccagcaccaaacactcaataaacaagggttgtttatttgcatgcgtcccagatcccgcatcaagcaataaaggtgtatgatctgacaattctctattcagagctctgaccgttgctaacaggaatttcacttcccaatccatgctcataagcaccctatccaacttctcaaaagtttgattttgtagagcattcgcccacgtaaatttacgtccagtgagctccagctctctcaagtctaagctatctatgacagcgttaaacaagaaaggccacttatcactatacttgtcattgtttttctcgctagggtttcgaattatattgaaatcccctccaattagaatcggcaaagactcttttctacaagatctgacgagttcagtaaggaaagcctccttatactcctcttgcgcagccctgtaaactgctacaaggatccattggaaggcattttccttattccgcacatgaaactttacatagaagtctccttcatcaatactagaaacgtcaaaaaattccaaatttactcccaaaagaatacccccagatctcccttttggtctagtccaatgccacaaaaagtctttacctccacaaatgttcttaaggcatgcatttaaaaaatcacttttgcatgtctccaagagagcaataaagtctagcttttgctccttggttatgtccgaaagaaatctgaatttagccaagtcactaagacctccaaaagatccctaattttgatcgtcgcggtttaatagtttaaatcttttcttttccttgattaatgtgagaatttctagtctctgtagcaaatatggtggcttctttttaagatattttaataatataataatccctataataaatagatagattgataccaccacttaactatactaatgctccacgtggatacttctatttttgagtagttgtgtcaatcaacaaatcccttttattttacgctgacgaactaatatcattagaccacattcacaaatcaaggggctcctcatcttcgtcgctaccagactcaggactatttaaaacaaatcgatgcatcttcttccatataaactaaataatctttttaaaagaaataaaaaactgaacaatccatgtccttaccaaccacaaaagattggtggtggcaatggacagtattgaacaagaagattttggacagaatcaacatatagccatgtgacgaatgccatgacgtcatgaggcagacatcaaacatgagtagtttgtttcatcaagcaatcaagcctggttactggtacaaatagaatcatcagggactcagagccaatctgaagtctgaaacttatacgtccagcaccaaacactcaaacccaattaaccccagctgcagctggcaccatctttctcgatctgcaggcggaggagatccatccatggatgtggccgtcggtgcggcgagctggctcctcggaaaggtggtgacacagctgtccgatggcatggtggcggcgtacgtgtccagtacagagcttggcctcaacatggagcaaatcaagaccgatcttgcatacactcaaggactgcttgacgcggccgaagagagagatgtcagaaacaaccatggcctacgggtgctcctagaaatcctgaccaagcaggctgacgaggctgaggatgttttggacgagctccagtacttcatcatccaggaccagatcgacggcacccatgaggccactcccatggtagacgatggccttcgtggtcaagtgctcatccatggccgccatgctcttcatcataccaccggtaactggctttcatgtttttgttgttcctctgcacgagatgacgccgatgatccacatgatatacccaagtcccatagtgatgttcctgaccatgttagcaagttgacattcaatcgagtagacatgtccaataaaatcaagttggttatagagggcatacatgcctcatgtacacctgtatccaatttgctcaaaattatccatcctgcagtaggaagggcattaccaccgaagcgacctcctaccagctcaacaattacacaggataaattgtatgggcgggaaaacatctttaatcagactcttgatgccatgactaactttactattcatagtagaacactatcagttattcctatagttggtcctggtggaattgggaagacaactttcgcccaatacctatacaatgacaaaacaatagaggcacatttctctataaaggtctgggtttgcgtgtctactcattttgatgtggttaaactcactcaggagatcttgaagtgcatatatcatgctgaaaatgagggaagccgcagagtggatgaattatccaacttggatcagctccaaataaccattgcacaaagactgaaatccaaaagatttttacttgtcttggatgatatgtggaaatgcggtagtgaagctgagtggggaagcctattagctccattcagcaaaggggatgccaaaggtagcatggttcttgtcacaactcgatttccatccatagcacagatggtaaaaacaactaagccaatagaactgcaaggtcttggggatagtgaattcttcacattttttgaagaatgtatatttggtcatgataagcccgagtattatgaagacaacataattgatattgcaagaaaaatttctaagaaattgaagggtttcccgctagcagccaaaagtgttggtcgattattgaagtatcgcatttcacaggaacgttggatagaaattcttgaaagaaatgagtggcaacatcagacaaataatgatgacataatgccagcactacaaattagctatgactaccttcccttttatctaaaaaggtgtttttcttattgtgccctttaccctgaggactaccattttaataatatagagattagtcatttttgggaagcattaggcatcatagattctggaagtcataaaaatagagctgaggatattggattaaagtatttggacgaactagaaggtaatggttttcttgtgaagaaagttgatgataggaccgggaggcaatattatgtaatgcacgacttattacatgagctagcacaaaatatttcatcacaagagtgcatcaatataagttcatacagtttcaggtctgataacattccatggtccattcgtcatgtatccatcaccttacaagataactatgaggatagttttgagagagaaatggaaaatttgaagagaaaaatagacataggaaatttacggacattgatgctttttggagaaggcaatgcaagcatgcttatccttttcaaagatttattaaaagaaacaaaacgtctccgtgttctattcatgcatgcaaactcgctccaatctttcccgcacaacttttccaaactgatccaccttcggtatctaaagttggaaataccttatgacgtagaactgtctctaccaaatgcagtaagtagattttatcacttgaaatttttggacctagggtacagtaaatgtattttgccaaaagacatcaatcatctagtcaatttatgcctcttaaatgctagaaaagaactctgttccaatattcctgggattggcaagatgaagtatttacaaaggttggaagagtaccatgttaaaaaacgggacattgggtttgaactaagtgagctaggggatttgacagatcttgaaggtgaactgaaaatatttaatcttgagaaagtggcaacaagggaagaagctaataaagcaaaattgatgtccaaacggaatatgaaaaagttggagctagcttggggtatggtgcaacggaccacaagatctgatgttcttgaaggtcttcaaccaccttctaatcttaaagcacttgtcataaagaacccaggtggttccattggtcctagttggttgtgtggtaatatttgtgtaaactacttgaaatctctgcatatagaaggtgtatcttggggcattctcgcaccttttggtcaactgatgcagctagaggaactaactttgaacaatattccaagcacgcgtcggtttgaacctaattttggtggtgttacacaacaaagtttctcacacttgaagaaagttgaatttgttgatatgccagaacttgtggagtgggttgggggagctcattgccatttgttttcaaagattacaagcatcaggtgtgaaaattgtcccaatctctctatgctgcttgtgccatcctctaggttctctgtctcctatgcacaagacataaacaccagatggttccccaacctgtgttctcttgagattgaaaattgccccaagttgtcactgccccctatacctcacacttccatgttgacatgtgttattgtctcagagcgtaagacagatttgttgcgtcttcaagaaaacaagctgatctcacatggatacagaggtgctttggtctttgataacctggacaaagtagaagatatgagtatcgaagaaatgccacacgtttcattgactgatctccaaaagctcagctccctaacaagacttgccgtcaaaggatgtgaaagcatgttatttagtgaagttgaagagggtgttatcttcccttcagttcagcagctcgaaatcagtgattgtcgtcttaccagaaattcattgacaaagctactaaaccgtttcccagctcttactgagttccacttgatcttctcttcatttgaggttggagaggaagcagtattgcaactcccatcctccaacttattgagctatgtcagaatctggtgctgcaagaacctggttcttcctgtggcggatggagggggtctccatgatctatcctcactccaagaagtcgaaattaggggatgtggcaagatgttcgatcggtgttccatggtagaggccggagctcggagcaacaagttcttccctgcttccctcagggaactcaatatcagcgacgagttgagcattcagtccatggctctgctcacaaatctcacgtccctcactcatctaacactgataaactgtgataacctgacagtgcatggtttcgatcctctcatcacgtgcagcctcaaggaattggtggtctacaagaaagccgatgacgagattcatctctactctttagcagatgatttgttcttagaggtggcaacaaggatgacgaaagtaatacctgcgggaggttcctacttccaacagctggaaaaacttgaggtggacagcatctcggcagtgcttgttagccccatttgcagtctcctcgctgccaacctccgcgagttgcgattcaggtatgatttgtggatggaaagcttcacagaagaacaggaagaggcacttcagctcctcacctccctccaatgcctgaaattccggaagtgccttcgtctgcagtccctccccgaagggttgcattgcctttattctctctataaactaaatatcgctggatgtccggaaatcatgtcgctgcccaaggacggcttcccggtctcattggaacgtctaagaatacgagactgcagcatcgatttaatggttcaagtcaaggaattagaagcatcaaacccagatttacatatacggctccactagcaaacttaccacccaaggtaaaacaaggtgctctcccaactcctacatcttttttccccatttcgtctctaacctttcgaactaactaaaactcgttttttattgtttgttgttaatgatgtagctatccagcaccattgcctcatctggaacctttcagagttcttccatcatcgtatagctgacaatgtaaatgcgaattacacgacaacacatgaagataaagagctctggatggcagagcagccactttggctttcagacataatggatgtcctttgtctattatccaatcaatgttatattgatcattacaattttggtaacttacgttctctgtcattacacttctttccatctcaaactgcatggtgaattttggcaggttgcagctgcgtgatatcgaaatccacctgcacttgtatgatctgtacagatccaatagcgacattttgccaatcagccgtgctggttttttttagaaaatagattaaaccggcctctacatccaaaatagatacacagccaggccgtgctggttagtaaatatgcttatgtcgttttgctatttttttctttttggactgaaactagtatagtattgtagaatgtcccgctcttggtcttactttctgcttattactagtagagtgctcgtgcgttgctacgggaattttgttgatcacgggaaaacaaaatctggcaatccaaaagaaactacaagtcatagttgttctaagattaatttaaaagcaagatatatgttataattacagaagcgtagtataacctttttggcgcataaaacaatctcatggcgtttattaaattataaaaagcaacataaatagaagacagctaatctccaggtacgctttcttgatgaccctcgcacggacaatccaccattttcagtgtatgtgatccatttgtacctcgtggaaccgaacaattctgatgtgaccatggctaccacggatgcaaccattgctcacatcatggatgaacaagaagatatcgagatcaagtactccaagtgctggaatccgattcggccacctactacactgctgatttcaaccggccaccgaatctgcatacgacctccgttttcggcccgggagtacttgatggaaagctctcggagccctctttctaacggatccagcctcttctctgaattctatctcgtgtggccagaatcacaggaacaaggtgttgcatcacctataatgggcctatgggcttgtaacttcatttgggaccccggcccaggtggggcccatgtggggtgcgccccaagctggtggagcacgaccctaggcacccctaggtcgtcctcccacccctatatatagctagttaccccttcagggtttctcgggttttgttagattaaagtttagccattgctacttgcttgcagcgcgcgtgtcggctagaccgtccgtctgcttgttcttcggaaccccaacttatcatttgtattaaattcctatttgcaatatcagattgcttttatcttgttcttgcttgtttcttcgatttgcttgcaggaatagggttgatctgcaccggcaagatcagcaacccacggagaggtgtatcgatcgctaaggcgcaacacaacgtctcgtacggttgtagtcggatcgtcaacgtttctcccaaatcgtagttatcacaactcaccgaaagatcgggccaacaacagccttgagtgtcgagaggaactcagggttcatcaggtggtatcagagctttcgttgctcggtgagtttttatcttcctataaccagaaaatagccatacaaaaaaattcgtatcatttacctagccatattgtgccattgcattgttcttttcagtttttgctttgttgaattttgtgttgcatcgtcacgtcgtgttgctggtcttagcgtctagttcgtttagagtttcgagttctggtcacgttttgtaccacagtcgtcgctgccaccatgtctctgttgttgtcaggacctacgaaaacggaatcggctcgctgccacggttctatttttgtagttttcagaagtttctgtcggttagttttggagttcttgagttgcatctagagtttgccgatccttgtgtgtgtttgttttggccgtgcctgtgtcgtgcacgagaggaggaaggtgaattaccatatctgattttggaagtagtcaagtttgttttggaaagatatagtagattggattggttaaaaatcagtttcctttttatcccatacaccaaattcggctgccatccactccacctccttgccgagtcccactcgcccctttggccgagtccgaccccctccctcaattccacggttccgagttgtgtcaaacaccttggcgaatttttgtttggtgtcggtttcgagatctgtttggaaaaacggaaccggcataaattcagcattccattttttgtataattttaattttgggtttagacttttatatttgagtccctgtaaattttatatttatgtttgagtccctgtaatcttacattaaggtccttgagtcagtttttgttaaaaaaaatcaagaaaaaagtgaaaaaaaaggcagaaaggtgcaaaaaaaaagagaaaaaaaaagccgcaccaaaaaaaaacagaaaagaaaaggaaaaaaaaagaaagaagaaagaagaaagaaagaaaagagaaaatactattatgtttgagctaaacttcatatatcagagttgtgcatgagttgttcctagtgctatcttgtggtattgtttgtgtctaggctcgcgtctctagtacgttctagcctaggaccagcacggtacttgactttgaacaattattcaactttgcattatctgatttgagcatttgctattcctttgctacatatttaagcctacccagagctccacatatttgattacagccgtaccgcaagtgtttgccaaggcatcgatacatccaaccttcattggggtgcttggttgagtcggtgtatgtcaccattccacttgcattggtaagatcttgtaagagcttggttaaaagcttgagtgtgtgcgatttttgagctgccactacctagtagttaataggaacgcgcatatttttgtgtatgtttcttgttttctactaacaatggcagggatatgcaagataattggggatagctgtgctcaacatcgacatcttcgtcgagacacgaggagggatcaacatgaccattataaggtaagtgatgatgttctaggtaagatcaaatctgcactgccttatttcgagggaaactatgatcctcgtgcttacattaattgggagctagcggttgatagtgaatttcaaaagcatgtcttgtcggagaaacaaaaggttatgtgtgcctctagtgttttaattaaacatgcttctaatgattggaaacatctttgtaggcataacaaaataccacaatcttggaaagacctgaaacgatatttcagagatatttatgttcccatgtattatgctgacattttgttcaacaaactgcaatgtttaaaacaagataccagagctgttacttcatactatcatgatatgcaagcttgtttattacgttgtggtttagatgaatgcgaagaagctaaagaattgaggtttttatgtgggcttaacaaagaaattcaggacatgcttgattgtcaaagatatacatctctttctcatttgttacaacttgcttgcaatgctgaaagtaaaatagaggaggacatgaagaagcaacatgctatgtttttgtcttctattactaaccatttgcaggaagtgcataatcatgaaaaggaggagagagacatgaaagagccgccagtcccattgatcacactcaaagtcgaggcacctccattatctgaagagggcatcaaaggtaaacttaatggtgctgaaattaataaaggtgagtgtgttgttaatgaattgaatttgtccacttttcatgctatagcagagcaaccattagtggaaccaactgctgagattcctttgtcacaaattgatttgtttgctgttccttgtgataaagaagagttatgcgataatgcttcacttatatccatgccacaacttgtgaatgaacatgctattcctactgttaattcatactgcactgattttaagcatgttgttcacattgctaataaaatagaggagcgtgaattgagatcttctttaaatactttgggttatgttcagtttgatgatttttgtgagctcgataatttcaaggagaaattatttgctaagtctgatttgccatatccaaccaatgttatatttcacatctttggtgaatataatgatcttggaatatattttgtgcatagagtttacatctgctcggatttagaacctcctgtacatgtggataaaatatgcaagctagagaaaaatgttattgctaaccaaattgtctcgagtttgcctagttttgattggaagaaacaggttgttgtaaatggactacgcaaagagcaccatatggaaaaaccgaggacggttttccgtgaagaaggggaggatgatgtgaccatggctaccacggatgcaaccattgctcacatcatggatgaacaagaagatatcgagatcaagtactccaagtgctggaatccgattcggccacctactacactgctgatttcaaacggccaccgaatctgcatacgacctccgttttcggcccgggagtacttgatggaaagctctcggagccctctttctaacggatccagcctcttctctgaattctatctcgtgtggccagaatcacaggaacaaggtgttgcatcacctataatgggcctatgggcttgtaacttcatttgggaacccggcccaggtggggcccatgtggggtgcgccccaagctggtggagcacgaccctaggcacccctaggtcgtcctcccacccctatatatagctagttaccccttcagggtttctcgggttttgttagattaaagtttagccattgctacttgcttgcagcgcgcgtgtcggctagaccgtccgtctgcttgttcttcggaaccccaacttatcatttgtattaaattcctatttgcaatatcagattgcttttatcttgttcttgcttgtttcttcgatttgcttgcaggaatatggttgatctgcaccggcaagatcagcaacccacggagaggtgtatcgatcgctaaggcgcaacacaacgtctcgtacggttgtagtcggatcgtcaacgtttctcccaaatcgtagttatcacaactcaccgaaagatcgggccaacaacagccttgagtgtcgagaggaactcagggttcatcaaattctgcatggggaagacaatatacacaacatgatagctttacacaatccatcaatacaagaaacaatagaatgaaggaagagtgacctccatggttgcacggctacgcattctccatattgtgtgctaatcagccgttcggaagagacgtccgtaagaacgggtggatagttcggaaagaacgtggaaatggtggcaaagaatgtggaaatggtggctagggctggcaacaagagcttcggttgctgctggcgcaacttatatgatgattgtaactaatcacgattagcgtgatcttgccatgccgtcaaaagcgaaaaaagaacaaaaaattcgttgcctggttgtttctggcgttggaccgtaacagtcagatgttatgtttctggcattggaccgtaacagtcagatgttatatgggccgattaggcccatagcttgtttccttggctatttctggcgttggaccgtaacagtcagatattatatttctggggaataagttcatctgaggtcccttgactttacaccaaatccgattttcgtccctcgatcggaaaaccagacacaacgggtccctcaactatcacaaccgatgcagatcaggtccctcggcggttttaagggcggttttggctaatgtggcgcatacgtggctaatttgactcagtcttcgttcgacatggcattgacgcggcgcttacgtggcaattcgaccctgaaaaataataaaacccgtgggacccacatgtcagtctcacatagaaaataataaaaaaatcgtgggccccacatgtcagtcaaactcacccttcctcttcttcctcctctctccccatctccctctcttcatctctctcccctctctgctcctcttccggcgagagcggcgagctggagggggcagcgagaccggcgcccaccggcgagagcagcgagctggaggaggaagccggggcgataaaaggggatcaacgacggcggtgggcggaacagatcgacccggggcagcggcagctccccccggagcagcgccggcaatcgagatccggcagtggcggccgggagaagggcggtggccgatggggagaaggggcgacgtgcagcgatggccgccggaggaggaggagatgcagacatgcggggaggcatggcggtggcagccagaggaggaggacgtccgccgtgcgctgctcccctcggtagcggcggcggcacgggggtcctgggagtcgccgaggtcgacgtcgacgtcgtccgcggccacggccatggcgttcctgtccgcatccggcgtgcaccacagaagcggcggcatggggagtggcgcctcagctgctgcaacggtggcgtcaatggggggaagggaagcgaaagctcctcgctccggtgggctgccgctgacgagctcggtggtggtgaaacgcgacggatcgagcgccatcttggcggctgggggccctcctctgacctctgctctagaccgctgccttcgtcctcttcacccgtcgccggctgtcgtcctcctcgctccggtgggcggtcgctgacgagctcggtggtggaggcgggttgcggcggagggcggtcgccgctccctctcccgctggccaccgccggctgcgcacctctccctccgtccgtcgccatcaagcccccgcccacggcgctcggccatcgccggcctccctgcgtcctccctccctgcccgcctcgccggtctttgcgcgttgctccctcctctcctgctgccggccgcctgccgccgcgcgccgttgtcttccgtggcggctggagagagcagagatagggagatgaagagagggagatggggagagaggaggaagaagaggggtgagttggattgacatgtgggacccacgtgggtcccatgatttttttattattttctatgtgagactgacatgtgggtcccacaggttgaattgccacgtaagcgtcacgtcaatgccacgtcggacgaagaccgagtcaaattagccacgtaggcgccacgtcagccaaaaccgctctcaaaaccgccgagggacctaatctgcactggttttaatagttaagggatccgttgtgtctggttttccgatcgagggacgaaaatcggattcggtgtaaagttaagggacctcagatgaacttattcctatttctggcgttggaccgtaatagtcagatgttatatgggccgattaggcccatagcttgtttcctttatcaattaattccaagagtgcaaataagcaagcaaaatattccatcaaaatattccttggcgggtgttgcagatctgctgcttggagttaacctttctagtttctaatcaagctagatgtgccacatctgatacagagagagcttcttggcagtgtgaagctctggaggtgctttaaaaattcttttttgaaattcatcagggacaatcacgtttcttgcacaatatcaattattcttagactaatagctcttgaaactctactgtttctgttgcatcagttatctggtagcattttctaccagctgaacacacgattctacgtacattttaattccaattttcatgacaagagaataattccttttgatgtaacctacccgatctcctctctgaaagcatattatctgtttaaattgtaatcccgaacgatcacaattaacaaatcacatctcatttttttcaaccggcaaacattgcccctatcaataaattgcatgatccacactttttatcagtaaaatcaagtacagaaatcacaaatgccagcaacacttctacaggaagacaagagcatgttcaaccagtgccattggcaatgaaaaggaagcttcttgcattgctccttccagtttacattcacatcaaggaaccaaatagctggtagatcagagtagtaaaacaccagtactggctcatgggttatctgcatgatggagtataaagtaagtatagtgcactactagtatacaatagcaattaatatttagcagaaaaagagtgtgcatataggtaaagaaggtatttttattgaattgtttaacaaattggtcaggaagacgtgtgaagaacagatcaaaagcattgtttcttccagggaattgattaagtcagatatgctgtagtaggagactttccctgctcgtgcttgtggacaaccatttgtaatgttcctaaggtaatcaaatcagctatacaaaatataattttcaactccaactaattatgaaactttgccatttaaatttgcagacaaacaaaaacaagttacatgttacgtatactgtatacagctatggccaacttatatgtttagattaattatttttttggcaaattttgctacaagatatcacgactttgtggttttagctgtagggcaccgcacgaagtcacttttggggaaagacactctcaaaatgtggttatttgctaggggacacttcattcattaaattaatatttttgtgctgactaagcgagaaggggcctacttttttacatggcatgaccaaattgccctcatctctttctcttcctctctcttcctcctttaacagcgaggccgctactgaggcattgcaacggtgtgtggggacgggcgtgggcggcggtgcatgggcgatgggcgcggcgttgcagcggcgcgtggggatgggcgtgggcggcggcgcgtgggcgatgggcggcagcgtgcgggtacacgcggaagacatcggcgcgtggggatgggcgtgggcggcggcgcgcggggacaggcggcgccgacgagggagtcgcgtgatgcggcggcggcgggcggcgctgaggagggcgttggacagtgccgggggcggacgcagcttggggggcaggatggcgacgggcgtgggcggcggcgcgcggggacgggcggcgccgacgagggcgccacgtgatgcgccggcggcggacggcgccgaggagggcgttggacagcaccaggggcggacgcaacttggggcagcgggatggcgacgggagatggcagaggctgctcggggtcgtgggttagcgccgtccggcggtgatgacggcgagcaggatggggaagacgctccggtcgaaggcggcggaggtgtcaccgccgcgcctcttccgcttcttcatcacaaccctgcaagtttgattcgtggcggagctccggcgaggccgccgccgtgggcgctgttggtgcgtgccgcctccccctgcgccaagttggccgcccatcccagcgccgagctcgttgctcgtggccgtgggtggggtgaggacgtcatcgccggtggaggtagaggaggcaaggagggaggtttggggtgggggaagaatatgacaagtgggcccgagggcatttttgaccttttacactgtttatctctcctattgaaccagaaattaatattttattggctgcggtgtcccctggcaaataaccacattttgagagtgtctttccccaaaagtgactttgtgcagtgtcctacagctaaaaccacgaagtcgcgatgtcctgtagcaaaatttgcctatttttttttgtccatgtgaatctaatagtggcctggtatagatggatggtcgacagcaggggagagcagcaaagctgctacacttggccactgcaccctcttttgctcttccttgctgaccaccctaggagatggattacaggcgaggcaagggctccagatcaatatcatccagaaaaaaagtagtatcacaatacccgtaatggtgcatatagtccgtgccaaaatcccaccgaaagtaatgtttactgctgtccaagaaaaaaacacacgaaatgttagacttggaatataaaaattacagaaagaatggaatttaagcaagcatattatggatggttaatagtcacataatataccttttctaatctgtgaggacctctctatacacaatattttttgtgtatgctgctgtctgtttagacaatttctttcctttcttctcattgtccttcacgccagtacgcttagactttttcttttgtttcttgtcttctaccggcatcgatagtatttttatgtttgttctagaggttgctctagacaacgtgacgtatagttgaccatgagagaagacagactctggtaaatagacgcctgcatttggaattgtttgtccctgcgccttattgatggtcaatgcaaagctcaatctaaccagaaattgcttcctcttgaagcgaaaggggaacatctcatcatccgaaggacattgaggtatccgaggaaggaaaactctcttaccagcatgctgccctaccacaatctctacgtcaatagcatttcttccgaactcacgaaccaccagccttgtcccattgcaaagtccgttggctgggtcaatgttcctcaatagcatgatggggcagttaatcttcagcttaagcacatgcggaggtagcccatttagagttagagagttcaagaattcaggcgggtaatagttataagggtcatcctctggtcgatcaaagctatgatatgtcaccacctctcctctaaaccgcccaatcattttcatgttaattcgatccacgaactcattccgggtggacattatggtcctacatgtgatgtagtttgggttcgtaagattatcgtttaggttggggaacacagtatcgatgagcctttcgaggtccgtttcattctctttgcacgacatgcaaatatccgtttcacctcctcggtgccattcccaactcgaaggaggtagtccgcaaaccacacgtcgctctgcaccctcatattgcgaacaagcttcaattgaaccatacaatcccaaagataggacctgcgcagagtggcatctgttatctgagacctagcgcccttcctaatgaccgggagcacctgcctgaagtcccctccaaacacaatcgtcttccctccaaacggagaacacggacaacccattatatctctcatgctcatatcgagggcctcaaccgcttgcctctttgacatggaggcttcatcccatattataagcgacgccatctagaatttggagctcactgcaacacggcgcagttggtgctccaacattccttcggatggccctctccagtcattcgaagtccaaagtccaacacggcccagtccgccacctcccctttctcacccctcgccgccgtccccggctcatgcctcgccgccgcctcatcacctgctgccctctgctcaagcctcgccaccgcccccggctgctcaccacctgccgccgccgccgccgtcccgttactcgccgcattctccacctcctccggtgcacaagtatccatcgccaccgcctcacggcaaagctgccgcacccccaccgcatggccacaggaagttcccaccgccgtctcctcattcagtgaatttggcaatggcgcccttgccatcttatttcagtgccgatccgccatataactaagcagagctgatcatcagcagctctgattgatcggcgacgcacggaatggagcatcgccacattgctatcttttggtatctttgatatgcaaggccatgataaacaccttagctaattaagtaaactcgaggtgaaactgttaggcaaataatcaaaagcccaggagcaactctctgagtgcgttcgtgctttttgtaacattttatctcttccaaaatttaacgagaaagttactgagtaaagtatgtggttgctttgaaatcatggagttgatgtaatgttgttgcttcgttgttttgttgcatgcatgttgccatgttctgtgctggtggatgtgaattgtgacacatgaatcacgctttatttatgctcataagtcatcactattacttgtatgtcatttactgtgtattttcactggtgtatgttgtaatatacttgtatgcaacagtttattggaaaaaacagcggcaggcaaacattgagataagttcaaacatcttaaaatgggtatgcatctgatgacagtaaatttctatatctacaagtaaattaattaggtcataattacatccttagaaatcttcatatatatgaagggctacagaaccatattggaccaaattgtgtagaataccttgctattaacagactcaccagtttaggtttgttaagtggcaaagaaaacatggtaaaacaaagttatcatcttgcaatactgcaacttggaaatagccaggaaaaggaatagcagatacaactcacctagtgtcagattgcagcaacactgcaacagaaaactgcataaggttcaccaggccaaatctgcaacagaaatttgctcggctcattaatctgaacagatatacaattcaagaaaattactttttagcaagattaaccctgctattgtgcatcacagccaggggcaagactggcacctaaatacatctgttcacaactgagcatgcaagctccaacctgtttggttctataatgactataagtggtactttcagattcagcatatgcagagacttttaacagtaggctagtatcggtctgaaatccatttcctattgatccccaacgagcagaaaagagcaggctggtactttcagattcagcatatgcagagacttaaaacagtaggctagtatcggtctgaaattcatttcctattgatccccagtgagcagaaaagagcaggcaagtataggtcataaaaaataaagtgcatcggtgttctcccgaccattttagttttgcagcaaaagaaccagcgaccgcggctggggagatctgttcgggggagttgacaatgagatggtggccagcggccctgagtcccggcggcagaggtggagtacagacggacggcgaggcggcactgaaggaatagtgatcgctggtgacgacgacgcacgctacgacggcggctgctcggcggcagaggtgtagtatggacggacggcgaggcgacacagagggaatggtgatcgctggtgtctggtgacgacgacgcacgctacgacggcggctgcgagcggagaagggtagtcggcgatgaggggctcgaccccgccgcaactcctcccgagcggcacgaagggcggcggcgtgagaggggcggcggagcagcggcagcaggcgtgagaggggcggcggagcggcagcggcaggcatgataggggcggcggtgtgggcgtggcggcaggggcgggccgtttttagggcacgggtgcgggcgtgagaggaggcgctggtggggtcgtgagagggggaggcgcggggtgcggtgtcagtacgtctagattggttcaccatccctcctgcgtattttttaagtagtataaatattcgtagaaatatccataatttcttgaagtgtcacatggcggcttaagaatgctccacggatatgaaatcatgtgactaaaaaaccatgtaattttttttacaaggttattaatgtttatgcggtggcttagtctactaattttaaattatgtagcaaattcttacagtataataatatcaattttaacttcgcccggccctccggcgttagcactagccgttggatgctgctggccaacggccaccgctgttgacgatcgttatcgaccagtttcgaccgtcaatattacccaatgtatgaagactagctatgcttgcaatgcataaattccaaataaaatatctacttccactatatactatgctagtaacatgtatgcaggagaagcacatataaatggaggagaatcgacagaaaatagatgaacgatcaatcagacgttgtcgagaagtagacttgtggatagataggctgataatacagaattaatatgagtaaacaagcccataattcacaccattgggctaaggaataaacgaggagtacacctgccaagttctgggccaaatggaccagaccagggttcggccgaaccaaaagcagcccagatggcccagaaattccacaggccagtagttatcgacatccaatggcggttatgaccgtttctacctgaagcaaccgtcatggacacttgtcacaaggagggagaaagatgctctttggatgcttcatcatgccacatgtcaagaggagagcaaagatgctcctaggatgcttggagcatctccacactcccaaggcacctctccacctataaatacccctcctctcattcattccctcacacactcaagcaaggatcaaagctctctacaaagtagtattagtgctagtggagtagtgttagaatagtttccaagtccgcggaggcttcggggagtttggtaaaggttctatagcttttcctttcttctctgtaagacttccatttatcaatattatattcttctttatacaagttcagtactttattccaatcatagagtatgagtaccagtcttagtttatcaataagtagtataatatgtgtagttaaaccttctgggatttgcattgattctggtatagtgtctgattaccgggtcataagtctgctctggctaggccgagagctatggtccggggactcaggtgctctacaccgattgcaaggctatagagtaataagtagtaatttaagcatggagcttaggttaccgcttatcattatttgggggtatattctctgggtgatttgtaggccgctgatggtgacagctcagtatgggcgtctcccccgcagtttatattcctacatacaatttcctggggttggatacacctccgtatcctacttcggttggagggttatgacaggttatcgtaagaaactcggcaacccggggtaactttgcgatgcatcgggagggcatagctatgcttaggcttagctatgctgcattgttaaaggggttatactacatagtgtatactagttataatatactaagatgttgtatactagaagtacaggaatggaacatatctaaactactgccacttagctataattaggagatgtaggagttagataaatccttagttgtgtgtcactctacccttaagcttaacttacccctgcatagaccttgatgtatataagtaatatataactattagcatagtactctcttatcatatcttcccttgggattaaacaaatacagtaccttagaatactcccgagtgaaatgctacaatggtatatccgtgcgcttgaggatcacatctgtaaccataggaaggcgaagaccgagtggaggtcggcgcggacgctggcggtgcgccaggagctctgccgggacgctatgtggaggcggtcgacttcgaccctgatgacgacgacctcatggacgaggacgtcgccgaaaacatgccggcgcccgcccctcgcctctgctacaccatcgcgggtggcggcgacgacgggggtgtagaggtcggccttcatcgagtcgacgacgttctcgcggagcttcatcaggcagagggcctcgtcgatgatcgatcccgttcccggcaccggcggcggcggcggcgttggtgcccctcatcatctcctcgtcggtcacccgctccgccgccgggcagagcatgcaaaggccgccgcggcggacgcacacgatgttgccgcgcatgatgcggagaggcggcgccggccggcagcagcggcgtcggcgccccttctctgtctcctctctcaccgtgttctctgagttgataaggggaaattttgtctcaacacctagtagaggagagaaaatcttttcgaaaatgaataaaatagcgaaaatggcaaagtggcggtagacgcacgcttcatattggcagtttatcgaatcacgtcttcgggatggcattctagcgaaaccgcgttttgaacatggcgaaatgtccattttctcgtggggaactgagaaagtgggaatacggtcgggacgccactctcgtcggcgcggggagacgaaagcgagaaagacgttggtgccgggtcaatatcccatcggcgagacgggagaggacgacggcgttgattggcggaggcgggaggcctaccgcgtacgggagggtggaggatcgatcgcctgcgagaggggatgaggcggggattccgggcgtggaggaagctaggatgtctcgcctagaaattcatgaaccagaatttctaagctgaatgtgcattaaacccctgtccaggaccagacagggtacacaatcgacaattgttgacatacagatccacgtcttacaaaaatataaaagattacaaatgcagcggaaaaaataaaacgagctagacttggaagcttgacttcagcagcggggcgactccactccacaggcaatccttgacggcagcgacgaaaccaacctcaacaagacagctccaactaggaagatcttcagctctggtgtgggggaaaagagagcaagactgagtactacccactgtactcagcaagtcataccggaagaggagtatgatgcaggatataaccaaaggaagctaggggttcatttgcaataaagcaggcatttaaaagcagtagttgaaaacagtaaagacaattgtagtaattaatcaatattaaccaatcagtgttcaacgctacaccacgttgcaacaggcccaaccagccacctgaactacactagttcattaagctaacctaggggtgagactaatcacggtgaatctggttgatcgcccataaccgcgggcttttcgaatagttttactctggccagaggtgtacaactgtacccacaagacacgattccacacatgtcgccatgccccgaagtatcaccatgatactgcaaagggggaaatcgtgacaagaccctccacataaccctcccctaaccatccacaccacgctaaggtttcacccccacccctaacgggcagtgggcagtcccctcgtgcgccgcggtgaatccggcagctggacaaccggacaccccggccgacccaactccatcacgcccacccacgccaccggtgcctaggaaagggtcgagctatacttcagatcaagcagttacccactcccgcttgtggtaagcacggtaagtctcccagggttt

SEQ ID NO: 7254 - DNA, 3555 bp, Oryza sativa
ataagtgattttacaaaataagtggtcccttttttggatagggctaatgccaagttagtctacgcatgtgaatggaatccacatgccctggaggctcttcaacgtaatgtcatggacaaccatgtggcagatcgatgtattatacttgaaggagataaccgtttgacagcacctaaagtaatattggttccaaagtttacttgttgatctacctgcactaggatggcttctaaccatttacttctttaactgatattaggggattgctgaccgtgtttgtcttgggttgttgccctcgagtgaatgtagctgggacactgctgtgagggctttaaggtaaacctccccagagttctttccagatttaggcaatattatatacatacagagaggcctagctcaggtttgccaagcttgacttgtgcacttgtattggtatattggtttgtttttttttttaagaatgtgtttgattgagctttcacaaggtgaattcaagccatatcatgttaaagttcacgattgttttaaactttgaagaaagggaaataaacgcttggaatagctcaaagattttcgaataaacaaaatccctaagccaacagttccctgcagcctatcatcatccaactggtgacctctaagtctgctcttaagtgcttatctttgtaacccctaaaaacgtgaatataggctgagcagtagctcctaagctatctttgttactaagtgacggttggtagttgcaagctaggcaatctttagttaggttgtttgtcaattggcactctgaaagtgcctgcgtggtggttctttcagggtgcttatcgtcaacatgcagagctagtggttctagtggtatttttgatgggacagtgccacgtttctgaagttctcttaggctttcatgtgcatctcaaaatatccagaagaatgtagtataactttgcaaaagaaaaaatattactagacattatattggaaaacatacagggcactgaaagcaactggatatgctttaaattacatggttacttcaccttgagagttgagagtcggaacacaatttgttagtggcttgttgatgtgctggatgcacgacgaacacacgacgaacatatgaagttctgactctgctgtgttttacttcatatgtagggctgaaggtggcatgctgcacatacatgggaatgtcaacgactcggatgagtcgctctggttggacaatgttgttaagtccatcactaacattgccaaaacacatggtacgatttgcccttttatacacacaagagttgcgaagcattcgacacggttaaaattaccatcttatgctaccgttgcttttcatttttgtctcaggactgtcttggaacgtcacggtggagcatgtcgaacgcgtcaaatggtacggtccgcatatacgacatctcgtggttgatgtcaaatgccgggcaacctaacaaagcgaaagacttgtccaaaatccatgtgctgtaggttgtggtgtatgacaattttgcttactccgtttctggttaatccagagaattaaactatttgtttgttacttcagaaggaagtttgttcagacttttctcaatagcaaagcatctatcaacatttaagtatcatacaaaatatttcctgacatcttattggctgtggctgtgcctgtggtccagttttttatcagatgtctagatgctgtaaatttgcggtattcgctataaaattgtcatttgttgaaaacatgccctgaattcctgaaagcaaaagccacatacatgatgtgttgctccccaggcctgatagagatttgacacctctgatgtcaaatacaactaaaccaataatcctctcggaaatgtgatgatatagaaacgagttttgcagaagaattgaggtgcaaaaatgctcttttattgtgtgtacttgcagaaacaacttacaaaagggaggacattcaaatcactacaccatacacgggcaaggcaagaaaatatacacaatcatctcaacaatgcaaaagctgcgtccagggtaaaccttttatccgtcgactaccatccatggaacaaaaaaaagaaggcgaaaacagtttactaatgtaattgtacatcattttctacaaggaaacagactatttgagcctcataggctgctgcatcccccctcctctcatcatagcgcaaaattcctcgtagttaatcctcccatcctgtaataccccaaaaataagaatcactgtcatggaaggaaattgtaatgtggcatggaaaaaccgattgtttggcaaaggaacttacattatccgtgtcgacttctgatataatatcctttatggtacttgtatcgcccatttcatgctcgattaaagcggattccagttcatctcttgtgatgaagctgcataaaattgaggtaattctctagtcagatcaaccatggggagtttgatgcgcagatggcattgtacaactgcctttttccaatgatggttctagactagtgagcactagatattataaaatgtgaacctgtgaattatgatcataatcatatttggcggactgccattgtgaaaatactgcgacttgtgagtttttttcaatgtgacagttcagaatactcacccactgttgtctttgttttaaaaatttggagacccctttaaaaaaggtttttttttttaaagttggggttaagcctggggcagtgataattccacaaagtggatggatccattgccgtctacatcagcctggaatggatcagagaaggtcagcataaaaggtcaataaaccatggttcagaaaaatactgtaacagtctaggattggtgccatacagcttccatcaactgctttacttcagcttctgaaagctttgatccaagtttggctaatcctgctttgagttcttcatatgtgatggtcccgctgttgtctgtgtccatgtttgtgaacatttgcttcaggcccttgatctcctcctcattaaggtttgaagcaataacctgcatatacaattgcctgtaagcacgagagaagaaaaggcaactaaattatcggcatgacaataataaccttcagagccatctttttcagcttgttcattgctctgaattgcttcatcctagaaagaacagcgctgtcaataggtttgtcagatgcttctccatctctgagccagggatgttctgataacatagaaaccatcatttcttttgcaatttggactaatattaggagtttaatgtatggttaagactcaagaagcttacggagaacttgggccgaagtaattcttttctttggatcttgtgtcaacatctttctaacaaggtctttagcactctcggatattgatggccatggttgactctcaaagtcaatctccccttgaagaatagcatcaaatattcccttttcagtttctggaaagcaaaacagaaaattaataacaatcaaacaatgcaccactgcttaattgtatatatggatttatgaactggaagtaaaaatggatggtataagcaaacgtaccagccca

SEQ ID NO: 7255 - DNA, 3162 bp, Oryza sativa
cttgtgatttccccataactttacaattagtttttcttttaatctacatttaatgctccatgccatgtgtcgaaagatacgatgtgatgtttttgggaaaaagttttttttttgaagggccatagttggtgcttttgctttgcccaggcaggggagatggcttcggcggcgacgttgctcctggttcgtcgaggcatcatggaagcagccccttcacatgagcacgccgcggctcatggcggcggctggagacggctcgaggcggtggctggagattgaagacgcctgacgagtgggtccagcaacgacggaagagatgcgaacagaaaagatgacggagatggcatagttcgaattaaaaaaaaattcagtggcatctaacaaatttcgcaaatagtaatggcatttttctaaaccgtcaaatttttaatggcatgacggagggagtagtatcttgctagggtaataatacgcgacgttaatttgttctcgtaaaaaaatcgttatatgttctacaatagtctacgtacactggtgtggagaaaccatttttggtcggtcgaccaaattccataatagtcccggttccattaaaaaccgggattaaaaacgatttttagtcccggttaaaaaaaattgatccaaccgggactaaagatgatttttaagtcccggttcatcccctatcagaggcatgccagggggccgaggatctttagtcccggttgatactaccaaccgggactatagatcattttagatctttagtcctggttggtaatccctaatccttatcctctcctccacaatcacaaccacttcctcacatatcgatcctcctctcttctccccctcctcccctctcctatcttacacagatcctccccttcctccttccttcccccttcccttcctcctccctcccctggagacggatgaggccgctcctccttccttccccttcccttcctcctccctcccctggagatggatgaggccacgccgcgcggacgaggtggacggacggacgcgcggcgtgcggcgcagacgtgcgttgcagggggagcacatgcgcgcagacgtcctccctcccccaaagttacttgttgtctctttttttttttgatattttgtgattcactgatatgtaattttgtgattcattgtatggatttgagatgtataatctgtgatgtatttgatttgtgtgtaaattttttaggatttgtgatgttttagatttgtgtgtataagtaactttaagatttgtgatatggatttgggatgttactttatttgaggatttggggtttaatttgggatgtgcatgtcaaccgattcgggagaaaataaaaaagtaacaaaaaaagaaaaggggaccatccgggattgtccctatcctctctttagtccgggactaaagatagatctttactcccgggtgaaatttactctcggttatttcatccaggactaaagatagcgatctttagtcccggattcacagtcccggttttctaaccgggattacagagggttacaaaccgggagtaaagacagtttctctaccagtggtatatcgtatattgccatacggcgacgcgtgcatgttgccaattcatcaccgttggatgggcaggtgatagattcggacaccggcgtcaatgttgggcaccaaatcgcggcgcgaaacgcgtgctgatgctcagcacgtcgttgataattaattttgtttccccttccttttgataggtttcggacgacgtcgtagtcatccacatgtacagacgtacacagtcgatcaacacgcctagtgtttaataacacacgtctaaacaagattatttttttcttttttgagaactaagtataagattagttattagagacgtcgacgtacgtatcatcacgtaacgtggccaaatgtttccagcctcaaagctcgaaccacgtacgtttagacgattagttaaaagcaaggctaataatacagccgacctgttggatgtaaggttttttataacgttctctcagtctacccatataatagtgagctctttataattaatacatggtccacttgtctctctcacagagtttattggttcctgtgttcaagccggctgtaagtttatagcccgcttctcctctctttcctctcttctctccttcacctcagcatttagccggtttatagcctactattatacttgctctaagactcgttcatcaattactaagcacgcacgcccagctggcggctggcatgcatggttaattatcgattaattacgtcgttcggcatattgaattagtctgcaatgcctggctatgacgaaccaattaatatactcctctcgacccacagttggtttacagtcttgactgcgcatatatcagtatattttggaaaaagtacgaattaaccctgaactattgcgatcggccgacttaccccctaaactacaaaaccggatattcttcatccccaactatataaatcggatgaattaccctcctcgacccaatccacggtggttttggtctacgtggcgtacgcgtggcagtccagtcagcattctgtttataaaaaaatgtgagacccacatgtcatactcttcctctctctcttctctctcactctttctctctctcaggccgcggggtggaggctgtcagggagtcggtggcggctgtcgtcgacatcaatcgagaacacattcccagcccactggctcccaaagaggttgtgtgcttctcctatttggctattccccctaccaaatgtaactccggcatcagggattttggaggtggacggcaccgcggcggccagggaggaggaggagatcagtttccgaagggaagtggggttgagggttggtgcggcagaggcgcagacctacggccgtcggtggccaaggtagagtgacgaggggccgggatagggttggctggggcgacgggcggcggttgcagccggacatggcgacgggtgctactgtggattccggcggagaaacgtaagtgcggaacgggaatcagacaggggtattgctgagcctatctacgggcggaaggcgggggccatggagcggcggcggcaacgggttacgcggaggcggcggagtgggggaagctgcgccaagcaatgcgtgacag

SEQ ID NO: 7256 - DNA, 2680 bp, Oryza sativa
gggtgagcaccacctgcaccgccgccttcggccatggtttccggtcgccgtggtccatctctctccctctaatccctctcctctccttccttagggcaccccgaagctcgttcgcccgccgacgtcgtccttccgtggcttgccgtcgccgttcgccatcgtcttcctccgcgccggccaccctcggtgagacaccctcccctcttttcctctccctctccctcctagccgccgctttagcgccgccgcccgttcgtcgtcgctttagcatcaccgcccttcggcgccgcctttgcgccgccgtctccgccgtcggttgccgttgtcggcaacgcgcgtgcgtgtgcgcgcgtcgtcgccatgaccggtcggtcggctttgtgccgagccgagccggcggccgcctttatcgccgcccgttccctccccttcctagccgctgctagcgcagccgccttcgcgtcgccttttgcgccgtcgccttcgccgccggttgccgtcgccggcaacccgttcgcgcgcgcgccgttgccgtcgccgcggccggtcggtcggccttgagccaagccgagccgggtgtcgccgccccttttcctcccgagccgctgaccagtgggcccgcgtgccggcgccccttcctccttctcccgagtcgctgaccggtgggccccgcttgtcggcgccgcgcccccctccgtgctgacgtcagccctggaatatattgcgcaataaatgatttagggtttttcttttatagtaataaacacagtgaatcttctaaaattcataactaattcatccgagctccgtttaagcccattcaagtctcagtaaatcaagaaaaatgtgtagaatccattaaaaatggttttgttccctgtttcagtagtcttatagcctgtttgcaatgtttgctttgtatgtcgctagattccgtttcctccgacgctccggtgtactttgagatagtcgccgaggttcctccagcagcagagcaaggcaagtcatgcttgtcacttgaacatgttgatcctatattgcaaatgctctattgttttctttcaaatattgcattgttttataatattactatgggatggttacctattgttacagccatgctttttggatatcatgctcctttgttagcttggggttataacatgattagagtttggactaggaattgcttagctattcttagttcaactagttcacaatggggaaaatcatattaatgtttagactgttggttctaatgataatgttggattagtaccaccgctctggtgttggttaattaaaatgaatcacatggtgggctgtgggtgcatggttttgctggtcgcacccatggcagttaaggaccggttcgcgggatgccctggaagaacttatcgtacttaccacaaaccagcgtgggcaacggctgggcttgtagcgtagctttcctctagccgacgcatccaggcaagggtgggcgtgatggagtttggatgggccctgcaacggcctatgcggcttccggattcacctaggcacgagaggggactgcccgctgccttgcgaggagtgggggtgaaacctgaggtgtggtgtgcttggttagagggggttatgcgagtggtcctgtcacggcctctttccggtatgtcgtggtgacatgtcggcgcacggaaacgtgtcgtggggctgtgtcttgtgggtacagttgtacacctctgatcagagtaaaactattcgaatagccgtgcccgcggttatgggcggtcaaccagattcaccgtgattagtctcaccctagtgtaatcttttgaatttggatagtttaggtggatggttgggcctgtcgcaacgtgggctagcgttggacagcggatgtttaatattaattaattattacaactgtttaaatctttcaatttctgtttataaatgctcgctgtatgcaaatgaaccactctagctcttctttgttaattccctgcatcatacccctattacggtatgacttgctgagtacagtgggtagtactcagtcttgctctacttttcctaaccccagaggacgggtatgtgtcagatgaaggtttccccgaggagtaggcttcgtccgtgccgtcgaggatgcctgtggagtggtgttcccgctgtagtttagtcaaagtttagtcaaggcttagctcctgttgtctttcttttcttccgctgcatttatgtaagactttatgatgtttgtaagacgtggatctgtatgtcaacattgtcgtttgtgtaccccggctggtcctggacggggatttttatgcacattctgcttggaattatattcgggaatttctgggcgtgacacacgccgccgttcaaccgagccgccgccgcctcttgcgtcgtcgccggccgtcgtcggttgtcgtgagacgttttggtgagtaccatcgggttcgtctcgacgtcctctacgcgtaggtgcccttggatagcccggccgatctctctatcgccggcgaggtcgtcgcccgtgtcatgccggtgatgatgacgtcagcatgacgtcatgattcctcttttccagttttttttctaatagattaaatcttcggaaaatcataactaaataaccgtagatccgtttcaggtggttcaagttgctaaatttttctaaaataaagatctacat

SEQ ID NO: 7257 - DNA, 3304 bp, Oryza sativa
gcgatacatacggtctggctggctggcggcgcgcccgtatatagcctcgctaattaagctacagtacatacgatacgatgtgtttgttgactactagtatggcgggaaaggagcggagccacgtgcacttgtgcctcaccgactacagggacggcacctacacctacacggtgcaccacatcgacgtcgcccccttcttcctccgctccgacgaccccgacgtcccggacccgggagccatggaggaggctgtcctgcccccacccgccacgcgcctcgccacgcgcccggagaccaacggcctcgagttccaccacctcctccgcgccgccgacggaggcgacatgatcgtggccaccgacgaccagcgccgcaccctcatctacgacgtcgccgcccgcgccgtcggcccggggcacatgctgctctccgacaagcgcgtcccggtctccgccgccgtcgccgaccgcctctacgtcctcgacacctcgcacgccgcccggcgcgccacctgcttcgaggccctcgtgtacgacggcgtcgaggacccgctgcgcgccgactggtactggcgccgcctcccgggccctccctacgccgacgacggcatcggccgccctctccccggctcccgtgtcaccgccctcgcggtggtcggcgcaggcatctggaccacgacggcgccggcggaggacggcgtcgcctccgtccgcccctgctcccggctcgaccccaggcgcggcgtctggacgacgcccaagggcgccggcgccggccccggcacctactcgttcgacaccgagcggcaagcctggaggagagagggcgactgggagctgccgttcgccggcaaggccgagctcgtcccgggctgcaacctgtggttcggcttctcccgcgccgacgggtcgtcgtcgctctgcgccgccgacctcgccgcggcgccgcacagggcgtgcggtgtgtgggaggacttccgcccgcccaaggagtggttcagctgcggccgccacctcgtcagcctcggctccggcaagctctgcgtcgtcaggttcttcgccaccgaccccctcgacaaatggaggcgtagggaccctgtcgccatcatcaccgccatggaggtgcggactatgcctgcttgcgacggcgacgacgacggcggaagaggaggagaacggcggatcaaggtggtgaagcacatgtctaggtgtatcaagctcccaaattacaataaaggcagaaattgggttctctaatactcgttaaatttcactctaaaatgcacaagtatgatttctttaattaatttatagatctaaaagatgtatgtatctacataaaattcaatgcaactccaacatttccttccaagtaaatggtattaataatctctcaaaagtgaaggataaagatgatgtactcatggcggcttctcaactctaattcccagtggtttgcttcatcctcctctcatccaaacggatagctgctgtttacaattggcttattaatccctgttcagtccccagatagttattcacttgtccaaagcctgtccattgtcttgattcctactactttcctaaccaatttgtgcaggcagaaagaaacttctcctgcaaagcagacaacttacaaattaggttgagttattccacctccaaacaaactacagcttgaagatgcagttgagactgtaaaaccagcccttgaaatttgattcaccgcatcggaaccagatcctctgacgtagcggacgtccgatggctctcgtccgtccatgcggcatcggacggagtcgaggcgagcatagtgaataggctcggcccatatggtataaaaatcgacccacgcgattcacaaccatcgacgccagtcgccacctccgagccacggccgccggcgctgctaggaagcaagtcgtcgccgtcggcgtcaccaccacagcctgcgcggctgcgcctccatgtcctccctcgaacgggagcctccgctgcgtccgccgtggaggtcgcggaccgtccgctttgacgaaaccatgactcttggaggtcaacctgtcatggaagatgcagcaagagggaagcaacttgtccaaagcaacaatgcattgttgtgagatttattgttaagagcatcataagtgttgcaatttcaacacagatttgatccaagtctgtattcatgtcagttccgttctcaaattgcagcactaaattaatgatgtatatgcgaatatacctttgtttttgccattttgcaagcaaacattagggtttcgtcaaatgctcaatgcagcaagaacagcacattgtaatgttcaatgtttactgtcgaagcagcatcaacacaagtgacattcttttgctagactgaagtttcacttcaattcctttaaacgtactgaattgaaaacgaaaaattgatgcaactacaatcttcacattctcaaatagacacaacaatcaatctcaattggcaaaggcattcagtcatcacattcagtgttgagttacaaacttgcaatcccaattcacatcaatttacaatatccattcatatcaattttagatctcgatctaggattttcaagatgctgccattgcaagcccttgtagtaggttctggtgatgatattactttcatcctcaagaaaattgaaactaggaatcagtcggcaacctcgaacaactgctaagtgtatataacctgctgctgctgctactaacgaattaacaggagtccccttgaacttttatgcagggatgatttgaaggagtacactgccggcagcgagccagcaacatgctaagggagagagaacgcaggggcgagagatggggaggagggcagcgacgaggggaggggcttcttccaggatccactccacccgcggatgcgccggaggagacgacgagcggcagtgagcggccggccgaagaccacgggaaatcaggagccatcccgattttgctggccgagaagaggatggtggcaacgaaggggccctcgcgcgggagacgcaggctgtggcggtggcgacgacgccgacggtgcagaggtctcccctcccccatttgcttcctagccggccgcggctgtggcgtcgatggttgaggatcgcgtgggctgatttttctaccatatgggccgagtctatccgctgtgctcactctactccgtccgatgccgaatggacggacgagagccgttggacgtcctagtgctttaggatctggttcccacagcatcagtaccccacccggtcatgaacacttccgtttttttgacaaattgacccttt

SEQ ID NO: 7258 - DNA, 12508 bp, Oryza sativa
tggttgggcacattggtgaaatatggatgcatgaagacatactattcaaaagatgccctttacaagaccatcaccgctcatcctaacaaggatgggcacgggctcgggttttcgggtggaagtcctgtgtctaagcgtgtgatggtaaatgggaaagaatgcttgatgttaatgagagaaggtaaagctccacaagaaagtgaggtgactagtcttgtgagccgccagggacccggaacatccggacaaaccgggcgaaacctccgggtgggagtctctgtctctcagaaattcccaccaggaagttccggccggtttgctaggaagttccgggccaatggccgtgcacaagacatgtccggaagttccgggcataatgccaggaggttccggccagatggtctttactatgattcatatgtaattttcaaaaattcagagggcaaagtggttgcttattttaatgggaattagaatgatgagtaccgcacttgtgtgtgggtgccaaaggctttggtaactaacatcaagggacccaaacttagacaagtttgggttcctaaatcccaagcttgatttcttttgtaggcatactcctccggtggttcaagttgggttgtggacagtggttgcaccaatcatatgactggagagaggagtatgtttacaagtttgatgaggagaacgaaactcgtgagaatattgtgtttggagatgatggtaaaggaaagataattggtctaggtaaaattgccatctccaataatcaatctctctctaatgttcttcttgtcaattcattaagctacaatttattatccgtttctcaattgtgtaagttgagttacaattgcttgtttaccgatgaggatgtgaccgtctttagaagggatgactcctccgttgcattcaaaggcaagttgaagggtgatctctatcttgtcgatttcgatgtggatagagtgaatccggaagcttgtttgattgctaaatcctccatgggttggctatggcatcgtagactagcccatgttggaatgcggaatttggcaactctctaaaggggggacatatcctcgggctcactaatgtcacatttgagaaagatcgtgtgtgtagtgcttgccaagccgggaaacaagttgggaatccacatcctatcaagaacatcatgactacaacacgccctcttgagcttctacatatggatttatttgggcccgttgcttacataagtattggaggtaacaagtatggttttgttattgttaatgatttttcccgcttcacttgggtgtattttctccatgacaagagtgaggctcaagatgtcttcaagcgcttcgccaagcaagcccaaaacctctatgatctcaccatcaagagggtgcgaagtgacaatggaggagaattcaagaacactcaagtggaggaattccttgatgaagagggaatcaagcacgagttctccgcccccttatgatcctcctcaaaatggcattgttgagaggaagaaccgaactcttattgaagccgcaagagtaatgcttgatgagtacaagacttcggatatcttttgggcggaggccgtgagcaccgcataccatgccatcaatcgcctctacctccataagatactaaagaaaacttcatatgagctcttgagtggtaagaaacctaatgtttcgtattttcgtgtctttgggagcaaatactttattttgagtaagaggcctcgctcatctaagttatcacctaaggtggatgagggattcttacttggctatgaatcaaatgcacatgcctaccgtgtcttcaacaaaacctctagtattgttgaagttacaagggatgtgacatttgacgaatctaatggctcccaaggagagcaagttgttgtacatgttgtagatgatgcggatcctagacaagcaattggttgtaaggctattggagacatacgaccagtcgagacgcaggatgaccaagaagatagggatcaaccttcgtcatcgacatccaatagccctacaacaagtcaagagtcagttgacccggaagtttcgggaccagatgatcggaacctctggacctctccaggccaggaagttccgggtccatctgccagaaagttccgggcagaggacagtcaaggcgtgcctacggcacaagtggatgggattgatgccgagggcactgtagagcatcctgatcaggctcaggtcccctcggtgcaccatccaagaatacatcacactgtccaaagagatcatcccgtcgacaacatacttggtgacataagaaagggggtaactactcgttctcgtgtcgctaacttttgtcaacactattcgtttgtctcttctttggaaccaactaggattgaagatgcacttggtgatccggattgggtgatggctatgcaagagaagttgaataacttcactcgcaaccaagtatggacattggtggatgtcacatcctgatttttgtcttaggatttataaattatttaataaattattaatagaatttatattaaatgttctttaatttacaagtgaagttaaatgtgggaaataaaatttcctaaatataaagcatggacggatttaatttttattaaattctccatggttaattatactctctggaattttctcggatttttcggagctcaattattaattttaatcatacaaagaacagttcagtaattatttgatcaataatgatctaattataattgttaagtgcttttcttgtttaaaatccttaaattataaattgttgtttaaaaggaattattagaaatgattttaaaagcttcaaagagaagatctaattttaatttgctaaatctcaatataaaaatgagctagataaaattttattaaatactttgcttgttcctctattttctagaattttctgggaattatttgagcaagggaagtatttttaataattgaaacaacatttcacaaattgttttatttaaaaaagttcaaaaaacccctccctaagccgttgggccgaattcggcccaatactctctctctctcccgcgcggcccaagccggcccagctcagccgccgcccctcctcctccagccgccgacatgtggggcccacatgtcggaggtttcttcaacctccggccggcctcaggccgagcccgagtcggccgaccgagcccctcttcctctccgaatccgcatccaatccggtcctttttcttccgtttgtttgaggggtttttatcctctcatcctcctctatcttttccctcaacaatcggagcaagaggttgagtattttatccgaatcgagttcgtttcgattttatccccaaaaaccgagtttagattttcccgaagcgatttcttgcgggaggagtccgatctcttcaatccaaggctataaataggaccacctcatcgctctctttcgtttgccccctttcccgagctctctagtgcgccgtagagtcgccgccacgccgagttagtcgccgccgccgccggccgatgtccagccgcgccgccgcgccgctcctgccgtcgccgccgcttgccgccgccgccaagaggtgcgccgaggagtgaggaagcccggccgcccgttccccttcgccgtcgcccaccggagctccgtcgccgccgttcaaccgagccgccgccgcctcttgcgtcgtcgccggccgtcgtcggttgtcgtgagacgttttggtgagtaccatcgggttcgtctcgacgtcctctacgcgtaggtgcccttggatagcccggccgatctctctatcgccggcgaggtcgtcgcccgtgtcatgccggtgatgatgacgtcagcatgacgtcatggttcctcttttccagttttttttctaatagattaaatcttcggaaaatcataactaaataaccgtagatccgtttcaggtggttcaagttgctaaatttttctaaaataaagatctacatattaaaattgtccataaattgaattaaatttatttaattctttttaaatgggctttaattagatttaatcttgtaaaattcataataaattcatttgaagtcggaataaggccgttcaagtctcataattcatctaaaatcatgatctacatgtttgtttactttatatgtattgtttatttggtttttattagtctttttcttcgttttgcgtgttagcttgtcgtttccgtcgttgcgaagattcgtgagtgcgtcggaagtgatcaagaagattaattgaagatcggttattgcaaggcaagtcacacagatcctaaacacaatcctttgagcatgttgatcctatatttaaattctctatttatttcaactatgcatttattttcgaatgtcactgggtggtgtgaacctattcctttgttatggccaatttgcattgaatgccctattccttgataccttgggtaataaattgattagcttgaaccttatgtattggtttggttcagctaaatgttatatatataattgcttagcaatgcttagaaacattagctcactaatgggatgaatcatatatactacattattatttatggttatatttaatggtagctcacgatggttaatcgtgttatgataattaattggtaattaaaatatgattaatggtgggttgtgagcacatggttttgaaggtcgtgctcatggcaattaaggaccggttcgcgagctactgttgtgaaacatttaccgtgccaaccacaagccagcgtgggcaacggctttatcttttgtatagcgtgattcattatagtgcgccagactgagaagtggcgagaagtccatgggggtcgctggggagtccatgccttgtttataagggggtgattatgatccaggaaaggtgcgctgtaatggattatgctgtgcaaggggtattgtcacaactcctttccgaggtaccgtggtggtactgagacacatggtgacatgatgtggggttgtgtcttgtgggtacagtggtacacctctggccagagtaaaactattcgaatagccgtgcccgcggttatgggcgggttgagcaatgtttttcgtgattagtctcacacctctcacaataattatggatgtaataactggtaataatttgcttagctcctggtttggagttagatctgttcagccgggtatggttgttcaggatggttgggcctgtacagcatgggtgtgctgttcagtgttgattaaaacttctgattaattaatctactgttttactactcttaactctttgctaaatgctgctttcgcaaatgagcctatattatgccatactttggaatccttgtgcacttgcatatttgctgtgtggcttgttgagtatgtcatatgctcattcttgcaataatcatcaaacctcagttgaagataaaggatccagaaggagaagacgtttggcttataccccagttgagctgcctgtgggagtggagccggagcttcgctagattttattttccgctgcagttttcttcttgatgaggattaagtgcctcataagtaagtatttatcgttttagttaatttgatgaatctgtatattaaattgtcagtttgtgtacctcggctgattcctggacgaggattttatgcacaaataagttcggaaattattagtgaatttctgggcgtgacaagttggtatcagagccatctcaactgttggataagccaaatggtcaaattttaaggacgaatttttccgacaaaaatgatttgtgaaaatttctcctttcttccttatctagaattctttacaaattgtttcattgtctactctcttctctcgttcaacttgagtagttctgaaactaaactagtggttgaaacctgaagacgccaatgaggtctactgatggaggttaagtaaagtggatcgaggaaggaccaaagtgcccagatgtcaagatggaatgaagttggcatcctgccttagaacctatcccgccaaagtgtctttgaagaatagttagtagggtagaacgctgttgtttgctttgtgtgtaggtatggttgcattcccgtcatagatgtagtccagtgatgagcgtgcaactgtactaggttgtttgcttaaccaacttaaacaatataatggtctacacacatcagatcagtgttaacctggttaaggtcttgtctttagtgtaacctctctccttctatcttttctaatctgcaacagatggtgaacactcgcgccagtggaagtggaaacaataacaatgaagagaaccccacccttgctcaagtgctggctcaacagacccaattgattaacatgttagtgcaacaaatgcagaaccagcaagggaacaacaatgtcaatcctccgccgccgcagaacaagttagctgattttcttcgtgtgaggccgcctaccttctctagcactaccaacccagtggaagtaggtgattggttgcacgctgttgagaagaagttggaactgctccagtgtacggatcaggagaaagttgttttcgcttcacatcagttgcaaggatctgcttcagaatggtgggatcatttccggatgaacagagcagaaggacaaccaatcacttgggcggagttcactgaagcattcaagaagacacacatacctgcaggtgttgttgctttgaagaagcgtgagttccgggcacttaagcaaaaggatcgtactgtgacggaatatcttcatgagttcaatcgtctagctcgctatgctccagaagatgtgcgtactgacgaggaaaggcaggagaagttcttggaaggtctgaaggatgaactgtcagttatgttgatctctcatgactatgaggattttcaggagttggttgataaagcaattcgactggaagacaagaagaacaggatggacaatcgtaagagaggaaggattgttttccaggaggcacaggatagtagccagaggcagcgtatcaagccactccaaattggtgaatcttcttccgctggtcaagaacagtcacaacagttgaacatcggtggtgagatcaactcagagactaatgcaagcaatgaagacaatgatgggcaagctactcaatcagtgtcatttcagcaggatcagtctcaagaagataacagtagtggaagggagcagcaggtatgtttcagctgttacaagccaggccactttgcaagagagtgtccgaagtcacagcatcagcagccgcaaggtcagatcaacaacattgtcgtcacaggagccaatgcagtgccagttgcgtcttcaagagttgtgtcttcaagtgttacaactcagccaccagtttcaaagcggcagtagttttctttaaagccttagaataattatcggagttatggaataagatagactgcagtttacctatgcccttttctttctagccgttccgaatctcgggacgagattctttgtaaggggggtagatttgtcacatcctgatttttgtcttaggatttataaattatttaataaattattaatagaatttatattaaatgttctttaatttacaagtgaagttaaatgtgggaaataaaatttcctaaatataaagcatggatggatttaatttttattaaattctccatggttaattatactctctggaattttctcggatttttcggagctcaattattaattttaatcatacaaagaacagttcagtaattatttgatcaataatgatctaattataattgttgtttataatccttaaattataaattgttgtttaaaaggaattattagaaatgattttaaaagcttcaaagagaagatctaattttaatttgctaaatctcaatataaaaatgagctagataaaattttattaaatactttgcttgttcctctattttctagaattttctgggaattatttgagcaagggaagtatttttaataattgaaacaacatttcacaaattgttttatttaaaaaagttcaaaaaacccctccctaagccgttgggccgaattcggcccaatactctctctctctctcccgcgcggcccaagccggcccagctcagccgccgcccctcctcctccagccgccgacatgtggggcccacatgtcggaggtttcttcaacctccggccggcctcaggccgagcccgagtcggccgaccgagcccctcttcctctccgaatccgcatccaatccggtcctttttcttccgtttgtttgaggggtttttatcctctcatcctcctctatcttttccctcaacaatcggagcaagaggttgagtattttatccgaatcgagttcgtttcgattttatccccaaaaaccgagtttagattttcccgaagcgatttcttgcgggaggagtccgatctcttcaatccaaggctataaataggaccacctcgtcgctctctttcgtttgccccctttcccgagctctctagtgcgccgtagagtcgccgccatgccgagttagtcgccgccgccgccggccgatgtccagccgcgccgccgcgccgctcctgccgtcgccgccgcttgccgccgccgccaagaggtgcgccgaggagtgaggaagcccggccgcccgttccccttcgccgtcgcccaccagagctccgtcgccgtgtcacgcccggaatttctatccaaaattccaaacgcttacatgtgtgtgaaccctcgtccaggaatcagccgaggcacacaataacaaattgataatagagtacaattattactctaattaatacgcgaataaaatgtcattacagaggtagatagttcctctcaatcaataaagatctaagcagcggaaaataaataaacggcgcagacggctccactccacaggcagcttgaccaaggctacacctaatcctccacaccatcagcctcattgtagaactcttcctctgatgaatgattgcaaggtgagtatatgacatactcagcaagccacgcagcaaatatgcaagtgcacaggataacaaaggatggcatagtagggtttcatttgcaaaagcagcatttagcaaacatttgagaatttgagaaaacagttaagtaattaaacaatattaatccaacgctatacaacataccctgttgtataggcccaaccattctgaacaaccaccccggctgcacagttctatctccaaaccaggaatataccattccaaaccaggagctaaacaaattattaccagtttaagcatcttttacaacgatgagaggtgtgagactaatcacgaaagacattgttagacccgcccataaccgcgggcacggctattcgaatagttttactctgatcagaggtgtaccactgtacccacaagacacaaccccacatcatgtcaccatgtgcctcaataccaccacggtatctcggaaaggagttgtgacaatacccctcgcataacacaatccactgcagcgcaccttcctggatcataatcacccccttataaacaaggcatggactccccagcgacccccgtgggcttatctccgccacttctcagtctggtgccccgcaatgaaccatgctatacaaaagataaagccgttgcccatgctggcttgtggttggcacgataaatgtttcacaaccgaaactcgtgaaccggtccttaattgtcatgagcacgaccatcaaaaccatgtgctcacaacccaccattaccaggttttagttggcacattaattaattaactaatcacgattgaccatcgtgaactatcattaaaccatcatgaaataatagtgaatcattagttatcccgaatatgtgctaatgtttctaagcagggctaagcaattatatctaatatctagttgaactaatataaataaagctcaactagtcaaattgtaataacccaaggtatcaaggaataaggtaatcaagtacaaaagggccataacaaagaataggtcaattccacccaatgacattcgaaaacagatgcaatagttgaatagaaacaatagctttaaataggatcaacatgctcaaagggttgtttgggatctgtgtgacttgccttgctggccttggaactcttcaaactcttctccggcgaaaacggactctccggaaacgacggaatctaagcggaaaagagcaaaatcaccaaaacagcacataaacaaacatgaacagtacatgtggatatttttaatgtgtagatctcaattttagaaaaatttagagacttgaaccaactaaatcggagctaagatgaattagttatgaatttttaaagattaaatcggattaaaacacttaaatcggttagaattgaattatgacgcaataatgaattatttttaaaaaggaaaagagggtttattgcgtcagcgggctagggtttgggtggaccgggcgcacaggcggcggttcacgcgaacggacggccgagatcgatccatccaaaacggacggccgagatcgaacggtctacgaccggctcacggcggacgaccctgatgacgtcagcaatgacgtcaccgacagcggcggcggctcggcggaggagatggctcgaacggcgcacgctcgccggcgaacggcggcgcgaggatgcaaacggagggcaccaagacgaagaggacaacgcggcgaactcaccggtgacctaaacggcggcggaagaccaacggacggcgacggcgacgaggaggaagcggcgggaaccttcgggtcaacgacggcgatgctgctccggtgatctccggcgacggcgaaggggcggacgaggacggcgacaacttggcgagcacgacggtggtcttcccgagcgacggcgacggctgaaacgacggcggcgcacggctggagcggcggcggcgacggcgaagctagggcacacggcgctagagcgattccgacgacgagaggcgaaggcaagggtggcgacgggtagaggagacaccgggggtccttttaaaggggctaggaggcggcggcaaaggcccacggcggccggcgacgaggaaggaaagatcgggaagaacgaatccgagacaaactcgaatccgacgctttccaaaacgatttagccaaagattccaaaggagaaaaggtagaggagatcccgaggatcatatcccctctatcaattcggccggagaaggaaaggagcggccggattggaaagcggcggcggcggcggtgcgctagggtttcggcccgaggaggacgacgatcccgacaggtgggaccaacctgtcagcgacagcgcgcttgcgcgggcggctgcggctgcggactgggccggctgggccgaggagagagaagagaggttttgggccgactttcggcctaaagccaaaagaagactttttaaaacctttttcaatttaaattatttcttaaatgcaattccatttattaaaaatactttcttagctcaaataaatcccagaaaaaatctaggaattatagaattaagcaaagtatttaatgaaattttatctggccccattttatattggaatttattaattaaaactagatcttctcttcaagacttttaaaattatttctaaaaattccaattaaacaacaatttatatattttgaattttcagggcgtgacacgctgtcacaccccgaagttttcctcccaagccaaaattgtaatttttataaatgaccctaagaaaatgctggtgaaatcaggagaaaaccctatgaaagtaatgcaaataataatcggatttgacatgtggaatttttcttgagttctacatgtcgaaactcattaacaggatttttagtggaattttcagagctctagaaataattttaaccaattaaaattgagcaagcaatattttaattccagggaaaatcctttttcctttttctttttcttttccctccctttttcctcctttttccgaatgggccgccggcccattccctccttcctcccctcctccttgttgggccggccgcaggccgaggcccagccaggccgccccgccgcctcctctctcggggtcgccgacaggtagggcccacctgtcgggtccttcccccacctcccgccgatctcgctcgcaccgccgcgcccgcaaccgccgccgcgccctcgcctccgcctcctccgggccacgtcgaccacgcccgcgcgtgcgccgcgtctcccgcgcccactcccctctctctcccgcccgcgcccgcgcccgagatggccgggattcgattttcgaatcccgcctctctctcctcccctactccccacgtcggccggcgattcccgcctctcccggccacgtccggttccctctccccctatttaagcatcgccgccgtcccctctcactttttccccatttcgccgcaccctctcgagcctccgatcgctcccgcgccgtgcaacgccttgccgccgcttttttccgcaactccggccgccactagccgccgttagggtcgccgccaggccggggctgcaggaat

SEQ ID NO: 7259 - DNA, 5193 bp, Oryza sativa
gatgaacatggagtggttgtaaggaacaaagcccggttagttgcgcaagggttcacccaagtcgagggtctcaattttggtgaaaccttcgcacccgttgctcgtcttgagtcaatccgaatgcttttagcctatgccgctcaccatatttcaggttatatcaaatggatgtcaagagtgcctttctcaatggacccatctcggaattggtctatgtggagcaaccaccggggttcgaggatccaaagatgccaaaccatgtgtaaaagctccacaaagcgctctacgggctcaaacaagcccctagagcttggtatgaatgtctccgagattttcttttgaaaaatggttttgaaattgggaaggcagacactactctcttcactaaaaagtttgaaaatgatttattcatttgccaaatttatgtcgatgacataatttttggttctactaatgccactttttgtaaagaatttagtagtatcatgactaaaaggttcgagatgtctatgatgggtgagctaaccttcttcctcggactacaattcaagcaagcacaagaaggtactttcatctctcaaaccaagtacgtgaaggacattctcaagaagtttgggatgaaagatgccaaacccatcaaaactcccatgcttaccaatggtcaccttaatcttgatgaaaatggtaaatgtgtggaccaaaaggtatatcgctccatgataggatccttgctttacttatgtgcatctcgtcccgatatcatgcttagtgtttgcatgtgtgctcgctttcaagcggagcctaaagagtgccatttgattgctgtcaagagaattctaagatatttagttcatactcctaatcttggcttgtggtatcctaagggttgtgactttgagcttttgggctattccgattcggattatgcctggtgtaaggttgatagaaaaagcacaaccgggacttgccaatttcttgggcggtcccttgtttcttggtcctccaagaagcaaaattccattgcattatccaccgccaaagccgaatatgtcgccgccggttcttgttgtgcccaactcctttggatgaaacaaactctaaaagactttggctacaacttcaccaagatcccactcctatgtgacaatgagagtgccatcaaaatagccaataatcccgttcaacactctcgaaccaaacacatagatattcgccaccactttttgagagatcatgagaccaacggagacatatgccttacacatgtgagaaccgagagccaattagccgacattttcaccaagccgttagatgagaaaagattttgcgagcttaggagtgagctcaatatcttagattctcgcaacattaggtgataggtggttggctaatttatagtcaaacatatatcactaaaatgtaaattttaaaaataaaaaaataaaaaaaaattgtcttgagatcacttcttggtagaagatgatgttgataccaggaataaagctcaaacattccccctttatccaaaaaccccttttgtgaaaatttttgcaaaatcctttgtgtgccttttattgcgaaaatttggtttttatccccttcttgtggtgtatattgaccattgttatgtaatgttgattgttggctggtcatatgcatcataagtctctgcatgtccatagttctctattttccctcattgaactctctcttctccttgtttttgggcctgactgccctttatctgtcaggccggaagttccgagcctccctgtctggaacctccgggtgtcggggagtatatattctcagggggagttagaaaccctagtctctctcctcattcttctccctccccgacgccagccctagccgccgctacagtgccccgagtggcgattttctcttccctccaatcaaattcgattcttctccgtggattcatctacattggtggctgggaggttctttctgtgatcgattcacagtttcttctctcaaggtagcactttttgattccctctctcggttcattgtgtttttatctcgatctctaaatctgtgaacctagggagaaaaccacttggatagtcttgtttctgctaccttgcagatcaccgatctataggatttgttcacatgcattggctatttttgagacctctgttcttcatttttgccggccgaaagttccggtgttcttgcacccggaacctccgggcgctgtccagccaacctaccattcttgcttctctcaaattctgcctaactactgcactccaatttgttgattcctgttgcagtaagctctatgcctcgtgagaaaagacagaaagcctctcaggatgtgtccggtgatgagagtcctcctattcggtttcctcgtggtcgtttgggtaaagagaaagtggttgagggcggcagtggcagcggcactcgtacttctcctaggtttaccaggcaatccagcaaccgttcagttcagattcgggatgttgacagtggtcaagcaagtgatgctcctaatacaagaggtcgtgggagaggtggtggtcgcagttctggggctgaaagggcctctcatgatttccctgttggatctcgtgagaatcccgttcggctctacaagactcttggatttgacaccactcctatgcaccacattggaagacccaagtccaactaccttcatcagcttgccaccaactaccttcatcagcttgccaagtgcagaagggaccgtttgattgatccagagacacagcctgaggagtcacaggatcctcgtttcaggactttcactcaattggattggtataactcagtgattatggccagagaaaatccagtggttgagatgaagtggattgattgggcttacatgaggaagaagaacaatgaagtgttcaatcaagtgatgcaagtgtgccacaacaagaatcttggagatattcttgccttggagtatgattggaatgaggaggtcattgcacagttctatgcgacagtattctttggtactactaggaaggcaactccttatgtgaagtggttgactgagggtgttaggcacaagatttccatggtacagtttgctgagatattgggcttagaggatgaggatctcaataggcctaatattcatagtgaagcacccctccccatgatcaagactaagttcatgtatacaaaggatgctcctaggacttgcatgggatctactcatggattgcatcccaactacaaggtgttgtactccatctttcgttggtctttgcttccaaaggttggagatgctactgctttgccatccaagcttgctcatcttctcagtcgcatgcgctacaatcagcctcccttcagtgtgatgaaattgatttggtatgagattgccaacaccattcttgagcctaagcggggttgcatctatgctcctttcattatgaagatgattgagacagtcactggggtgttctacatcaaagatgggcgccacaatccttttcgtcctcgtgttccaccttcctcttctccagtggtacatacatccattccttctacctcagctggtccttcttctagtgccccaccgagatcctcgagttcttctcccatcaagaaggcacttcaggcaatcttctgtatgtgtgctaaaactgctatgaaagtgaagaagattgaaaggcatcagaaggaagatagaagagaggttgggaaagaagtgtcagatgattctgaagatgaggtctatgttgatccatttgaggcttatgaggcagcccgcaacgttgccggtgaaggtccatccacctacttcaatgaagagtcttctcaatcagatgatgatgatgatgatgaggatgacaccgaggcagctgctgaggatgctcctactgatgttgatgagggcgacaccgctgcacagtccgatgagtctcatctctccggcgataccgagattgttccctcagatggagatggagatgagtgatcctcttcttctcttcgtggtttcttgctttttagtgccttgatgccaaagggggagaaattgtgaattgaagggggtcatttaaatctttttgctgccttgactgttgtctagtcatttggccggaagttccgggtcctgtgatccggaggttccggccagacagatttcctctctattatctccaggcagatttcctctctattatctctctctctctatggacatgtaatcatattctattatggttggatgtaatgactgttagatgctttattatccttatgtcagtaagttagaccatatgaatgttgcattttgatgtgatgtagtgttcttttcatctttttgagtgattgccttgtcatctagtccttcttcttgcatttcactcattattcaagcactcacatctgcatcttatttgattgagggtagtgtgaagtttcttttgagctttccttcgtttttatgcatattgtattcatctcatttcattatatgcatatctttagggggagcttcacacttctctcatcattccaaatttaaattctattatctttttgtgtgctttaaccatgttgtcatcaatcaccaaaaagggggagattgaaggtgcacttaaaccccctagtgggttttggtgattaatgacaaggtggttaaaggggactaacgtgtttatcaagtttattcacaggagtttagtcccaaagcaagttgtgatggctaagaatgcaaggagaccccccaattcaaatgttcctaagtgcgaaaatcaccgaaggtgattagactaggtttttctcttttgaaattgagtttaggaaaatccgtactattaagaggggtttcaagtgtggttctagggtatacaaagtgctcttagtcatatccatgagtcaaaatattttttggaatcatttttgaaaaatgattttctccccgggacagagagggctacccggaggttctggccggaacttccgggcaccatttcattgcaaaaaatttcctaagtgctgcccggaagttcctggcacttttgcccggaacctcctggcaggtttccagttcaagcttgtgagtagcggctagatgacgtcacctagccgttatatatatggatttcgttcccaggtcactctttggctattccacttcagttctttcatgttctagggttttctagccactac

SEQ ID NO: 7260 - DNA, 20451 bp, Oryza sativa
ttaggccctctttgtttagacttataagccaacttataagtcaaaaagtctaaaccaaaacaaacaagcagcttttttatttggcttttttaagccataagccactctaacactattaaggccttctttgtttaggcttataagccaacttctaagtcgaaaagtctaagcctaaacaaacaagcagcttttccgtttggcttttttgaagccataagccactctaacactattaagccaaaagctaggttgaagaagcttttttggcttatgtgaggtagatgtatgactcaactactaaacttaggacattaaatccaccggcttataaatcatttaagccaataagctgacttaaaagtctagcccaataagcctaagcctaaacaaagagggcctaagccaaaaactaggttggagaagcttttttagcttatatgagatagatgtatgactccaccactaaacttaggacattaaattcactggcttataaatcatataagccaataagctgacttaaaagtctaggccaataagcctaagcctaaacaaagagggccttaagctatcattaagcttattagctagcgctgtttacgagctctagtttattcggtggcagatctagaaatttttacaagcctgggcaaacctaataatagagaactacaattaaatccatacaaccacgtgcatgatttagtatagatcgagttctaatttataaagaagacaaccaatgcacgaaattatattgatgaaataaaactcgttaattgttaatgttgaatactagacattataattaattatatgtatatagctagtcattttgctagtatatgtgctgatccactgatctcatccattagaactagttgattaagcatgtaatttgctactagtagtattttactcaattgtatgtggctgaacacctgaacttgtatctaagcatggtaattaacataaactaataactactcactactataaaatatcaaataggtgtcggtactatagatgccggaagtgctaaaaccggtacctataggtcttttaccacctcagcggtccgaaaacacaaaaaaccggcacttttaagtaattataggtgtcggttctataaagaaaaccaacacctttaattaaagaaccgacacctataataattaaatgtgccggttttttttaaaaaaacgacacctttggaattgagccgagccggaccggatgagatatttcttctcccggcggggctcacacccggtggagataaggtcgatttttctcgacttctcgtctctcgctctcgaggcgccctcccctgcgctagatccgacagggccgggaggggaggcgcggtggcggctgacggcatgaaggggaggcgatggtggcccggcaggggcaggaggggcggagacgccctcccctccgccagatccagcaggggcgggaggggaggcgcagtggcggtggacgacatggaggggtggcggtggcggcccaatggtggaggggaggcggtggtggcccggcgacggtggatcctcggggcaacggcggcggtggcgccctcccctctaccagatctagcgggaggtgaggcagcggcggcgaaggcggtgacgtcgacgtcggggggctttggatccagcggcctcttcggatctgaacacctagtgagctgatgattgtctgaacatttgattcaatgatgtgaaaatttgatgaacatttgatcaacttgttgttcattgtctaatgtgaaaatttgatgaacatttgatcatgagcttattgttgattgtctgattgtggattgttttatcttcttttttatttatttatggtgctttgaagcatcggctcagctcaaattgagccgagccggagttttttttgcaaatcatatacctcaaaggtgccggtttgtctaatcagtgccgccaacgtggtgccggttgggaaaaccggcacctaagggggtttcccaaccagcaccaaaggccctttatgtggtagtgactgcacagtacggctacatccggtggagcttgggcacctgccgaggctagctgggccctggctccgccgctgagattattcatatcacctcaacagttttaacttcaacttattatgtgtaaataaaataataaacactagctagcaaagtactaactaaatacaaatagattggaaatataacaaaacaacaagcataaattgatagtgtggccttatatactaagtatacactaatcaagctcacccacatgttgggtcgagctagctagcgagctaaaattaagctaaacttgaccggatttattatgactatgagcccctttaaatcgtagaaataaaaaaaggggaaaaacacgtgattctgataggaatataagtacataaagcacagaattacaaaacacagaaaaacacatgaataatcatttagttagaccgcaagaaaaataaatacagtaatcggatgagagagttaggtagactcaaaggaatttcttcaagaggttggacctcttgctgaatttcctccaaaacctacatgcaatgacccattccatagaaattttatagaatttggaaaactccaatccttcgaattaaagggccaaatagaaaattttctataggatttcaatcctatgaaattcctgcataatcctttgattcaaaggggtcttgtattttaggctgactttgaaactattgatatatataccacttgtgttatagtgcatagcttggtccacatagtatgtttaagctgatctgtaacatcccggcctagggcttaataggattaatagaatactcatatcaacaagttgcaacttcttttccggaagccaatctccaaagaactccagggttaagcgtgctaggcctggagcaatttgggattcgaattttccgggtgcacacgagtgaggacaaagtgtgcagaaaagacatgtgttggtctgtgagggcagtctatgacctataaaagctatcagatataagtgggcccggcctgggggaaggcgggacgttacatgatctccatacgggcccggcctgggggaaggcgggacgttacatgatctccatactagttgatataccacttgttataagctagttgtaccacctgttataatgtgtagcctggcccatagagtatgtttgagctgacctcgaaacgtaccgtgcttgttatagagtgtaacccgccccactaattatgggccacccaagtgtaaagaccaacttgactcgatttattttgactatgagctcaagtatgtttaagctgatctcgaaattaaacaagttgatataccacttgttatagtgcgccggacccactaaccatggatcacccaagttacattgggtctgttccaccatggattcaatcagagtcataactttagatcgtggacttacacaatccaaaagacagtctcatggataagaactactcatgtttgaagttgtgttttttcatcatcaattatcgatatgagatttaacccaacatctcgacacaaacacgtcaacatatatactccatatatatgtatatgtagagacatatatctataactaatataaatattcgtatttttccggtcatcacatataatttcgtccgatttttcgtccatacacaatccgattaggttagagatagcgatggaaaaaaaattgcaaaaaaaaaaaaatcggcagccgccgacgccaccaccgcctgcctccggctatccgggccgccgccccgccgggccgcagccgcctccatgccgccggatctagagaaggcgaggcccggctcgccgcctcgacgccgtcctggccgcagcaccgccggatctggcggaggcgaggtccggccggccgtctccacgccgtccgaaccgccgcctccatgtcgacgccgccactgccaccggatccgccgcgggaggaaggcgagagggggcggagcgagccgccaccgtcgccacctccggcggatatgccgcgggagggaggctagaggggcgccagatcatttccaccgcggccctcggccgttgccaccgcagccgacgccaccaccgccactgaagggagaagagacgggagggagagagggaggtggaacgtcgccgcctgtgggaggaggggaaggggagcgtcgccgccggtcgggggagggggaaagagagcggcggcgccggtggggagggagagggggagcggcggagggggaaaggcgccgctgcgccgccgatgtagtcgtgagagagagagaagaagggaggggaaagggagcgtcgccgccagtggggggagggggaaggggagcggcggccccggtggggagggagagggggagccacggagggggaaaggcgtcgcgcgcgtcgccgatgcagtcgtgagagagagagagaggggagggaaatgatttagggttagggttgccgtccttttatatatgtacgaatcaatcgtgaccgtcgattagatcggacggctgcgaattctcctgcatcgggctgccgttcccgggccgccacacaattgggccacgtgtacgctccgcacggataagttcagttttggtccctcaagttgtccccgaaacttactaaggccctaatcagtttatttttcaaagcaactgatttaattttttaaaaaattacagaattttgtttggaactattttgagccatttaaaattgctaggaaattatgatcaattatttaatcactcagtagattcagtagattgtttcaggtcaaaataattattatttccttaaatattaaattatttctaaaattcgaacatattccactacagattttatttcgatactacaaggtgtgtgtttcttttccattacagatgacttttacctttttccttttgtagcactaaaaaaatgaaaacatataataatagagtgcaacgaaacgtttaacccctcttactagatctctcgttgcaaagcacgggcatatttgctagtacttcatatatatgcatatgtagagatgtggttggatcggataagctgagtgacgagacggggtagcggaggggctgcgattgggtgggaggctgctcgaggcaagtacagattcgcctgtgccccttgtctgcaggaagcaagcagccacagccagccagcgaaccagcattatattcatccagagcggccggatcgattcacgtccaagatcgatggacgtgaatgatcgatggatgtgatgagaggtcggccatggcgcattggcgctgccgcagcaggtgaagaaagaggcgcgcagatggaccgatcgatgcgacggcccggccgtgtcttcacttgcgcacaacgccacagtcgctcagacctgtactgtgtactgctgtacaatactactggaatactcaagcacaggtcgatatatatttggcacgacatcttggctagctgcgtgtgtgttttttaatttggggggcacaatagttatttggaaaattggttgtttcaatgtcatcgaaagttcgcaagtgttactgttaagttttcactcataacgcctcaatgtcattatgtcatgtgtgcaaagacgagattaatattaattgccctcatctctttcagcgtcttatgcatggtcttgtattctcgttgtttctcttcgcgaacgtacccgcagcagccagcgtcagtgcccaagctcatatcgccccgtgcccaagctctcttgcttcccatggcacaagctcgtgtggatggcaatggagggacaccgatggctgcgaagccggtgctgacaccgaactcatcaccaaagaggacatggaacatagtatgggcatgttggcttcgtttgatttagattattgaacggattgttgccatgaattattcgcttgatggataaattgaatattttgaaaaaaaaacttaccaaatactctctcaatttgaaaaaaaaccaatcccagctatgaatctggacacgcacatgtctaggtttataggaaggattgttcttttcttgggatggagggtgtagtttaaaacaagtgatcttagcaacatatctttttaatttggagcaaacaatatgtttcaataatttggtgaataattaaaaaaaacctaagcagaccaaaaaggtgcatgtccaggttcataggattgatggctaaaataatagttatattttaaatctattattgtacgagtagcctagtaggtaaaatatgaaccaacacatgtatttttatgcattgtcgaagcattagtaggcactcggaagcggaaagggattcacaagaaggggaaacattccttaggccgagtttaattcccaactttttcttcaaaatttcaacttttccatcacatcaaagctttcctacacacataaactttcaacttttccgtcatatcgttccaatttcaatcaaacttctaattttagcgtgaactaaacacaccgttattcaatcaacagttgaatataaaaattagagttgtctattccgtgcccttcctttctacccctaccaacgacttaatttcgtacatgcatttatgtccagcgtgtatccctaccaacgaggagagaagctcgatcataacatactagccagagggaggaggaaagtttgggcatttatggatttaccgaagtaaaatgtgacatataggtgtgaattttaaaattatatgacaaacaaagaaacaaaaataagagtatgtcactcaactttatggtcaattataatttctcgtttcttcaatatgcatgtcttaaggggtggaggaaaaaaaacccgcaagccaatgcaaagaccggaccaaactgaacaatagtttcttgttcgtttttttctcaaattttttaaccttcggtttctgggtttttctattggccttgtttgtttgaacccactagtcgagaaaatcgatacgtccctaatcttagtccaccaaccatctggcccaaggcccactcttcggagcaacaaagtgaaacacagtaacgttgccgcctcaactaatttctttgtgaactagtgtacttctttttgggattcgtttgatgttcttgagagccaaagtgagggaaatacatatggcccttgccttcctttcagaaaaaaaaagacacataatagcacaaactaatatccaattcagagtatgaatgacattaccagctagatgctttgtttgctgcatatcctggttcttgatctcaacaaaggcaaggaaagccaaaggcgtgcaaagaatttttttttttgcgaggaagggtaaatctattactcaaatttagcgtcatcacagattatctgtgatataaagttacaagacccttccaaccagaaatcagagacattctccgaccgtgctttattcgctaacgcatggctaacctggtactgactccgatgaatcttcttgacgacgaaggcgtgcaaagaattggaagctgaatcctagctacaagatcaaagttgtcagcaggtggattgtaatcatacgtgcaatcagagggcagctgcattgtgattctgatctttaacaattggatcaacaaaaccaaggaataacatgcattgtgcctgcatatattggtaaaaaagaaaaagaaaaagaaataagaagagaaacctcgatctttcattcataatcaatgagaaattacagttgacagattgcatgttcttcttctcatgcgaagaaatcatcctatctacgagaatttacaagatcgcattgccttccatgcaaaccgagaacagaggaagacatgttctgattcctacaagcttctgattccacctactgcacctactgaagaacactgatcacgatgccaacaaggcctcggatttggcccgcagctgctccttctccagcacaaacatcttcagccgcggcagattcttgccggccttgttcggccgcggggccgcaatattagccgggatcggggccgggcgcggcgcgggcagcttgacgtccttgacggcgacgcgcacggcacggaaggggtcgtcgcgcgggaagttgccgttgtagatgacctcgaggtgtccgtcgtcggcgtcggagacgacgaccgcgctgagccacatgacgaggcgcagcgccgtggtccctagcctccccaccggcgtgcggacgcgcacctcgtcgcccttcttgaaggacatcttgttgatgggcgatcctgatcctgacggcttcttggagaccactctcccctgcgcctcgacggcgagctcagtgcggcggtggatgatcgggcgcgaggagcggggactcgagcggcggggaagcgccatggacgagcgccgagagctgctgcgatgatgggtggaaggaattgtggtgggggcggcgcgcttggatttatcggcagccgagtccgagttcgaattgaagtctgtgaaggaagcaaagcgtggctgtcagacacaattcttcaatccgagctcgactcggaatcggagacgtccgttacgcctcgccaccatcatgcaatcccgaatggcgccaagcaggcgggaacgcgaagctaggtgtgtgtcgccgccgccgccgccagcggtggacaaggagatgacggcggctcagcttccaccatctccatacgtagaactggtcgcaaaaatttttattatttctaattgtatttctacgtagactcatgtttcaatattctttaatttttaattttgaatttcagttacttctaaattgtattcatatattgattttagactctacttcccatgttgttttattttgaattttagttatttgtaaattgtattttttacatgaactctaaactctaattttaattttattatgtttattctgaattttagttagttttaaatttctatatgaactttatactctatttctaatatcccttatttttaattccgaatttcaattatttcttaattgcatttcgatatagactctatactctacttctaatattccttatttttaattttaaatttcagttatttataaattgtatttctatatggactctactcttctcttccaatatttccttttttaaaattttaattctgaatttcagttatttataaattgtatttctatatagactctaatcacctcttccaatattccttatttttttaattccgaatttcaactatttctaaattgtatttctatatggactctgtttttctttttctccgattaatatgagaatttctagtacgtgagagtgaacgtggagactcctttttctatctatctattatatattatatactaaataaaaggccataaaactttctacaaacgctctcaagccgccacgtgggactcctacaaacgctcctaggctgccacgtggcactatctaatctcaccgttgattttcacttaaattggtggacctgtttatttacaccattagattagatctattattaaaaaggtgatagtttttccccttaaaaaacatatgcaaccggtggctgggaaaaggaaagaaaaaataaatgtccctagggaagtacaattaaaaaacggtattgctaaatttgtgtacagtcgaatgttttaaccgtgagatcgtccagtaatattcgtttcaagcacttgaaggctgcaccccatcttacagcttatgcgaaagaaccaactgcacctaatcaagctctaaactcattagcacttcacctccatcgtaaaactaataattatttatatatttatacgaatttacactgtagttacactccacttatatatataattagtatataaatttaggatttatatatgtaattttgggacttacattataaatacactaaaattgcatatgtaattcagggaattacaatgtaaatacataccgactattttttggtgaaaaatatggcgccataaatatagctactccctttttaaaaaaaacatataaagctacctactgttagctggaagaaaaaaaaatagacatctatgtacgataaaataaagcaaaaaaaaaaagcgtactataaagcaaaaaaaaaacgtacttagtatccgtggaaaaactacggtctaaaaataggattttgtataatataaaaaaataaaatataatactacataatatacggaagtatatgcatgtaatcgagatctataataaaccaatagattagatcttgtaattaaattataagaaaaatcaatttaatttgatttatccattatttttaactattaaatctattttttaagaaaaaatcttgagtcaccgtgtgtcacgtcctataaaaagggaaaaaccttagaaattcttagaaaaaatgaaacacctcatcattggctttcacttaaattatttaaaaaagttagaaaaatataatatccacctcctcaccatcacatgtacacaacactgccatcccctccctattgttttatctattaaataaaagagaaacaataaataatatttgatgtttttttttaaacaaagtacaaacgcgggcgctcgcaacgcacgcacaatcacttctgtgaacgcacacatgcaaatacccctttgagtattttgaagagactaggctgatatattttgagattgacgaaatcaccacgtacgtcttgatatcgacgggtacattgcctactactgaaagaatttgttaagtctgaactcgagcaagttccatcacaagaaacctaaccggttgagctacgttcatttcacaataatattggatattaaaacaaccataatttttaagctacattcttggagtactcctatatctttaaaaccggtagaaccattatttctaaccgttagaactatcttataaaaggaaacacaagcgtgtattcatggtatgtcacatttcaaaaatattattgtacaattatatttcatcgttatcgtatgcacgttagcttgcgtggaacctcttacccactctacatgaaatgttcatagatggaccaactctcaaactacatcaatcatattaggctatataaacccatatatttagtggagcttcatgtctcacccaattcatcatcgaataaaccataataatacatatgcaattgaaaaaaaaagaaaaataccttagtttaccttacacttacatttcgttgacatgttttctaaagaaaataagtctaccttcttttcaaatgatgaagaagattataaataattgcttataaatatcaggtaaatatgatactgctataatataaaactaataggttagaaaattaaaaagcaattaatgtcgacgaaaacaatttacgaagaaatcatggtagatgttctatggttgtagatgttctacggttgatattttgctcttataactgtgtcaaacatagtgtacaaaacgcatgcccacgcattcgcgcgggctacattcctagttcctttaataagttaatagatttcccttatattttgcctaactggaaaaaaatccacaagagattgggtacctgttgcgtccagaactatgcaagaatcaagatacctgcataacatctaatcaatatttacaatgttcttcgatgacaagtatgacggtctatcactttgttttgcagcctgtctaggtgacgtaagcacatattcgttgaacttttttttgttgtcgtgagagcagggtgtcattgctacatttatagtttttatgtgcctaaactattcatcaatgtcctatatttgcctagtggttgcagtgacctgagtagcacccaaggttctaagttcaaatctccataggagcgaattttagattgggttatttgagagctaaaaggttctaagttcaaatcttcataggagcgattttagattgggttatttgagaactaaaatattgcatatgtctagttggatgaagagttcacgtaaaaaatacccttctcaaaaaaaaaaaaactattcatcgaggtcctaggtcctatatttgcagtttttaacataattgttggatgtagagttcgggtaaaaaaatacccttccctagaaaaaaaaacttttcatcgaggtcctttctatatttgcagttttcatttttaacattcttagtatacataattgtgtatttcctatgatgctcttctttgtaaagaactcattgatacaaactaaatgaacaatttggcacttctataatctgtacaaatataagcctgtgaaaaacattatatgttcctgaccttagtgcgctaagtgtagagtaattatacatttaacatggattggtcaatttatgttattgatcaattacttgagttgtgatgttaatataggtaattaatttattgatcaattgcttgtgatgcttgcagagatccaaatcgttaacgcgcctgtcttgtgcagtcgtgctaatggatttcataaagggagaaaacagagtctgaggacgaaaccttcatcatgagtgtcataacacacaacatgatctacgatcacgcgacacgccctgcaaggatgcacaaacgttgctccagcaagcgttgcaagcttgagctaagatgcgagctatattcgaggccactagggatgtaagcagtctaatccacaaatctatttataggcaaaattaatgggtaacccatagattataaatgagtttatggatcgatccacttgcatttctagatgcggcaatctaggttacgatgtggaaatccatgggtaaccacttatttgacacgtaagtaagtttgcaggtcggttcgcttgcatggccactattgtcagtgtccaagtcattgatgggccatggtcagataatgttcgagggcaaatcatctgccatatctcaagcgtcgataaaatggatgttctgctgcttgattcacatgtgagggcatagcatggattggctgccaattagcagttgtgtttcaaagctctttagtattatggccctctttatttaggcttaggtttattggtctagacttttaagtcagcttattggcttatatgatttataagccggtggatttaatgtcctaagtttagtagttgagtcatacatctacctcacacaagccaaaaaagcttctccaacctagcttttggcttaatagtgttagagtggcttatggcttcaaaaaagccaaacggaaaaactgcttgtttgtttaggcttagacttttcgacttataagttggcttataagcctaaacaaagagggtctatatctacgtgtatttaccattacctagcacgtgtttggacagttatccggctcgacaatgtttagatagtttttagcataaatttgttataatagcatcgttataatgttaacacacgcttaaagagataaggtggtaaatcactttttgttgcacattagagatagccttatatgtagtggtgattttgacacctaaagttatctttagagaaacaaacgaatgaggattgtttttctttagcagtagagtaaagcattgtgattgtaaacttaatatttgtctcaaacaataccaacaagagagagaggcaaagatagtattgcattgatcatgagataatagacgaaacagatcgctcgtgtatatataaaaaaatcttgatctttcattcataatcaatgataaatacacttcacagattacacgttctcttgcgaagatttccagtaaaccatcctatcacaaatacgagatcactgtgccttccatgacaccaaataaacagaggaagacatgtctgaatcctacaagcttctgcacctactgaataacactgatcacaatgccaagaacgcctcggagttggcccgcagctgctccttctccagcatctgcatcttcagccgcggcagcgacttgccggccgtggtcggccgcggggccgccatgtttgccggggtcggggccgggcgtggcccctgcagcttgacgtccttgacggcgacgcgcacggcacggaaggggtcgtcgcgcgggaagttgccgttgtagatgacctcgaggtgtccgttgtcgtcggcggcgtcggcgtcggagacgacgaccgcgccgagccacatgacgaggcgcagcgtcgttgtgcctagcctccccaacggcgtgcggacgcgcacctcgtcgcccttcttgaaggacatctcgttgaccggcgatcgtcctgacggcttcttccccttggcgtcgacggcgcggtggatgatcgggcgcgaggagcggggactcgagcggcggggaagcgccatggacgacggctacgagcgctgctagctgcgactgcgactctgcgaggatggggtggaaggaattgtggtggatgcagcgctaggatttatcggcagccgagtccgactccgagtcgaaaccaatgaagctagctacgtagcacgtcggagacggagttggagttgaactcggtgattagcttgctgtgattaatggctaatccttgtgaattctgctctatatatacacgcggcattgttgaaatcgcagatttctcgaagcctaagccgaactggtggaggtgtcgccggaggggcagggagacgacgtacggcggctcagtttgcaccgtctccatatgcaaacatcaatcggagaaaaacggaacgagtgaattatccgcttcattgacaaatcaaatataagtccctgtttctttcagcttgggattattataatatagattattgagttagattactataagttagattgttataatctgtagtagaataagcggttagttgtttcttttctagattattagagtctagattattgggtttgcaagtctaaaaagggagtggggtggcatggtgggtaatttttcacccaataatctagaaaaagctcacctaaatgagcttatcatattataataagctgggctccagattataagaagctactttaataagttgtctgtttctttcagtttattcccaataatctggattataataatctcagactgaaagaaataggggaaacaagcttaacaaataacttaaaacaaatgatattagcaatgcagcagaaaatatattgtttgaagaaaatatatcgtttgaagtgtggaataaatagagagaacctacggcttgggcgcccgatcggctgggagcaaaatccggcgctgatgtcaacatgacgtcagcgtccgatttacgtacaaaactattttaaactgatttttttctcctaaattacttatccaaatcatgatccgattgcaccattaaattcgttgcaattaaatcttcaaaacaagactacacatggatatatttcgacgaaaaaaatagcttattattgaattatttttaaatgttgcacgatgttccaccaagtatatcggaattgtttcactaagttgattgaaaatgtttcactcgtttaaatcaggtgttgtttcaccttatataaaaacaatgtttcagcaaatagcgaaagaatgtttcagttcactgcaacattagatctgtacacaatgaaacattattagtacactaggtgaaacatttttcggtggaacaaaaaataaaccaaattcccttaatagggggtttccaaaatatatgggtttttttgttgcaatgggatgtttcgttcactgcaacattagatctatacatagtgaaatattgtgagtacacgaggtgaaacatttttggtggaacaaaaaataaaccaaattcccttaatagagagtttccaaaatatgtggattttttgttgcaaaagagtatttttattcactgcaacattatatctataaatagtgaaacattgtaattacattaggtgaaacatctttttgtggaaaaaggggagagagaagtgagtgggcccaataagtgtgcacgtggggggaggggcgcacagggggagcgcccgatcgggctccccccgcgccggacgcctggctctaatcattctcggaataaatattctgtttcaataatccataaataattaaaaaataaattgagcaaaacatgactagaaatatagatggtcaactgggccgcccgacacagcacggcccacgcccagccatgcctaggctgaggctagtcgggccagcacggcccgaccgacacggccgtgccgtgccacgggcggcatacacggcccaggcacgacccaataccactcgggccgtgccgggccgtcccgaaggcacgatggcccatcgtgcttcctcatagaaaaagtctattattcgtccctcaactctgtgggttgtgttcaaatggctggaaaataagtctattttgtattcctcttctctttgggccttgccttatacagttatttaagtctattttgcatcccaatatttttttatttgatcgggccgtgccgggccggtccaccgtgccgagggtgcagcccaggcacgacccggctgtcgagccgggccggtacgggcatgaccctagtcaggccgtgccatgcttgggccgggccaaaatagtgtgcttcaggccgggccgtgggcctcgggccatatggccatctataactagaaagttaagaagtcagggatgctagtccaccaatgagtaggaatgcaagtggggtaggcttgtgggctttgaggcccccattgtagttatatttttgcatctgtttctgattattaggtaaaaaataaactaacatgtgtgcttttatatgcattacagtgtcgaagactcaaagtgttagtaggcactccaaaggaaaggggaaaggggacaccacgactcttgttcaatcaacaattctctactattataaaaattgaagatgtttttgccggtactttggtacatcatctatatatgagtaggtttttaagttcgtcctcttttggaaatacatttccgtatttgagtcggtttttaagtccatttgcttttgaaaatacaaaaggagtcgtataagaaatctcttttaaaaaaactcacatgctaacttgagatgaacagactcctatttgcaactcatgattttctaaaaaatattgtcagagggtgaactccgcaaacgggggacagtgaggccccccttgttggttcggccgggggcagcgggtgagattcgggagctcggtgagtagtttgacgtagagggggtcaggcccctcaagaatgatgagacaaaaggggtttatacaggttcgagtcgctgagaagcgtaataccctactcctgtgcttagttgatcgtgtgatgatttacaagatttccttattcgagtagaaggtgttgatgataagggggcaggaaaattcctctagtgaaaagggctcatccactccctaagtaggcttggacctccttttatatctcaaggggttaccacatgggctcaccgagcctatctagggaggataatcacattaaatgcatgtcttgttgcttgccttagaagccactagcacgcctgctgtggcgtggggccagccagatctatccggctgagacagggaacacgcacgtctcattcgtcatttaatgagtgaagacttttgggtccttactcatgccgggaaacggaaaccttgcactgaccgggttagacggaccgcctcccgactcatcatcgcgacatgacaggggatattaggcggcacgccgcctgacatgcaactagtatgcagacacactaccctggttacatcggtcattcgaccggtcgtagactggtcgcaatctagtcaggtgcaccacgcaccgcatttaatgcggcgtggtgcgctcgctcacactgccttaaatgggggcgtccacctaacccagcacacgcggcaccgcatggaaggggttggggtagcccgatcccaggcaaggaggggccgccgccgccctgcctcaggccagacccccccccccctcggggagagggccacgtggctaccgggcacggcctcctccctatggacctgatacctccggacccatatcaccaacaaatatatatatccaagcgaattcccacagaatttcaccttaacttaaaaatataaccatataacaataataagataaaaatagtcgtcatcccttgcaacacatggcattttttctagttaatataaaaatccgagtttactattttgtgtcatttcttcgtcaatgttgtctttgccaaggacttatcgtagctgtatttcttccggcttgcataacatgcatggtagctagagggagtaggggaggttggacatttaccaagtaaaatgcgacatatatgtgtgaattttgaaatcatatgacagacaaagaaacaaaaatgagactatgccactcaactttatggtcaattataatatcatgttttttcaatatgcacgcggtaagccaatgcagagatcgaaccaaacagaaccgtaagattttttttattttggcattaattttggggtgggaggctaaggccgtcaaggtggtcacgatggaggagagggtgaccaggctcgatcggctcctcgtcatggccgtcggaaccgctgcggcgctcgcgggctgctacgcgaagggcagcggtgtcagagacggtggtgcgtgagagccggagcgcgccctcaccaaggtggagcgtctcgtctgattgagaaggggcaaattagtacttttcacgatttttctctatcgatctacatcggatataatcaaataaggttttcagtaactaattaccaggcttttgcggtgttctataaccaatttacatctttacggtttcccatagctaattacatgttttctgggtgttctgttgtaatttttgactttacgatacctcccactactaatgatagtagggtggtagaggtttgatcttaccgttgattatgatgggtgttttagacatttaatccaatatcatattatattcgacttccaatttaatttatttgtgcagaacagaccattctattgacctgcacattaatcggcttctattggctatgatcatcgcctgctagctacccatcgtgtggcatcgtcggcgagctcgccgtttagattgatcctctcgctgccgctagatctcacctaattcctatgcatgcaaactgtgtacgtaaatgcacagaatcacaggagcatgcctattttctctccaagtaactcgcacatataatccaatgattagccaagaaaatcatattcgtattacggatcagtgatcagcggccccaccagctgcataagggtttcacagtgcaagcctcagttgccaactagacccaagtccctctaaagtcacatccttcaaagtgcaagttcgttgtagtgggcctcaccattatcttctttttttcaatctttccttcccctctctctcctcgtagttcttctttctcactttccccgtcggtttagacggcaccggccggagcctcggtcggagcagcggcgggggcgatccaagcggcagcggcgacgacgggcagagaggtagtgtggtgacctaggcggcttggcggcccaagcggtgatggcgtcgggttgagcggccagatctagcttcgggcgacgaggtggggggatgatggtgcggcaagctcactaaatccgacggatgcggcggcttgtcgggcacggcgcgaggtcggccgtggccatggcttcctcgtcggcgtcatagccactggttcctcgccggtgctggtgacgagctctgcagccgccaccctgccctcctcacctgcaccgacaagaacctctcctctccgccaccagcccaccattgtctttcctcctcctgctggttccggccatgcacggaactaacgaggctttcactcacccaattttttctgacaaaactgacgaggctctgggtacccaaattggacatgggaacaccatgaaaacatggtccccactccattctctcctccacgtaagcattttgtctattagttgttggggctgaatgccacagaggcgcactataaacgccctaagaaggccatgcaagaatttatacaaatttacttttctatcatgatgctttttccccaaatttgccacttctactttggatcaaaagatatggatggctcatatatccattggagggtcctcttcaaaaaaaaaaaaaactttttctattggtcttgtttgcttgaacccactagccgagaaaaccgatgtcacataaatcttatccactaggcatgacgcatctggcccaaggcccaccagctcagcagtggacagctcttcggagcaacgaagtgagacaaaataatgttcccgcctcaactaaatttctttgtgaacaagagtcaacagactaccactagttcttttggccttttgggcttcgttgatgttgttgagagccaaacggttcgtctgaacgaaaagtgaaggaaatacatat

SEQ ID NO: 7261 - DNA, 20417 bp, Oryza sativa
attcctgcacccctgaaagaatgtacaaaataacgcctgcactccatacatcaatctctttaccataattccgccgaaggacttcaggagcaacataataagcacttccaacaatgtctctatacatttttcctgatatttgaaggaagtcaatatacatgaacaacaggatatatggtatgcaacaattatggtttagatagtaataatgatagaaatgttggaaacttgggatattataatattgatcataaaaaatatacatagtttgtcacatcgaattctatttggttaatgaatcagacaaaatacaaattgatgaaggctggtgcttgcattttaaaaagaacatgataaactgtcaagataaaaaatgtgaatgtaaagagagagggaaaatggctcagctcacacacaatcacagcgggccaatatcaattaaataaaccctagatgataactgggaaggattacagagaatggaaggtggttagggcttactacacattccccacacaccaaatatagaagagagtatgccaaaaaatagagattacatgctatctttgacaaaaaaaaaatcatgtaacgcaaagctgtaaaataaatcatggcagtattttgtattcagggtcggacatgcagaccggcagtgatgaaaatgtacaaggaaagaagagaagacaggaagttaggaactatctctgcctccatcacatcctcatcactaccaccataccatgccataccactaccaaaagaacatcattatttggtaactagtcatgtggaaaagtttccatgctttccccacatttgaaaagcaggaagcttaaagcacatttaggtgttatttgcaactacccagcaccagctaccagcatctgcaaccccaccaccaaaatataatactttaaatttgttcaacttagttttcaggtagcataaaagctctaatatatttgtcaatgtgtacaatagttatacacctccccaaaagtaacagccagtgacaactagtttgctatcatttacatcccatttgcatctttccactacttggagtcgataacaatcaatggtcaagcagtcttaacctcagtggctagggaggactttctcatatgagctaatacaacagatggtgcttgctacatcatcctccatgcctttaaagaatgaataccttggaatggcactatggcagtaataataacatggtgctaataatttcattttaccaataaattttgtggaaccatgtcatttatagaaacagatgtctcatatcatacaaagatgcagatattaggttgaaggatacaaggataaatatagatgttgtaacgaccaacccaaaaacagcaactttagctgtctctgtgaatcctaagtaggtttgtgagacaacttagaattacgatatgattcaagtcacaaaacggtggcccataacataccgtgataggcaaattctccataattcagaataaacaaaatgaaaaacttttcaaactagaaatatggccatttatgaaattctagccctagcaatatagcctgtacagcagaaggtgtaattctcaagcatatgcatcttaaattattcaagttaccttcttcaatgaaaactgagagaccaaaatcagtggctttgagcattgcattctcttctttggttgcaagtaagaagttctccggttttaaatcacgatgcatcactcccataaaatggcaaatgttgacaacattcaccactgccctgcagatggtagcagccgcacgctctgagtagtgccccttggcaatgatccgatcaaacagctccccaccagcgcagagctccatgacaacatggacattgctcttgtcctcatatgctccccggaactcgacaatgttttgttgtccagataggtgctgcatgatctgaatctcccggcgaatgtcctccttgtcggccttgctcacaagcttgcgcttagagatggatttgcaagcatactgcttaccactagcgatctccgtgcacaggtatgtcaccccaaactgtccccttccgagttcctttccaagggagtaaaccgagcgcacatcgtcatacggctttccaagaattgtgtctggggtgggcttcggtggggcaaccacaggtgggactaccggagggttcattgctgatggtgtgtacctcacctcagctggcggcggcggctgaggatggttatagctaggagttgtctgagcaggttttgtctggtgagaatagccataaccgtttgctcctcctcgaccagaatctggagacgtagctctgctgcaacacgaccccatttttagtcaaattctccctagcagttgtaggcttgcaaatttgttactccgcaaacgagatcaaccctgcaagcagaacccaagaaggaacactttatgtcagaattaagcgagccaattaacaaagatttgcgctgaatcaaaggactagtgtgaaaactaagcgaatccaaccaacaaaagattcatgcacaaactcatccctccgcagaagcaatgaaagaaaaaaaaaaggaaaaatgatccaaatactggatctaccagcaaaccaaacaataaactcaacacacaacatcagaaggggaaaacaagcaacgaaaaggaaaagaaaagaaatgcctttgacagcatattgacctcaatctactcccagtcacagcccaggaccgcatgaaattcgcatgaactgaggaacaaggtagatggcgagtccccctttggtgacagtggaagcaaccataggagataagggcacaagggtacacgcaaattgggcaaaaggagacaaataaagcagcatctgaaagcaacgggaccagcaaggcacccagcggcaagagagagagagggggagctaaaccactcacgatcgctatcgtaaaaattgatcctttacacgaggaggaagcgataataaacaaggtacagtgaactagagcttcgtcctctcgtaataaagaaagaaagaaaaaactgtaaattcaccgattacttgttcggtaaaaaattactgtctgcatcagaaatctactgaatccaagaacataacccatgaaactgctaaaatcgagcacttgtggacatgtgaggcgctccagtagctttgcaccgctcccagatccaaaagggccaagatttttctcacagttggatcaaatcctcaatcactgaacctccttccaagaagaacagattaactcctaataatctctgcaacgaaaaacaaatccgcgagactacaagcctctcgaaccaaacaaaccaagaaccgaaaaacagagagacgcgtacccaagcgaaaggagggcgcctaacctttcccaaaccaaccaatccaacaatccaaggagcacagccaccgccccggtagtgtcagctggtacaagaatccgcggtggcgcaagaacaagaagaaggaagaatcaaatctcggcgtgggggaggacagctcggcgcggcgaccgcgtggtggtggtggtggtggtggggggggggggggaggtggatttggagctggagagaggtggtgatcctcgatcgtgacagcgactactaatggcgatgcacacggcgcacgaatcgggagaccacgcgaggaaaacaatgaggagaaaaagaagagcgcagctgcctgccagctgcaactgggtttgggtttgttgagaaagaagaaagaagaggaaagcttgcagtttcaagttgcttcctgctctgctcgtgtgtttttttttgcagttttggtcctcttggagatggaaaaggatcaaaggaaaggagtggtagttttccataagagtccctctaattactactccctccgccaaaaaaaacaaattaggattagatgtgatctattctaatacaataaatctagacatatatactccttccgtcccaaaaaaaaaaaagccaatctaagagatgtcacaacaacgaatctagacaaacaacgaatctagacaaagagatgtgtagattcgttgtactaggagaaatcatatcccctcctaggttggtttttttgggacggagggagtatgtccagatttactgtattagaatgtattacatcatcaagtattatgttggttttttatgggacggacgagtagattagttctatagaaattaggactgtggttgagcagattttgagaagcaccagatagaaaatacctaacttctagatatcatcattttctacggggaaaagtccaaatatcccctaaaaaattttgggtggaactgtagaagcccacgcaaactgaactttgaaatcgaacattcaactcagtaaactttacgacaccatttatataactccataagatgtttttgcacagtagtgtttatgttcaattacatgacatacacattaaacatgtatattaaaatctacacttagatctttctttttatcccttgttagctctcacaaatacgaacataataataatattgatatcattgtataagtctaaattatacaacttgtaactgataatatgcaaaatgttatattagatattcaaagttgttcgattaagatttcaatatatgcaaaaccaccttagacggtaatatgaatggtattgtaaattttagggggttggatgtccagtttaaagttcaaggtactagatggactttcatctaaagtttagacggtaatatgaacggtattgcaaattttagggggttggatgtctagtttaaagttcaagaaggtgctagatgaactttcatccaaagtttagaggagtatttagatttttctttttccttttctatattatataactacagtgccttatataatttaagacgagagatagtccctcgtcatttgctcgacggtaaagctctggagaaaataaacgaagaattacaaaaatatgaataaaaattttctagatgttgttagtgatttaaaagctaatataaaaaaataaactatgatgacaagtctgtctttgttttattattgcttacgagacaagtaaaaagttcatataaataatttgtaaatatcaatctttaaaattcgaaattgcttgaataataataataataatataaaagaaacaaatgtggccaaactacaataaatatatattgttgtatccgacaatgaagtataatgaaaaagaaagaaatgcagcccaactacaataaataatacattgatgtatccgacacatactacattaaatatggagtactatacattgtcatatttgttgtgtgtgtgtgtatatatattgttcttttctacagggaggggaactcaacatcacgtatgtcgatgaagagaatacaaattgcaaatgtatatgctcgttggattgggcttgcagttttgagtcactcggcctgatccacgcgagcagctcagcgtatctgctcgtgatggggcgataccaagcacgtgcagggtgcagcgcatcagtggcggcgtgcgtcagcgcatgggaagcaccgcctcggtgtcctataccagcaaagcctatgccatccccaaatagccgcacctccatagctctatccatggctttgtgcttcagcaagaagaagaataagagaggaaggcaaatggtgtgcttgtactcgctgtgagtttaatggcggcaactacacactgatgtgaagacgaagatagagagtttccttgacatcggaacatactggacaagctgctcacgtcgattgggccaaagctaaataggtgactcaaactataaactcagtccaacttgcaatgggtggtaaacataggtcgtccaaagtgaaaatatagggttaccatagtccaatgtgccactttgatcattttaggtggaccaaagtgaatatttactctaatactattaaagttgtaaacatttgggtaatgcaaaaattagattcaattgaagcaagcccttcatttttacgttatccttttttttccctcaattccacgcgcttttggagtttgcagttcacagagccctagctagattaattaatttcccaacaatcagcggtttaagccagaaaatagttaatttgcttcgtggcaagtggcatctttgatggcactgtctgctactgcacttaattaactactagcaccacgttagtagttgactaggcgtctagtgaggatctggtggtttagttgaaggtttaactgtttttcacttaatattctagctgacttgaaagatatgggaatgttttggttagatgaagtagacgtcaaaaaaatatctaaggaattttcctctctttttccttgtgttgaaaggtacttgtaggagaagatttggctcttttttttcttttaaacgtgtgctaaggacgcatcaaggtagttatgcgtgggtataagtttgatgtatcatatatgcgcgtgagtgtatatgtgagtctagctttactctaataaaaatccaaccggaataaatagacattataattttcataatgtgatatcatctttattggtttttctacacaaatttgctataaatatttactcctagctggacattgacaagatcttcaaataaaggctaatgtggtgactattactagtgtaataaattatatataccattatgaaaattattttcaagacaatccacacgagtatcctgtacgcatcctaagaattttaaaatatcaatacttaaagttttaaaaaaattgacgggataaataaatatccaaaacgaactacagttgtacccagacaggatatacaacaacatcaattacttttgtccacaacgttgaaggaaaatgctggacgctgaccctttttttaatacgcatgcatgtgccactacagatgattacgcgcaatcatttccatcaatctacatcaactagcctcgatctatgccgttaaacaaatgtggaacacatgtatataaatgaagcaatccaatgatatactcctatataggttttgccatgaaaaacatatttttattcatgtttgatttatttagataatggaattcatttccgactttgcttcgaaaaagttacagacttcctttttacgcagctacagctaattattacatagagtacgtatcgaataactacgaattataaaatcacaacttgattaaaaacaagaaaactacctatactacgtgcctaaagataaagatggcaaaaatatgaataaccattgtttatcccaataacttgcaagttacatgtagtcttgttttcctcgaatcaggaaatagtatcttcggaaataacaaccgatcattgtaccgatcgaatttcgctggcatcaacgttacaaaaaccagaacaaaagatgatgttggagagtagttgtttttgcagatcttaccaccaccctaaccatcaaattgatccagcaagacatcgccaccgaggacgtcgcactaatagggggatctccaacacgacaccttcaagaaggtcacaacatctagggtgtggttgtctttgtgttttcacctagaaagtccatgccaaagcacgaaggaagggtgtcgcaacattgcctcaaaaaaaagtgtggcgcgcacgggcgtcaccgatgttagtcagatactgccatcacccttagattaggccatcccgattcatgccgtagttgaaggcatgttggtgccgccattgctagagaactgtgcttcaaccacacgacgtcgtctcagccactcacatcgctgccgccaccaccggcaccaacgaagagctcagccactaagttgcgaggtcaacagtaaatgattttgtaatgaggaaggttaaaagtagaacttagtactctgatcgtacgtactatatccattttcagttgatcctacaaaatcttaggcaatatcgcgattctatttattcctacgatcctaaaaatatcatttatgataaagtgcatcgaaagtaatatgaataaatatgctcaaatttacatatataaaaaccatttaaatttatcaaaatcaatattatatgctttaattgatacaacatattatatattttatattaaaatatgcacttccaaaatttgatagtatcccaatactatggtattattccgatcgtatggtactacaaataaaatatgatcatatctagtatctcgatactgattaatttggctgatcacatcatttggttgatcactaaaaattaatccgttcatcccattaagtacaattaaagttattttcctcctctcttattgtgtcgcatcaactcaataaatttcattcattagatctaagtttagcgctattgcccaaaagtatatttgctattaacaattggattcaagcagcttggacaaaattccaatcatatttgcagaatatggccagtactggaattaggttgtagtcattggtagaacagaggaactaattttctacgtgcaccggagttttgaaatgctagcgcgcgctccacctcagctgccgccggcgccccagccagcggcgcccatgctactccgccgcccgcagttcccaacgtccccctcagcggcctcctggccgtcggccgtcgcagccccgaccttcagcgcgccaagatccaacggcggcgcctactgggagatctcgccgccgccaccgcctccacatgtgcccggcccggcgtctgcccagctccggacagtactacccatgtctccgcgaccccagaaccagcaacacgccgcccatgttccttcgctgatgcagtacgcacttctccaggcgccatccttagcccgcctgctccccaaccaccgacgcgcccaacattgaagtccgtctttactgtgccttcgccgcgacacgacgcctaccgccgcgcctacgagctggatccgagagagcggagggacatcctcctccctagatgtacgacgccgagccctgcattcaagccgcgtcctgctttcatgccggccgagcaaggatggacgaaggtaaagcctcggcgctggtggagagagaaggggcattcaagccagagccaacggcccgattcaaggcgacaagacggcgccggacatgcgcctggaagaaggggcgctctctccctggaagaattcagagcaagaaccaggggacgctgcttcgtctgcctggccagcgaccaccgggcatcagcgtgccgcgaccccccgcgttgtttcacctgtaatcgtactggacacagggcgcgccattgcacttcccctcgcctcgcccaccgcccgccgcacccacccaccagatcagctcgcttgccaagggcagcttccccctcgtcgcaccactccaccagagctgctcgtgcctcaccaagaacaagcagatctcgcactccttgcccccaccgccgacatgccttgagtgaccgccacgacaatcctccaccacgcagagagcgccagcaagcgctggcccttcgcgctgccacgccgcgctttccgctgctgcataatcgctgagaagctgctcacctaccaccaccgccacctccctccggtgtgatggcgcaactgggcgacccggagacacgccccctcgaggatgtcgttttcatcccgacatcgcacgccatcgacggggagttgcgcgagtgggagagcacagcggcggtcacctaggcgatgtgtgccccgccatctgtcaccgccaaagacgtcgagcgcaccatcgccgacaagttcggccttcgcacaggggagctcgccgtgttgctccactatccagaggccttcctcctcaagttcaagcaccgccaccattgcgaggaagctgttaagcaggcttcgccaagggtcggggaattgaagtccacttcattcaatggcgcagcttgaagaacgccgccggctccgccctcatgtaccgggtcaagctatgcctcgacggcgtcccgatgcatctttgggcgcctgacatcaccgagcgcatcatcagccggacttgtaccctggagttggtggagattgatctggtccaccccgtcgaagccggcgacatgagagtgaacttgctctgggcatggactccgaatccgagccgcatccacaagcgcgtgtggcgcgccaaacccgcgaccctctcctcgaatcgatcacgattttggagatgccgccggagcactggcaacagggggtcaagcatctagtcctcttccacatcgaggagatccacgattacaccgcggtggccgtcgacctccgcaatcctaagtcctgcaggccggtgacacgcactctgccgtcatggcacttgggcgttctggacggtgagcgccccccgccgcgcctctttgaatatttccctcaccatctgccgccgccgctgacctataccttccgccacggccgcgcggaaggcgtggaggacaatgacgctgctctccaacaggaggctcgcgaccaaggaagcagaacagtccgggacgccattgatcgtgatggtgaacgactccatggcgaggaacaccgcgacaggcgccacgacagccgcgataatcgtggcggccaagacaggcgcagaggccgtaacaggagatacaacaacgatcacccagacgatgatctccaccatggcgggcagcgcgacaacgactacgacgacgatcgcgataacaggggacgtgatgtcacatgcgggcgaggtggcatccgcggcctggacgttaacttccggtgcgaacgcacgcgctcaccgcgcgcccgtgaccgtggcgacacaaggcggcgcgacgggcggcgtcatcaggctggctgcggtgacaaggaagacagggacaatgactgcggaaacggcgactccccccaagcggccctcactccgaccgttgcggcatcgtcctcggcacggaatgctcacctgacatcgcccccgttcgacaaggggcctctgctcccgccgcgtcgtccgcacgatggagcggggtatgaagcccggtccgctgcgtccatcccggcggcgcgggttttcgcccgcatcaacgaggccgttgcggcagcctcggcggaaggggcactgcggcagatgctagttacggccggtgtggcggtggcgcttgacaagctcgccgcgccggtggcgctcgacaaacccgccgcaaatgctgcggtgccatcaccgatggtgacagccatggcgtcgctggcgacgatcagttcgactacaaggaagctattgccgatcgcgtccacagaaaagacgctgctgtccctgaacgctgagtgcgctgcggcgccaactcttcaagacgcgcttgcgacgaatggctcgtccccggccaaggacaccgagacagcaccggcgcctgacatcgccgaattcgactccatttaggtaaccccgccacacgtcctcttcaaagaacttcccccagcaatcctctccacgccgcaggtgctgatcgacatcgccggagacacgcaggtgccgatcccccctgatgatgcactggaggtcgttccaattccagtgactgctgacatgctgggtgaaggacggcagaggagtccaaggctggcccgacagccgatggctggcctaccgatgtcgctgcgggcgcagctcaatctctgccggcgcctgggtacggttccaacggaaggagtcctcaccgacaaggcactcgccgacttcaaagcgatgttcaacaagacgcaatcgacgccctagtgcagctggtcggctttgacaaggaagacgcgaaggcggcggacatggctctggcgaattacctaggcccctctgacattggctgccaggaggagattgctgcggcgtgagcaagctgtgctctgcgcaccggcaaacggagtcctctgtctccatgtatcgatttcctttgcttccttcgtatccgcgtgagactcggacgcgcgctaccgttaagaggggcggcatcgccagacattgctactccgctattcgcagcaacttcgcgaatcagcctctccctactcggtgccgcaactccgcacccaaacaacatcgacaatgttagccaattgtggcgatgacgccagcaaacccccacggccgtcatgcctcgctgacggccagcacaaacgacgcaattctaagggcgccaacgatagcactctctgcgattgtcgacgactgggctgctgtttcgccctcacgtctcctcctaccgccctcgatgctaggtgtggtacaaaaacggcgctgccacgggcacaacgtggggcgacgcacagcgctgcaatacgcgcggctgtcatccccatcagtttcgccctccacctccagcatcaggcatccccggcccaagtcttttcaggccaaggtcttctcaaaccggcccaatttcctgggggccctcaacatgtcttccggcctaggctcatctccccccggctggacttcgtgcaaatggactcggcctcggtccatgagccagatcgaccaactagattgggccgactaccttttagcctgatagcaccgacacggctgtcacccctcggtttcgtgcacaactcccccctgagaaatactggttacacatgacatacccgatcatagacatcctctcctggaacgtccgaggtttgaatagaccggccagaagagcgacaatgagagagactcttcaagaagccaaaccccatatcgcttgccttcaagaaacaaaaatgagtaacattgatgccagactggtacattcccttggcgggggacgcctaaaatcttttcaattcaagccagcgacaggaccgctaggaacaagaggtggcatcctgatcctctggaatgaggattttgctgagctcaaagactttgtgcaaggaacattctcgctttcggccacagtctccttaaaagaatgtcagaccaccttcctacttacggctgtttatgggccaaccagagagagtgccaagcaaacattcctgagagaaccgcggaacaccaagccatctgacaattcaaaatggctggtgctcggagacttcaacataatctacaaggcttccgacaaaaacaatgcaaacctcaatcgcagacaaatgcgaattttcaaagaaaccctcaacgcttgcgagctcaaggaggttgcacttcagaataggcgatacacctggagtaatgaacaagacaacccaaccctcgtcaaactggacccgtttttttgcaacgctagctgggacacaacattcgagagacatctattacatgccctatccaccttactctcagaccactgtccgctaatgctaaccggacaaggggaggccccacgatcgagaacttttcggttcgagaacttttggatccagctcccaggcttccacgaggcggtacaagaagcctggacagccccccaaccccatcatgaacctcaccatagaatctttcacaaattgggatgtacggccaaaagactaagatcgtggagcaaaaaattgatttcgcaggggaagcttcatttacacttggcgctcgagattattcttcaatttgatatataccaagagtcaaggcaactcactcaagccgaactcacgctaagaaggaaccttaaagacagagtgttgggtcttgcagtggtggaaagagcccgtagaacacaagctacacgaatcaccaatctcaaagagggggatgcaaatacgaagttctttcatttgaggatgaatgcaagaaagagaaaaaacttcattcagaggctacgagtgggaaacatgtggaaagtaaaacacgatgaaaaagctgctgttataaaagagcactttcagaccttcatggcacacccagctccacgctcaaaagatcttgactgggacgccctgcagttaccgactttcgacagctccgtaattagtggccccatcacggaagaggaggttcacgtggcacttaaacagtctcccagcgacaaagcgcctggtccggacggcttcacaggtgctttctataaagcctgttgggaaacgataaaagatgacatcatggcggtcattcattccttcgaccggctacgaagtaataacttctcgatcctcaattcagcaaatgtggtgctcatcccgaaaaaggagggagctgaatgcgtaggagactacaggctgatcagtctcatacacggagttgggaagctaatttcaaaggtacttgcactgcgcttgcagcctcacatggggatcttgattagtcatgcccagagtgctttcataaagaaaatatgcacacatgacaactttatgtatgtgaggaatctgacaagaaaattccaccaaacgagaacgccgaatcttctgttgaagctcgacataaccaaagcttttgattcggttagatgggattacttaatcgacctcctccagagaaaaggcttcacatctcggtggactaactgggtctcaaacatcctagcctcatcgacaacaagggtcctcctcaatggatgcccaggatcacctataaagcatggaagaggcctctggcagggtgaccccctctcgccgctgctagttattttagccatcgacccactccaccaccttctagagaaagcaacagaattaggacacatgtcccctcttcgcggaagagctcccagatttcgaaccttcctctatgcagatgatgtggccatattcgtgaacccaagtgtccaagacatgacaaatctcactggcattctaagtgattttgggcaagtgacgggcctccgaacaaacctcaacaaaagccaaattgcgcctatccggtgtgatagcattgatctctccagcatcattgggatcttcccaacaggcctaacaaacttcccaatgaaataccttggcctacccctcgtggttggaaggctcaagaaggtccacattcagcccttaatggacaagtgcaaagcgcgtctcgctccttggcaaggcaaaatgatgtcgaccgccgctagaatctgcctgacgaaatcagtcctcatggagcagcccatataccacctaacatcactaaagctactagacggaaccctagaggagttggacaaataagaaggaaattcctttgggcggggggcgaaaacatgtcggggggaaaatgtaaagtcaactggaaaagggtctgcaggccaaaagatttgggtggcctaggtgttatgaacctacaatacttcgcatcatctctaaggctaagatggctttggaacgaatggatggcgtcggataaaccttgggtgggatctgtgctaccatgcaatcagctagacaaagacctcttcgcggccgcaacaacaataacggtgggagatggcaaaattgcacgcttttggagctcaaaatggctagacaatcaaactccgcaattgattgccccagatattttcgtggcctctagaagaaagaatagaactgtgcatgatgccttagcagaaaacaagtggatacgagacattgatgtctcttgcatctccgaggcgaatcacctccaacagtatgtccgcctctggagaatgatcagggatatgaggcctctaagcgaaaaccacgacagcatccgatggaacctcacagcaaatgggtagtactcggcaaaatcggcctatcgactacaattccttggggctgccaaatctaccttctatcagtcaatctggaaggcatgggcaccgccgaagtgcaagttcttctcttggctggtaacgcaaaatagagtatggacggcagacaggctggaaaaagaggatggcaaaaccaaaagatttgcccactttgctacaatgttgatgaatcggccctgcatctcctggccaaatgcaaactcacaaagaggatatgggcagaaatgcagagatggaccgggactgaccttcagatggacaattgggaaaactatcagtcagtcgagcaatggtggacactcgtaacggaatctccaaacaccccacgcaagcctctcaggaccctggtgattttaatctcgtgggaaatctggtgcaaaagaaacgcaagaatcttccgcaacaatgcatctacgccatcctcagcaaagatcaaggaggaagggagagcatgggtcaaagcaggggcttcaatcctccaggagttcgaaattttgggagatatcacttaatccctgcgttttgcctctctttttgcgggttatttgttttgctttttttcatctaaccctatatatatctcgctataattttctcctgctctattaatatataaagggcaaaacttttgccttccttcaaaaacaattggattcaacttgactggctcatattgtatcattactatacatattatcgcttgcatttattcctctttttagccataattatctctatttaatccagaggtcgattaggcaccaattctgcactaacatataactatacgccgtgttaacattctgttaaaaacaactaataagacttgctaaatggacctataattatcgatgctaccaatatattacgatcattagttcctttatgtcatgtttttttaaatatattttagttcatgctgatttgatttaagatttaagttactatatccaatatcttctaatctcatttcattgatttgcttatgtaaactttatagagattctcacactaatatatcgtctagttcacagtacattatttggtccatttgacctgtatcttgcacatttcattcagctggttgcagcagtagacacaaaatgccctggagaaaaacaaattaagggatggcagctgaggtggaaggggaatagggcggtcgggcgatgatgagaaggccacagaaggccatgatttggacgcttaattggcccggggatagcgcacatgagcacacgttgtttttagagcaaggataataatacagccagctgcttacttatagcctatctattagctaactcatatagtggttaattcttcactataaatatatggtccatatatttatctcacagattttcttggttcctgtgtctaagcctcttttcttggttcttggttctcatctctctcctcttttctctcatccatcccagtattcagccttttaatagcccactattggtggtggcccatgcttactgttagttttgtcgccttggacgccgagccacacatggcatgagatatttttctcaatccaacgaactcgcctttaattaattgggctggttaattagtttattaattgtagcaaaaggtagcacgcacccactactttgtcctctcttgacctttggcgattaattacgccctttgattctgctccctctgattaaaaaaaaacatatgtaacatcttctagtacaataatgaatctagatagagaattatctagattcattatactttagggacttgttcactttgctactttttccgtttcacaatataagtcattctagtattccccacattcatattgatgctagtgaatctagacatatatatctatctagattcattaacatcaatatgaatgtggagaatgctagaatgacttacattataaaacggagggagtactattttcaaccttaccaagttttgtcattgctaaattttggtaaggttgccaaaattttggtaaggttaccaaattttggcaagatttcatacgcacttactaaaatttggcaacaaactaaatgtagccatttttttataactttatcaaaaagaaggtaaggttgaaaatggtagtaaagtgaacaagcccatatttttttaggacggaaagagtaattgacgtggcgaactggcgatgatgcccattgcaaaaaagagtacacgtgccagtactactgggtttaactgtctgtcttatttttgttatttttagtttattcattaaattattattgtgtattgtttgatttcagattttaaaaatatatcttttaaaagctttcttgcactacattactcaaaccactaggtttatatatattacataatatttaattatttctatagtcaagtagatgatccgtgccaataaatttgctgaatttaatttctccctactgaataatctatttcaaatactcataaattataatcaggtacactcacacacatatgacacttatgtttcacgctcataggtgcatcctatcctatgtttaggtaggtgaagatcgtataccacgatgtcactactattatagttattaatatgtaggtctcatcctcctattacctcacgcgttagtgtttataatgctaataccattcttgtgaataatatgaaccctgtttaaaaagggattggaatcacatgaatatgaggtactcatacgtacttagattggcacaatccatcacaagtaccataatctattactccctccattttttaatagatgacgccgttgacttttgaatatatgtttgaccatttgtcttattcaaaaaattttatgtaaatgtatagatacaaatcatgcttaaagtactttgagtgataaaacaactcacaacaaaataaattataattacgtaaattttttgaataagacaaatggtcaaacatgtgataaaaggttaacggcgtcatctattaaaaaacagaggtagtatgtatgctcacacatctttatatttgcataaggagaaagtactgattttcttttcaaattaagaggtggaagttgttctcagcttgagaaatgtttttcccccggaaaactgatgttgtagtaatagtccacgaacacatagtaaggtacacacagttaccgagttacggaatgagacaagccgaataaaactttgacttaattagttgatcagccgctacagataattcttaaaccatgtgtggtataaacgatggatctccgacgactgtttctttctctctagctaccggcccattctgatatattgtcgcaactagacagtactaggttttcaactatctatatgtcagatgtttgaaacgatcatacatgtaagtaagcaaccactctcaacaacagatcaacatgaagttgacgggaaaaacacctgtcgtgggtgtttgaattcactcgttaaggtttaaattttgatgtatgaatatgtaggtagactttcaggagacttttctatatgtaggtgggctttcaacaggattttagtgagatttggaatatgccaataatttccatccctttgagtgtgtgttagagcatgcacaaaaatagagtttgatataatctcttagctaatactacgtatattatacgtatcacttcctacaatagttgagacagaccacctaaccattaatacacaaaaaaaaattatattacatttttcccttttctttatccccatgcaataaaattccctttaataaaaactaagagctgactctgagtggttgtcatgcataacaaccatatttttctttcctccgctctctcttccacgtcaccaactttacttgcatactaatggagagactccgttaataataaatatcgttgtacatgcccttagatgacgtatttccagaaacgtgagtatgatattgcatgtgtagtgtgtacatgtgtacgcatatgcctaccgtgtaataaaaaaatgaaaaacatgaagttaacatattgcaagaagggtaagagggtacataaagtgaaactttgggttaacaatatatggaaaaagtacgaattacccccgccccctggaaaactattgcggtcggccgaattaccccactgaaccataaaaccggatattcttcacccccaactatgcaaaccggatgaatttccctcaacctaatccacggtggttttggtctacatgacatacgcgtggtagtccagtcagcattctatttatttataaaatagtatgggacccacctgtcatactcttccactcttcctatctctcttctctctcactcttcctctctctctcacaggcggctggcgggggacacggagcggcggcggcgggtgatgcgtaggcggcggcggtgggggatgaggaggcggccgcttggcgcggcttcctgaggcggcaaaagggccctgcggcggcggcggcatcgggtgacgcgtaggcaacggcggcgggggatgaggaggcggccgctcggcgtggctttctgaggcagcaaaaggggacctgcggcggcggcggcgcagtgcaaaaggggccctgcgacggcggcgacgcagtgccaaaggggaactgagacagcggctgcgcgaaggggcactgcgggggtggtgtgatggtggttaaggggccctgctgcggcggtccagcgccaaaagggcgttgaggtggcacggccgcgaagggcgccgcaggggaagcaagcagcctgcgcggggctgaagcggcgccgaaagacgggacggcggggcaac

SEQ ID NO: 7262 - DNA, 10379 bp, Oryza sativa
aggattaaggaaaacattcatcatgcatatattggtaaaaaaaataaagaagagaaacctcgatctttcattcataatcaatgacaaattacagttgacagattgcatgttcttcttctcatgcgaatagaccatcctatctacgagaatttaaaagatcacatcgccttccatgcaaaccaagaacagaggaagacatgttctgattccacctactgctactactgaacagcgctgatcacaatgccaagaaggcctcggagttggcacgcagctgctccttctccagcataaacatcttcagccgcggcagcttcttgccggccgtggtcggccgtggggccgccatgtttgccggggtcggggccaggcgcggcgcgggcagcttgacgtccttgacagcgacgcgcacggtccggaaggggtcgtcgcgcgggaagttgccgttgtagatgacctcgaggtggccgtcgtcggcatcggcgtcggagacgacgaccgcgccgagccacatgacgaggcgcagcgccgtggtgcctagcctccccacgggcgtgcggacgcgcacctcgtcgcccttcttgaaggaggacatcttgttgatgggcgatcctgatcctgacggcttcttggagactactctcccctgcgcctcgacggtgagctcactgcggcggtggatgatcgggcgcgaggagcggggactcgagcagcggagaagcgccatggacgacgagtgccgagcgctgctgcgaggatgggtggaaggaatcgtggtgaatgcggagggagggggcgatcggccggggctgcgaggatttatcgccagccgggtccgagtccgaattgaagtcggcgttgtcaggcacgatccatcaatccgaggtcgactcggaatcggagacgtccgttacgcctcgccaccatcacgcaatccattccgaatggcgccaagcaggcgggaacgcgcagcggagataggtgtatcgccggcggcggcggcggaggagaaggagatgacggcggctcagcttctgattggtcttagtacatccgagcaactgattgggcttataaagaatcaacaaatacaagcgacatgattcaaaatttattttgcttcagtttctcatcatgtgatggccaagtcaaacgtgctaacggcattatatttcaagagatcaagacgcgagtgtacgaccggcttatggtgtgacatacccaaatttttattttggaaaattcaactgaactaaaaattcatgaagagttttttctcaaaaacttttgttacaatctcaactctcaagagcttaattagtcactagctagtcactagaccactaattaagcttttcattaggttaacccgataaccaatcatcttggctgagtagtaaaaatacgtatcaccagtgagtcagcaaaggctcgccattgatgagtgatgatggatggcttagaagctcaagtgctgcagaatacttggctcaaggatagcattgaggactggtcatgtactatgagacaacagagacaaaaactcttcctacgcctataaagaaagagaggagaccttttctaccattcataatcaatgatatatataggtcatcgattgcatgtcctgtcacgcaaagaattcaaaacaaattatcctaactaccaacagtgccttccaagaatccagaaacagaggagccgctgcacctcacaaatgaacaatgatttttctctctatccctttttcatttcctcattcaagagagagagagagagaaactatataggctgagcaaacagttgcaatgtacaatcaagcaatgaatcattatccatcaccatcaccacagcaagaagtagccaatttacatgaatgtaagagtgcaagactatccttctctattacaagacccccggtcactgatctagaacctgtctgattgaatgctgttgtcgtcctgatagtgttttaggaaaagagacatcaaatattatcctcaagtttcctttcaatccctcgccgattggccatccttcatcctttattaccagctcataccctgggtacacgacctcatcaactttgatcttcaagtagcgcccatcaagtgtcttaagatttatggtacactttgcaagtgcatccacaagacgaagaacccaatgaactaccaggtcatttccatagaggatgtaggtctcatgaggtgcgatgtcaagggtcaaaattaaatcatggggcggctggccgtaaaaatgggacccttcataaggaagtgttatttttgttcctttccttgatccaggcagcactttaacttgtaaaattatttcttcattctccacaggtctgcataatatgagaagcctaaacttagacatcaattacatccactgtgtttaaaggattcgcagatatatgattccttcagttgcagatttttaaaacataaaaagacggtaacacttaaacaaaagtgcaaacatactcatcagtgtgtcttgtgatcctcctatgaagtgctactgtcaaatcagttccctggtacagctcttcaagggtgcacataagttctccaactgttgcttgtggattatccaattgatcatgataaatcattgcacagctttgttcagcatcttgaatctaataaaataaatcacagttaatcaaaagttcaaattactaataaacaacacataaaactgcaggaaggaaagaatgatagttacatcacttacatttccatagaagaataacgtgtggggttttaggcacctcagctggttgtatctttgcaattcctgttgcaacaacggtaagaatagtggatacttcacaatgaagatcaattcaaactgttcagcggaataaccaccaacttcctctatcatgaagcatctgtctaaccggtggcaatttgaatgtcgatagtatttaaaaaatgtttctgggtcatgagccttttccggattgtcatcaacaccatagtttttgtgcttcagcgaagcttccagtaaataattcccttcggtgatttgaaaccatctgttttggtatggaagcttcttaagtatatcacgataagcagcatcattggtgtaggctaagacaaacctcatatgctcataagctttgaaatagaaaagtatcctgttttcgattggtatcagtggtgcataattgcagataagataaccatgctcatgtggattgtgcagcattagagacattaaagatctccagtcctctggtatttggtccatactgtaattcctgaatacagtttgacggatcacattacgaagatcaagataattttgacaaaccaattaatccgtcctttttgtcctggtgacaagccggaatcttatgtgtccagtaggggcaacccagatattagattcaccaaatcttgacaagcaatacccctcttcatgttgattgaataactccacagccattgatctgacacaacacttaatcctctccttaacaatccaaacattgagtttcttgtattctcccaacaaactacaccgagtgctgtctatatattccatcgctgatgtcgtgaattctctgacagagataaaatacttgtgatctggtaaatcaccataggaagtgcctatgtcatccttcattatgtcgtaaccctgagatagcatgctagtgaatgttaagacattgtataatttattcaaatcctaatttcattgaggaattctcccataacataaagggcattcacattaaaatctgaataaagggcctaagggacatttaatacactgctgtacacctagtttcagaacatgaacatctatctagtagctgtacacctagtttcagaacatatatatctagtatctaaacccacaaggcattttttctagtgaaacaagatgatcctttttacacttttcaaagtcaatattatgttattcggtaccattgcataaaagtatttcaacatatgaacagtatagtacttataccctgtagatcaagtttgaagttggttcttggcggagtattagataccagtataatctacattgtcaatttttaaaattttctccacaagcatttgcattaaattttaagagaaacatgcatacaagaagatatcctctcaagagattagaatccattcccatatcacgaacagaaatcatcattatgcataagatttgagaaacagaattgaccccttgttgaaatcaagagtcttaggatgaactggcacaggcatgcgttctttcttcaagaacatttcatttcttgattgagagagacaaagcgagagagagatggcgattcaaccttaaacgaggcgatgctctcaatcaagaacgtttcttgattgattgagaggagagagatggcgactaaccttgaaacgaggcgcagctcggcgtgagaagcgtccctcctccccctccctggcgcagctcggcgtgagaagcgtcccgttcttccctccctgagcttttgttcgtagacgaaggagaagaagcgacgttccagcaggagaacacgaaggagaaatgctggagaacgcaaagaagaagatgacacgacgttcttctcctcttcctcctcccaggagaggaggcgccccctgctgatcgccggagatgacctctctgctttctgctttcgtggcagaccaaggaggaagaaaggaggtgtcaagccgttgtagaagaagaggtgagtaatttaagtattggaccgccaggcccaccacagtctaaccatccccatgggccgtatagcccacgttcggcccactcctcctctgtcctgccatcgccgccgcatcctctcctctgcgcgtggacggtggccggcggcagcggcggcgcgccggaagtcttcattcagcagccgccacccccgctggttagcagggctcctctcgtgctgcccttcaccatccgtagcggacttgcatagcgccccggcggcccggacctcagcgagtgagtgaaatccctcgggcggcagtgtcgccggagcaacctgccgccaccgccaactccacgatcgccgcacatactggatctcgcactcgatctctctctcttttcctcagtacttcttcgtgggggcggtgaagattggggatcagctcggtgggaggaggcgagcgacggaggagacgaggagtcggatggggcgactgaatcagaggagttgttttttttttttctggttccacgcatagactggagtactggacccaccacctatacaatgacacattttagggttaattagatccatgccactataacttttgccaaatttaaaaaatatcgctactattcatcatatcagctatgtaccactggaaatttttaaaattgaaaccatatcactcccgtcactttttatgtctcatctctcgcgccgtctccgttcccatcctcatcccctctaggacccaagcgttcacgtggcgcgattcgcggcagagtcgttagacgcgcgcgcggaagcgaggggggatggtggcaggcgggacgcctccgcgccggcgacgaggagcagcagtaggaggacaggccggggcggttgcagccgggcctagcggggttcgcggcagagtcgtcaggcgcgcgcggtgtaggcacggacgcctctgtgccgatgacgaggaggatcaggaggaggaggacacgctccgcgtcctggtgtacatctccctgatatgccagaggagcgccgtcagcaaggacctcgttcgctaccgcaacatcctctgcgccatcgccgagatgctcaagagcggtagcccctgactccgcctcaagtccctccaggtcctccgtgtcctcgtcgaggacaacgatgacgacaaggtcgcaaatcccattccccaagtttcaacatcccccaaagcagataaattttgcaagaaaccaagtaatagttgatcgattcttagtttcaattttgcagaagttggggaagggcgacacaatacacaccatcatcaagttcttgtcgaacaagctatcggggcatgagccgacgtgcaagcggatcgtcgcggtcgggacggggagtagcaagtcggagagcgtcgttgccgtcgacaaggtggagagcatgctctgcaacctcgaccgcttcgaggccaacgcccaacatgaagtagggccgacaacgccagactgcaactactcctcaccaggctgcttcaacgccaacgtcaagcaggccgcgatggccacgcgttggcgaactcggtgaactcggctagatcactacctcagcgagctcgcactggcgaacgatgacaaggtgtcatgccccgaactagccccgagtggaactagcccgtgacactccaaattaacctgttaatcgataccagtcccaggaaacagtgatggtatcacaggaagacagaatatcacagcaacagaggtctctttattatagagtaggagtacagtcattatattgcggacagatcccgagctcacaactgcattacaaaagggaaagcggaagccaagacttggaccaaacatcacaggcgcgacttgggaactaggtcgaaaccctaaaactcatcgtagccgacttgctcctggaagaactccttgtcagcgggatccgcttcatcttcttcagcaactgggggggttatttatatagagcaagggtgagtacgggagtactcagcaagccatggggattaagtgtttaaatgcaggcttcaaggaatggctattgttttttcaattgattttatttaaactcttttctgaaacaactaagtgagtgcttctcaaacaacacggatgagacagtgcgtctcgtccggtcggagtatgtgcaaggtatcagtcttttgaattgatcaaggttggcattcggccaacagctttcaaacggccacccgggcctggctgatcccatcagccgcagattttccaaacatcgaacccaaaccacatcagcaaattttacaaagcagtagtcaaacaaaactacgctaggaatcacctcacatccgcccatgaccgtgggcatggctattcgaacagtttaataacctctgcagagggggtacactttacccacacgacattactaacccggatcatccagcccgtgcagaacggccacgactagagaccttaaggctttcatgacaaggcatttcgaaagccgacacaggttcaccatatgccaacgagaggggtcccagaccaacaccagattaggtcccagaccatactgtgccaggaaacccgggggttctccctgacaccaccccgttgaatccacatgtctcttggcatcatggttcccccgattagctagttactcagccaggggtgtcccattccacccatgtggtcgcacttgtcttatgttcggatgaaattccaaggaaacggtccttaagtgcaagagcgggagactgtacacccggtacgttccccggtccgcgattttggaaattcatttagttcgcaagcaccgacccaggtgtcgggttttccaagtcttttgtaaaacccgagttttacccaagatgtttctcagattttaagtttgaaggcaaccgtcgatactcgtgcagagtgcacgaataccgaggcgcaactaggtggttacaagggaacatgatataacaattaacaatggaaggatcagatgcaacaagttaggtaggcccacctgtctgccttgcagacggggcaaacagattaagtgcaatcctatcaatgcataatattttgcaagcaatataattaagttcaaatataggctcaatatgttcaaaggtggcttgccttgctcgagatcttgagcttgatcctcgaaatcctcgcactgcggatcttcgggctccgaaactacacgcgaaacgggacaactcagcaaacggcgaaaataaggccctattattgacctctaagcgtgtcattaggtagatctcaagatttgaggaattttggaagttgaacggagtcaaacggacttacggttaggaagatattgaatttctaagattattggatttttggtctaaaggaaaaaggatttatttaaatcctttttgaaaagaaaagaagagaaaagaaggagggaggggaattagacttccctcgggcggctagggcgcggcccgagagaaagggggcggctcggccgaacttaacgggccggtcggcctgagaaggcggcccaaggcatgcgcgcgggtggggaggagtgaggaagccggtgggccgggtccatcccgcgtggtcccgggtgggacccgcttgtcggcggcttggctcaccgtgagcgaggtgcacgcggggcgtgctagggtttggggaggggaggcgcggtgcatgcgcgcggttcgcggaggacgcggtgcggcgggcccacgcacagcctcacggctcgcggtggaccgcgcgcgcgggcagggccggagggagcggcgtaccggggtcagcttgacccggtcgcggccgaggtggcgccgacgtggcgcctacgtggctgccacgcgggccggcgggaggtagacgacgacgtcggccggaacggacgcggacggcggcggcgaaccacggcgatacaggcgaaagcgagcacaccgggaggttgcacgggacgaggggagacgagccaacggctcggattcgccgggggatgctcgacgacggcggattgcggcggaggcaaccggcggcgagagaaggggaaacggcgatggcgcgacgggagaccgattcgggcgagctaaagcatctacgcgactccgagaatccgttgctagcgtcggattgggcggagctacgccgagcgaggccggcgacgagcgggcgctacggagcacggtcggcgacggcggcgagcacacagcgagcagcggcaacggtcggggcggcgccagctagctacggggaggctactcgtgctactacccgagtctaaggggaggagatggaacgaggagggagaacggagggaggcactaccgtgcggggtgatggggcgtagtgacgaggggccgacggcacgggagtgatctctccggcctcgggcaggggaagaggaagaagacgagcgcccggagtccccttccgcgtcctagcacgcaccggctcctccggcacacacgacagcggcggtcggcgagagggacggcaatggcgcgggcgaaaaacggggaagattgggaggggaaaaaggaagggagggcgcctgggtttatagggcggcaatgtcggtttggaaaccgaccttgggcggtcaaggcgcgagctggcgctcggcgctcgcggccaaaacggcgacagaggcggatgacgccggcggggaagagaaaaggaaaaaggaagggagaaaggggggttgccccttgcgtctttgggaaaagaaggagggagagagggcgatgaggaggagccctgcctcctttccttggaagcacgcgcggggaggggcggggccgagtcgatgacgacggcgatgacggtgggggcggtttgaaacggagcggcgacacggacggcaggcgcggacaggcgcggcataggctgacggcggcggcggccaggcggtcggccatcacggcgtgcgcgcgcgggaagcaacgggcggcgcggcgatttgggcagcgcggctcgggcacgcggcaaggcagcggggccgggcagcgcagacggcgcaggcgcggcacgggcggcgaccacgcgggcgcgtgcgcgaagcaacggcgcgcggagccgatttcgcgggcggggagctcgcggggatggaggcggggagagggagagcgagggggaggcgctcggcgcggctcacgggcagagcgggaagagagggagagagagagggagagagagagagatgggccgagaggaagtcggcccatcgaacctgagggaggcaaaatagacttttgcggagggatttgatttgggaaggataattgagattagggtttggatttggattcgggacttgaacttgacgatagatcggggatttgagatccggaatggcacggagactgactgcaagcgaggaaacaattttcgcaattaaggtttttagaaattaattttcccgctaggcgccacgacggaacgggcgctacacaaggccacggtggccgaagccgtacgtagccatggagaggagggtgatgaggacgtgaacaaagacggagtgagagaggccgataattaggttttggtacgcacgcatgacgagttacaaaccaggaatcctaataggttttggtgtgcaggggagagaagtcgcgcacggtttccgaacatgttgcgacaagctagggttagggttagtattttaagggtggggtgaggggtgg

SEQ ID NO: 7263 - DNA, 96610 bp, Oryza sativa
gttttttccccagccgcccgcctagggttcggtcgccaccgcgttctcctcgcccaatctcccccaaaaacctctctaatcgaaggtgatttgtgcggcattgagtttgggatcggaagagaaggtaaacccctctataaaccctaagttccccaaagttttattggatattttgcattgttttggttgtagacgtggtttgataatagttggctaaggatggattattagatggataatatgggtggggatgaagtgtggaggtggcatatctttatccatttggttgttattgatacatttgacaaaatatatttgggatggatgtttggtgatgcactagggtttgatgggagatggatgtgtggtgatggcctaggatgtgggatggatttgtggtgattgagagggtttgaaaggggttgatgtgtggtgaagggtaggtaatttgtaggagtagagtttttttttatcaataatgtgtagtatttgagtaatgtacttatttattggaaaaattagacatgttgttagcttttgaagtattggtattgcaatggtaattacatattattttcaagtaattaatgtttatgcatgggttaaaaattgtagatggatagattggtccggcttcattatggtggttgtgtggtagatgaaagtacacatggaagccaatttgagggaatgacagttagacaattagtgttttttgcgaagcctacctttgaggagttaatgtctcgcatcaagcatgaattggattggaatgatgagtcggttggtatgcaagggagatacgatgtgggcggcggtgtcatgtcacataagtttatgttagacttgaatggagagatcgaatggcaaacatatatagatatagtattggggtcacatttcaaatctcttgaggtgtttgcatggaagaaagatggtaggatagggaagaaagaacttatagaccttaatgaaagtccactcatagaatcacccattagttgtcatgaactgtcggagaggtgtagtaggaaggaagaattgattgaggaagacgtggaggggggcgagggagtaaatgatatggcggatgtggaggtcagggaagagaatgacccggtaagggaggaagtacatgcagaggagaatgtgccgttaagggaagaagtacatgcagaggacaatgtgccgttaagggaggaagttaatgtggaggagaatgtgccggtaagagaggaaggagatgttgaggatggtcgggaggtaggagatgatgtggagttgcctgaggaagaagcgaatgctaagaatgtaagtatgggccaagggagttggctaggctgaaattctatacccgagaggagtgtgaggaggctatgatacgcactggattgaacccaggctggttggagtatgatacagaggatgaattggatgagtccgcttccgactccgatgatgatcgttcagtgcgtaagatgtcagagcatgaaaggactgtgtttgcgaaactggtgggtagaaacccggaaataacacaattcgaggatcttaccagatctgggctagcaattgctgatggggatccacaatatgacggtgccttcgaaccaatgtgtgatgaaccaaggaaggggttggagtttcgatcgatggatgatctgaaaatatggctacagagttattctatccgtgtccaccggccgtaccatgtgaaggaatctaacgcgtcagtaaagtatactgtggcttgtctcgatcgccattgcaaatggcagattaatgtaaggaagagtggaggagataggtggcgggtgactagggtgggcgaagaccacacatgctgtagtgcggaagtaaccggcaagcatttgcaacttacttcaaggtttattggaaacaggttacaggcatttgtgcgagctgaaccaactttatctccagcagcgattgtcgaggcagttgagcaaatatggcactatcggcctacgtatggcaaagcatggcgtgctaagcaagttgctatgaaggttatttggggagattgggacgaggcgtatgttcgcttgcctacactgatgcgtgccatcaaagcaaagaaccctccatgcatttccgtgttgaggctcatcccgagaagtccaggatggtggatggagtacagaggcgagtatttggacgtgcatattggatatttggccagtccatagaagcattcaagcacttgaggccggtgctagcaattgatggcactttcttaaccggtaaataccaaggtacattgctcacggcaataggggtcgacgccgggttacatcttgttcccttggcgtttgctctggtagagaaggagaatacatccaactgggagtggttcatcaacatgttgagaaacaagttgatcggtcctaatagagaagtgtgtataatttctgatagacaccctggcattttgaactccatcatccacatcatgcctcatcacctaaccattcaccacaggtggtgcatgaggcacttctgtgctaacttctacacagctggagctacgactgatcagatgaaagatcttgagcgcatatgtcaaataaatgagaaagcattgttcctagatgagataaaacgcctcatgggtgtggtcggagagaggccaaagaagtggctagaagaccatatgccacttaaggtcaaatgggcaagagcatttgataccaacgggcgtcgtcatagcatcatgactagtaatatggccgagagtttcaataatgtattgagaggcattcggaaactgccggttacagctattgtggcatacacattttcgaagtgcaatagttggtttgtcgatagacacaaagaggcaactgtagatatcctgtgtggaaagaagtggcccacaaaagttaaggacatgttggaggagcagcaaagacgaaccttggggcaaagagcagcatgttttgatttcccttcgatgaagtatgaggtcagcgagcaaggcggagtcacggcggctggggttcaatggggtggacgtcactacgtcgtggttgcgagagataacacatgtagttgtcagttccctcagctccatcacttgccatgctcccacatgataaccgtttgtatgttgcgaggtttggatgtggaggtggccccccgaatgtgttatgaagcttccaataaggctgtgcaggactcgtactcccctaggtttgaaccttacctagatccatcgcagtggccaagttatgatggagagttcttcgtgcccgacttgtcgttaaagaacaacacacgaggaagaagaaggacaagaaggttcaagaacgatatggacaaagcatataaaggctcagccaaccgacggtcacaaaagccgaacaatacaaattcagagccggtcatgcaaaatagatgctcgctatgccacgaactaggccataagaaaactaggtgcccgaagcgagacaagtctaaggatcgaccgaaaaagcgccgtaggacggggggaggtggtgagggtagcacacaggtgggattggatgacattcatttgctaagttcatattgttgcttcaatgtttactttccgttgtcctcctttccgttctcattgtgatttttccatttaatattttttcaattactaatgattcaattttcatttgcaggatggagcactttccggggttggaggatttctacgaggagaagcaccgggccccacagattgccagcggagaggttagcatcaacaatattccatttttttatgatcgaatttattttttcttctttgattttagttcgtacagatagatcatccatcatagagatatctcaaatcaaaattcatgagcctcaaagcagagcatgtaaacacacagatcttcttttcagttttcttgctcaatcccaaaattaaagttcctagttgcatgaagtattttccacaacccttgtatatgatatattgtcgctaactttatgttattatgtttgtctattgatgcagcgcttgaagacccttcgagtcagaggtcacacggcgcacatactgttcgacgaccggtacgtcccgtacctacggcgggcgaagctcttggcgttcgtgaccatggcgcagcgaccggtgcctctgtacaacgccgctgctctgacggccctagtggaccggtggcgtccagagacacacaccttccacctaccgtgcggggagctgacggtcactctggaggacgtcgccatgatcctgggtcttcctatccggggtcaggcggtcacaggtgacacagcgtcagggaattactaacgagtcttcgtattcatttgttaatttttttgcaattactaatgattccatttaatttccggttacaggtgacacagcgtcggggaactggagggagagggtcgaggagtaccttggtctggagcctccagtggcacctgatggtcagaggcagacgaagacatcaggggttcctttgagttggttgcgagccaacttcggtcagtgtcccgctgaggcagacgaggctacagtacagcgatactgcagggcgtacgtgctgtacatcttcggcagtattctgttccctgactctggtggagacatggcttcttggatgtggctgccgttgctcgcggactgggacgaggcgggtaccttcagctgggggtcggctgccctagcctggttgtaccggcaactctgtgatgcttgccgaaggcaaggcggggacgcgaacctagcaggctgtgtttggttgctacaggtaagttcacgcatgttatgtttcataacatttcaatttcttgctaacatgttggaagctaacgtatgtgacgcaggtttggatgtggatgaggcttccagttggtcggcccatgtggaggacccatcaggcttggccgcaccaggatgcagaccgacgtcccactgtagctcacctgtgggaatcggtcccatctccagtagtaggccgcaggaatttggcgtactaccactacacaaacgagatggactacctacagccagaacatgtaagctattcggggttctatcacacatgaagatggtttcttactatatagtactaaatgtgcttcaatgtgttttatttttgttgctgcaggtggtgtggatgccatatcaggcacaggaagtgctcgagctagaactgaatcccatgtgccatatagaggatgcgttgaagaccctacggtgcccactgatctgcttctatgcagtggagttccagatgtgccaccgcgtgatgcggcaattcgggaggcttcaaacaatcccacaccgtttctccacgagtatcgacctacacaagttagtaatttcacttaacaatttattttgcttgcccaatcagtcacttcaacatttactacatatttgagttggacattttgcatacgtgcagggtggaccgtcggaagaacaagaaggtgactgattgggcttactaccatcaggatcatatcacgcaatgggagaagttcgaggagaatggagtaccagaccagggtcagcacaacgggacggagttcgacttgtacttggcgtggctccacaggacctaccgtcttgtcctacgtccggcttggacactagccgacatagcggatgaccccgaggatgttgaggagcagaacgagtacgatactcgtacccgtctaggtaccacggtcgagacgggacctgttcgcgacagagtggttagtttctagcattaatgttgtatattatttcatttcaatgccatatatgttgtgacttacttcatttcaatcctacaggctcgagagctcttgcggaccgtcaacgacgcgggagtggcgctaggcacggctcctggctccgaaggagagggcggcaccctccgcaacgccctacaggtaatcgttggaaagagatgaaactacggtgttttcttccaaaagcgataacttaacatggattattttttatgcagagactacggcagcgatgtcggaagttggcagcaaggctcggctgcaggtcgactgatgtggtcgaacatgctcatgcccaccaagagggggatgaagaaggggaggtgggtgacgaggagggcgagcaagacaaagaggcggaggaaggagatgaggaggaagaaggggatgaggacagagaagaggaggcggatgagctcggtccctcgcagctagaggacgcaccagagtcgtcacagccggatatcttgcagcccggcccgtctcgaccacgacgccggcgggctccttcgcaggactggaggtacacccccgacgtgcctcgtcctcgcactagaggtaggaggaggtgagtgcatggttcaatggatggatggatagatggatggacttgatgcatggttcgatggatgtatggactggatgtatggactcgactggatgtatagccgaggatcgatgggatgtttttatttcttatatgtatggacttcatatatggatgtattgatggattctatggatgtatggaatgatgttgggattgatggatggatgtatgttttgtatggttctctggatatattactgcctgtaaatttctgtcatttgatgtttgcctgtgttgtgtgcaaagttttgctaaagtttagcagggctgggacgtcagcgccatgcaaaatggcgctgacatgtccaaactcagcgccagtgcacctggctgggccaaggccgaaacggccaagtcccacctcagcgccaggttggctggcgctgagtttcccacagtcagcgccattttggctggcgctgaggtcccagcccgcaagccatccagaaggcttgcttggctgggccaaggccgaaacggccaagtcccacctcagcgccaggttggctggcgctgagtttcccacagtcagcgccattttggctagcgctgaggtcccagcccgcaagccatccagaaggcttgcttcgctgggccaaggccgaaacggccaagtcccacctcagcgccagtcccaagatcagcgccattttggctggcgttgaggtcccagcccgcaagccatccagaaggcttgctggtctgggccttggggttgcggccaagtcccacctcagcgccagtccggttggcgctgagatagctgccacgtcagctggggatcggccccggccgccacggtggcacaatgtcagcgccagtcccgttggcgctaacacggccaacgtcagcgccaatgtgtttggcgctgaggcgacggcctatttttggttgaagtttttggcaggggttagtttcgaaataagtttttgaaaagggtcaatttgtcaaaaaaaacggtgaacacttgccattttggacatcgatgtggtcttcaaaatgcagctatgatcactaatttctatctattgcaaaatattcaaaaggctaattataatactaaaaaatatttttttccttttcaagacaaatctataaacatgatttttataaatttaatccaaatattttataatatatggatgttcaaagtttttaaactttgacttgagatatgtccaaaacgacatgtttttgtaactgaaggagagagtacgtggcatccaattataaaagaaccgaaagaatcacaggtttgtaggaaagcactaacaaaatgaaatgagatggtgccatctgtcaagggttaagggaacttgtcatgtctttagccacagatagttcaaggttccagaattcccggtagctatagtgctataccaacaggtataccatctgaggccattggaagcaaagattgtgtatcgatatgaattagaacttacaagcggaggtcatttttgctacttacttttacacaagtgtatcatcataaagaaattgctcaaggttgctatatctggtgggccttgtaaaactgaacaaatgcatcttaacgaaaaaagtgtcagttaggacaaaaatcgctagttggtgcttgacttaagcagctaatgtccctgctgttgtaaaaatagtacagctatattgcttcacactgagacatggttagaagggtaacactgccctattatgtagtgaaaagatgtcgatagcatagctccatgatgtcaactccctatcaacactaggtaaaagtttgtcactcactcactctcaccaaacacattttatgtggaagctgaagctatgcaacagtaatccaattatctccttgtatatcatcatcatctgaaaaggccaaaaagggcaatctcgcaaactaatgttattaccttctgtgctccaaagtccaaacatccaactctgggctagaccatcatcattgtaatactttcagtgtgataagaaattgccaacaataccatggaaaattttccctacaatcatgccattgaacaaggaatgagccacaattgcagtttgcagacttgtatttcccactcataatcagatgcaagaacttagaagcacacaacaagatgtacattagtacataacatttttcgtacaggctatatatattttttctttagagaatcagaccatattacaaatataagtagtttgacagtacagtatatttatggtatgcaacacaaggaactataaagcatgctaagattcacaagcataattccagaacgtaatgtaagtttgaaagaacggtgtatatacttgtgtacaccataaaaaatggagcatataactaagaggaaaaaaaaagtactagtaggatacaacaaggacatgtataggactcagcagacaaggtattgcaatgttgttgtaatggtggcaaaataacatccaatcataaagattaaacgctcagcagtttagcagaagttcagctaaagaagtccttggttcactgatatgttctgaagtagttgaacttgatagtagaggataggacttgagtacttactccatcacactatcagatatggatcatacaaaaggcactgtagaagtgaacagtattcatttctcatggccttaagtgcttgtaagaatcatcactttatttctttacatgctccacagcaacaggatggtctatctgtcaaaaaatatcacaaatttattgatcacacgtcatgaagaggatgttgagtacgcatatgtcaaggcatgacaatattgaatgatctaactgcatggattaacacaggtaatgattttaaccctatatgtaaatacagatacttgtacagttcccttttttttcctatgcatatatgtgtgaatgtgtgatcgtgtggcttaaccttacttaattataaaattgtgatcttatgtgtgttgtgaccttgaggtcaacatgacatcatcagttcaccaggactctggtgtcagaagagtcctgatttgaccaacagatgtaatacagtggcagatcaactcaagcagcctggagtaatagacctgtagccatgtaggcaaggcacaattacaaaaaatgatatccaactctctacaaggtttacagcattatgcaaaaactgccattcaaacgctggacagctataggaattcctattagtacaatttgaaacataagtacataaaagcactggttctcgaaaacttttccctaaccaatggcgatgtgagttacaaacataagtccacacaggtcaagcagttaactctacgtagctggacagctctaggaattcttattagtacgatttgaaacataagtagtaaataataaaagcactggctctccaaaactttttcctaaccaatggcaatgcgaggtacaaacataagtccacacaggttaacactatgtagtcggtacagatttgacaatgtcatcacctaatgttacttgaaagtttgtggagtgattaatgaaatcattttctatgttaccaattgtttaagaaaattgtaaatttctgaagggtttaaattggttgcaatcaccaaaatttaggtgctcccagagcccagaaatgtcgtcatatagtaactgtacaagaaaacggcaggcaatactcggaaaataaaacaatgaattcaatgtgcattttgtctcttaccttgcaaattgcataataaccatgatgagcaatcccatacgtatctgtaatatccaagaacctcccacatctcttcaaggaatctcatgatcgctgtaaatagaggatattatcatcaatcataagaaaatgcaggaaattgctaaagtgtccatggatgattgatttaagtgattagatgaaatgaatgattacctcaactgttatttcagcatggcaaaaagggcagtgctttgtctgttgtgtgttcttggttcactttacacattgccaatcctgaatagattaggatgatatcatttgccaaagcatgttacttacatatatgctcttctgcaaagtcatcatccgtgtcagctatagatttcacaagagtgacttccaccagttcatcgcaaagtgcaagggttgactccaaattatcttcattaaaactgagatcaatataaaagttgtatacatctggttctgctgtaagacgttccttcctcatcttctcaaataatcttctcgcttcagtaaatttcttttttttattcaacaatcttataagagcattgtatgagcttgcagtaagcctgaatcccttttctatcatttcactatggaaatacagagcctctttcatatttcttgccttacaatgtcccttgatcaaaatattatatgtgttttcatttggtaccacctcctgtgaaagcattcccttgtagatctcggtggttgatttcatgttcttttcaatgcaatactgcttcataagagaattgtatgttgtggtatttgggtggatgttcttctccagcatccattcaagcagcctcttacctccttctaccctacctgacatgcaaaagccattcattagaacattataagtcacaatagtaggcttaattcctttatctaacatctcttgcaaaaggctgtgagccctgtcaagctctttggactggcaaagagcaccaataatagttgtatatgtgtaaacgtctggtttaagacctgcttcatccatgtctatcatggtcctcatagcttgctccaaattgccagccttgcacaagccattgatcagggagttgtatgtgaaaatattcagctctaaccccttgctgcacatctcatgcaatagttcattagcagcacacacatccccctgcttgcagagtccatctgacagagccgtgtatgtcactacatttggtgtcactcgtttctgcaccattttgttatgcaccagaaaggcctccgtcatcttcccaaccttgcagtacccatcaatgagaactgtatatgtgaccgcatcaacatccaatcccttgtcctccatctcctgaagcactctctctgcctctttcaactctccagcccgacaaaggccattgatcagcgcagtatacgtcactccatcagctgccaaccctctcttctgcatctcatcaaaccaattccttgcagctgccaaatcacctttcctacagaacccactcattaccgttgtgaacaccgctgcatccaacaccactccatgcatcaccatatcctctaccaccctcacagcatctgaaacctgcccttcgtcgcacaacaatgcaataacactagtataggctactgggttgagttccaacccccttgctgccatttcacttaacagcttaatcgcagtctccagctcactaagagtacaatacccatgcaccataatgccatatgttacaacatctggcggcgatgccatttcatcaaacagttggtgcgcatccttgatgcggccagcggtgcacagcgccttgagtagtatattgtacgagcaggtgttcttctccgggagttcctgaaacaactgaacggcttcatcaagcgggaggcggcagagcaccgcgttacaggactccggggagggagagatgccgtactggcggaggcggaggaggagaggcgcggaggggaggcacaggaggaggaggtcgaatgagacagggtcggaggagaaggccttgtaggtggagatgaactgctcgacgaaatgccgatgaggggacgggaagcgaagggcgcgaacgaggatggcccgcgcggcgccgggatcgcgaacggcggcgaggtgggcagcgaccgcgaaggactggagcaggtgagggtgcgggcgaggcccggaggggaagaggaggaggagcggcaggaggatggtggggaggtgcgggtgcgaggcgagcagggggagcgcgaggaggaggtgaagtgggcggaggagagggaggaaggggaggggagggagagagcccgggttaggggaggagaggacggcggcggcgaggcggcgcgcgaggtcgtcgtcggccggcgagtccgggcggggcggggagtagtccgggaacgggcgtggcgcggcggtggttgtgagggcgttgctctcagccggcggcgcgcgacggcggccgtgacgatgttgggaggtggtggtggtggtgaggctagagcaggcagagcccgcgcgccggaggaggggtcgcgagtgcgataatcgggaggagcgctccgctacggcggcgacggcgcggcggaggagcatccggcgcgggcggatccggggattgggcctcctgccggaggcggcgacggcggcggcggcggcgggagacgggcagatcggttggcaaagaaaaatgaaaaactttcgggacgcgatagcatattgaatgtcactaaaacaagaataaattcagcccaaaggtgcacgtaaattggtccaaaagtttatttgcaagtcaaataggcccagaatttcatcccaataattgggctattttgtggcccatagaaaaatcagtgatgggccaaaccgttgcctgacgtcagctggttgcagggcagaccgacgcttcgagtcccaaaacggtcaaaccgaaaccgagccacctctcgccgtcgtctccggtcgccaacccgtcccacccgtgacgtcatgccgaccgccaacctcaggtcgcgcgccgccgcggccgcggccgccgccgcatgcctcgcggccctcgcggtggcggctctcctccaccgccggcgcagacggggtcgcgctcgcgcaccagcctcgcccggcctcctcgggggacggcgagggcgccgcccgcgccgagcctgcgaggaggaggagaagccgcaggcccggttcaggcgcgtggtcgcggacaactcctactccgccttcaagcacctgcgccgccagggtgctggaccggttggctccggccaccacggcagcgaggcccagccgacgtctcaaggtgtggtcaccctgctcctgtttcttttgatctcggcattgccttgcccttgtagatgtgtggttgtattgggaattctgcgaacggttggtacgctaaggagactaaggcaggattaggggggacgtaatagcgtgttggttcttcggggaatttcgtcgaacattttgagtgcaaggttgctccgagcttgaggattgactatggagatctggacctgtctctttgcatacgaggaacataaggaaacgattgcttagttgattgcacagcgtgttagtccttacttggcataggaaggggccttcatgatgccagttcccttgttggagcttcgtcaggtagttatcaacgtgcactgaaaacacaacgtggagcttcgtcaggtagtccttacattgcatgctttgtctatttctttatcaatgcattactgtacatcatcacacccttacccataatatttggtacagttagtgcatctcttgtttaggaattaggattcctagttagacaaaaattaaaaaggtggatcgatcaaaattactacttcacgaggacttttattaactttaccaaagattcctacttctcaaatattatgagttagtaagtttactacaaggctgtactgcacagccttgctcacaatatttggtacagttactgcatctcatgtttagggactcctagttaggcaagtaaattgaaaagattgatcgattaaattactacaagtgcataaaccgttattgatagttagtaagaggagatgctgaaagcacaagtgcctgagtttaagtttgattgcatgagttttcaccatagtctctatgcgcatactgcaagcgaattgactgcacattgagtaggtgacacatttccttttcttatcgatacagagtcatcacaaaaggtgcatccatttgaggaggaaatcacttccttgctgaacaacccacctgattttcagaattttatgcctggtgatcgatgcccagaaatgagcacttcatacaattgggtcgaaacagatgctcagttggaggacctggctaggttgttggatgatgaaaaagcttttgctgttgatacagagcaacatagccttcggtcattcttgggatacactgcactaatgcaggtaactggtggtggataccttcttattgctctgttgcttattggcctgttaagattatgacatataaatatcatttttagatctctacccagaaggcagattatttaatagacacaatagcgctgcatgacgtgatgagcattctacgaccagtttttgccaatccttcaatctgtaaggttgtgcatctcttatatctgatatcactggaaaccattagttttcattttcagttctgcttaaagtgattttgccacttaccatttgtatttttgaattgtgatggatttgcatgttgtccaactttggaagctctagaattatggaatgtgcagtacagatgatggtgtgaattgatttacatgttattccaataaagtttaaattacacttgtgattacagagatagggtgtaggagaacatggtgtaaacaagttgtttccaccagcgtcacatttgtgtgcacccttggtactaagattactataaaagatatctagagaagttcagagattgattctttctggttaaagagctgagccatggtccatggtccataaataaaacaatgtaaaaatgccttttaattattatattttcaccataacacatgattcacattgtctgatgtgcaggagggattaagcctagagctttcatagttcatccctcctaaacgtggtttgtttgacagtctaatttcctgtttgtatcaagcttaaacccactaaactctaatttatgatatccataagatggtggattgttctttctcagccatcatgaaagataattatgtgtctctgcattagaggtagtaatatatttttttttccaagaatcatgctgcgttgttgatactgcagggccaggaaccactatacacaaacaaccaaaatatggaagtttgaaggacaataagtcaaaaattttttcagccaatcctaataagacatgtaatttctatagaagctgggccccgaacactctaaatgaacgaatgctgagtttggtatttggcctaacaaatcaatccaacaaacctaaagcccttaaatcttcttgtaaatttgaatttctggaacatggggccctaacagcatggatgatttacatggtacggtgggtgtttggttgatcaagataagattgctgaatgagtccatcagtgttctcatagacattttactattttgcccagaaatggtccgtttacccttggctcttcagaatcaatgctatatgaatcatttggttcttgttttttcctttcctgtctggttattattaacttttttcatgtattattctttgtcagctctctctctctctctcttttgtttactcttctctgtctattactcactatcaaactgatgatcacactttagcaagtgaacatttggacattggtagagttttagttatcgatatgtctgcttgatatttcaccatggagaaaaataaaccacagtgaagcaaacttttacaaagccgtatagacatccttatgtatatgaactgatgctagctctaacccctagactacggttttgagttgtttcattaccatccttgctcccttttctttttctgtcctttgtgcatatggaaccttcagtattgtctctggcacttgatagtctcatgaattccttcagagctcataactattttagcttgtaatctcatttctttgcaatgtagtggcagaggccttttttagacacctacactaatttctaatgagtttttgactattagccaaaatcaattgctgtataatcgtctcagcagaagatctgtgttgctttcttttattaaatgcagtttcatttaccttctccctacttatttgtcagatcttccatggagctgacaatgatgttctttggcttcagagagactttcatatttatgttgtgaatatgtttgatactgccaaggtaagtccccctacagtatgcatgtcttggatgaaacatctaataccattccgcagagatttctccagcatgcgagcgaactgtgcctgttttttgtcgcatataatgtttgcttgccatgtcttttcactgtagcaagttacatgccatactgtacgtagatatggcaataggtcatgaaacatcattttacttggacatctcattagatgtgagcatattttactttctttaatgtaatgaaagaacatcagcagtgccaatcaattgctgacctacatttgtgtgcttcccgttcatttttgcattagtggttatagttttttcatgggacaacataatgagctgctaagcatcatcaccaatattatgatatgtgatagtttaaagttcgtcacgcttgattacaatttcttatgtttcaattttatatatttgattttagcttcaagtttcaaccagaaatgtattcatggtttaagcaggggaaatgatttcataactggtttactgcaatatgaaaagatttatggatttacaatgtgtttacgatgaaaacatctttttttggtaccagttcctataatctagagtagagatcaccttcttatgaatattttggtcattgaacattggttgtttaatggcaactttgcccctaaagttattcacctatgctatcttagatgttcatttttttttcaccggacctcactttattatttatgttatgcatgtatgcccttttctgaattgccttatgaaagtaatttattgcaggcatgtgaggttctatcaaaaccacagaagtcattagcatatttgcttgaattatattgtggagtgaccacagacaagacaatgcaggtaggccatttattaaggttggcttgctaaagccactaaagtgttttcatcagcttatttactggtttgtttactgtttagtagctggttagctttcatctgccgcctcaatttttacatgattacttctttttagcactttagacacaatggtgcacagggtgctacaaaatgtttaaccatgttagttacagagaatctttgccaattcatttagagcatttgtgttgcacttatttatgagcttagcaagatatatgtttagcttttgttgaagctttcatgtcctagaaaacattagttgcataagctcatgttatgcattgttgattgtgatttcagaataataatgtagcagtaggttctttcaaattcatttttgcacctatggaagctcatgttatgcattgttactctgatttcagaatctactggtgtagcagtagattctaagtcatttctgcactatctgttgttacaaatattaagcaccattactgaaataaatgattgttgacctaaatacctaatggtggtcagtggtactaagccctaaattgtggtggttttctgaatttgtgcctttacatcctttaaagcatgtcactaaaatggttgtcacatctttagttatattttgtcactacttgcattactttatgcatgattcccttgcccttttactcaattccatttgatcctcatacaaattcttgatcgaaactctgttccattaatcaatctcagctgatatttagaagcctgtttccttatgcattcaattgttattaaataggtgacatgtaaaagaaaatgataaacaagttccttctgcctacttgtaatcgatgaccttttagttgtgcctgcaaaatttactccttccagtcaagtatatttgacatagggagtactagaactgatactcccaacgtcagatatacttgaccggaaagagcagtttgttttccagcatcacagttgctctcatttttacggttcattctccttgattctgatatttcagcgtgaggattggagattacgcccactaacaccagaaatgattcagtatgcccgttgtgatgcgcattatctgttgtacattgcaaattgtttggcatcagagcttcatgcaaaaacttacggtatgatctatgttcctatgtcgagtttccccttgcttttttggaggggaacttttcccttccaatatgtactatatgctacttttagttgttacaagatagtaatttgttcagcaaactgagtcaacaaggcaattagggtgtgtttggttgggtggatgggactggatgggagatggccgcctgattttttggggtgtttggttggaggacagggtggatatggtgacccagaatagagaatattctctcaatatgctggatgaagggatccggttcttttggccggatgaagccatccaccttctttaggacgctgattagtacatgattagtgagttgattagagtatgattaacggtattagcatgttttgctattaattagtagttagcatggcaagattagtgtcaacaagtgttaattccaaccggtaagtgtataactagtaatattatgccaattaagatattataattagttaattaatctcatccgatgcatcctcatcctatcaaccaaacaaaaagttggctcatcccatccatacaaccaaacacaaaacttgtatatcctcatccttaaaaacatggatgaacatatcccatccaaccttgcccttcaaccaaacatggatggacatatcccatccaaccagacattacagcattaccacagacagctacatttgacatcttagagtcctagacaatagaactcatgactccctgcatctctaaattagtttcacatgagctcacaagcatcagtttatctggattgttctatgttcacccttcagttcagctgagcacattgttttctgcaaatgtaaattactgatgtagctctgttgggctgcgttccaacctagaggttcaaaacgtttcctctctggcacgaaaaacaggtggctcattagcacatgattaaataagtattagcttaaaagacttgaaaatggattaataatttaatatgatttttttaaataaactttccaatataaaatttttgcaaagaacgcaccatttaccaatctgggaagcctgcgcatggtaaacgagggagtagaagtttggaaactggaaaggggagcttagaacacagccttagtctgttatgcttaaactttaaaaagcttccagtccttgagctgtgtctggaggaccatctatgaaaaaattatataaagatatgcactatctattgtactctcttttgaatgcttcctccacccaagaatgtaaggcatattttttggactgcagcccttagagatactaattagagagtaatcaagtaacgtctaatgactctttggtctatgttcaagatgaaatatatcttacattataggacagaggggatcagtaactttcaagctacaagtaaaaacaaaatttcatgtactaataccttaacctgtgcataaactggaaccttctggatcaagtatctaaaacttatttgataataatatcagcaaatatttagctttgtaagaaaatatattggtctattagcctatacaatcctgttatgcagcttaagaaaatgagattccgtgttgaattgatgatattttattgcttcctgaaaccaaattacataattatttccattgttccctgtctcacttttttgataaactgtaatatctaatcagatgcttcagactctcccaatgacaaaatcaattttttcttcgaggccagccatcgctcaaatatggtgtgtatgcaactgtatgcaaaggaaattgaatgtccaccaggagcatcctctgcggcgtctattttgtcaaaaaatttgcaaagccatggacttgactcctataaatcaagtgaagtgaaggtgctcgttttctgtatttgtttgcctgcttgccagtgatttcaataaattctcaattttgttgctcttttgtaggatcttgtttggaaaatttgtgcatggagggatttaatggtcagccaacatattcttattcttttagaacaattgattttcgcattttcgtagggtatattcttagctttttgttaaatctattagctgtatttggtgcttcacacattgtattttcctatttctgcatatattaagttgctgcacccaataatttgacatatctgttttcttgtgattctggtctctggatttccagactcttcaattatcttgattacttcattgcaggctcgcatgcatgatgagagcttacggtatgtcctgtcagaccaagctatagcttcccttgctgttagtgttccaagaggtccaactgaggtgtgttctgccatattagaaactgaaacaagcaattcaactgtgtatccttccttgccgccaccttcacctattgttgttgctcacgctgaagaacttcgctatctgattgaggacatcactgtcagcatggatgccatctttaaaaatttgcttgagaagtacaaagatccaagtagattatgtcgactatcagtttttaattataaccttgtatcacagctgagtttgaagcaaaaaaatatgttctcctttgcatcaagtggggagaagttgttgatggcaccaactaacaaaaaggcttcccgggaattattcattaaaaagttttcatgcaagtccccagtatatcacaattgcaggatctacgccagtgatggaagactgctttgctactgtgaccgtaaaaagttggaatggtttgtcacttagatgcactatttagtgtttataggtatgtaaaatcatggttatcttatcaaactgaccgactcttctttccaggtatattcaacgtaatttagcaaaattaatagaagataatcctccagcaattgtgctcttgtttgaacctaagggtcgcccagaggatgaggataatgacttctatattcagagcaagaaaaatatttgtgtcggatgtggagaaaagagccactatatcagatatagaattataccatcgtgctacaggatgcattttccagagcatctgaagagccatcgttcacatgatattgtacttctttgcgtagactgccatgaaattgctcattcagcagctgagaagtacaagaggcaaatagccaaagaatttggggtgccgctttttgtacagaagatattaaactcaggtgatataagtttaatagctggtgcatcattatctgaagataaatcaaatggaacaggtgtgtctcctttgcagctgaggactgctgcaatggcccttttaagacatggatccaatatgcctttgaagagatatgaagagctaatgcaggtgatgagaatcttcaagtattttgggcttcaccacagtttcaacattgtcttattgaaacttttcatgctagttatcatcaatatttcagtagaccaaatttgttcttataattagccttaaatctgtattgctgacctattcatttctttgcagattgtgaagtcatactatggtggtagggatgtgactcctgaagatcttgagatggcattacttgttggcatgagtcccaatgagcgaaggcgacattcaaagaaaaatggtttttcttaccgatcccaggctcaaaatgttattagaaaaagcaacagcaacggcattgttgagaataatgaacatgatccagaaaatggatatgctgagcaattttctaaaaatggagttgagaataacagtcatccagacattgatgagaataacaatcagctaggtattgatgaacataccagtcagccaggctctgggggtaataagatacatggtccaactctgagcaaagaaagcacaatctatccaccccgtatggctaatcccatttctgactctagcattgaggcagacaccgtgcagcaagcaagcttaggtggtaatcctgcaaacggtgatcttgacagggatccatgcggcagtaacaattctaaccaagccattccccaaaacggtgacaagaagatctccctgttaggtcatgggcatcacggtaaacaggtcgtggagcttttgctttccaacggtggcgaggaggccattaaccagttcagccaacggtggaggcaggtcttcgtagcttctcttcaccctcgttatttgccttcgggctggaatataaagcacaggtgaattcacctgtcgttttgctactcggtttgttctcacacattgataattgcgcatgtttgtggtgcaaaatcaccctggttatctatcaactatgtgtaggtagatttggaagattttttctgttagatgatttttttttcctggacaattatctttgaccctctggacatgcataccttgtgttctttgctgtgtagtggacggcgggattttggcgatttcagtgtctacaagccatcaaagaaacctcctgctgcagatcaatccgagactttagctgctgctgctgttgtaccctgaggttctagtttacattcgaagttacttccatttcattaaacctgaaccttgtacctgtactgtgcccttctatattcatgtactaccttgtttctacatctggaaagaactgggttacatctgtttgttccctctgccatgaagttttgtgctcaccaattctatatatgcagaagaattacagcaaaactggtaaaataaataaaatcatttccttgctaaaattgaaagcaacaagcacaagtactaaggctgtgtttagttccacgctaaaattggaagtttgaataaaaaagttggaagtttacgtgtgtagaaaagttttgatgtgatggaaaagttagaagtttaaagaaaaagttgggaactaaacttggctaacctaaccatcatgtctaaagcttgtgttaatttttatttttttgggtagtatctgatatctactgcaggatgccaggatatcctcagcacgatcctgagtcccagccagtgtgagttactagtatctcttttccttttatttttcatttttccaatatgctagtatttctttcagtttcagatgggccaagccaaaaaatgattcgagtgaaatggaagcagcagaagcagcagcacatccatccacatgatccgaccactgcctcctccaccactcaccccgccttgaaaaccccacctgccctacttccgcctggagagcctcggcccctcgcctcgcctcgcctcacctccacccaaacccaatccgaaatctttccctccactcgccgccgccgccgccgccgctgttgccggtgacccgccagccatgtcgtgctcgcacctctccaccgcctggtcctcctccgccctggccacccgccgccgctccgctcctagctgcggcagcagcggccgcctgcaggtggtgcggtgctcgctgcgtgagctgcggagccgcatcgactcggtgcgcaacacgcagaagatcacggaggcgatgaagctggtggcggcggccaaggtgcggcgggcgcaggaggcggtggtgtcctcccgccccttctcggaggcgctggtggaggtgctctacaacatgaaccaggagatccagacggaggacatcgacctccccctcacccgcatccgccccgtcaagaaggtcgccctcgtcgtcctcaccggcgagcgcggcctctgcggcagcttcaacaacaacgtcctcaagaaggccgagacccgcatcgaggagctcaagcagctcggcctcgagtacaccgtcgtcagcgtcggcaagaagggcaacgcctacttcatccgccgccccttcatccccaccgagcggacgctggaggtgaacggcatccccaccgtgaaggactcccagtccatctgcgacctcgtctactcgctgttcgtgtccgaggcggtggacaaggtggagctcctctactccaagttcgtctccctcgtccgctccgaccccatcatccagacgctgctccccatgtcgcccaagggggagatctgcgacatcaacggcgtgtgcgtggacgccaccgaggacgagctgttccggctcaccaccaaggaagggaagctgaccgtggagcgggagaaggtgaagatcgagacgcagcccttctcacccgtggtgcagttcgagcaggaccccgtccagatcctcgacgcgctcctcccgctctacctcaacagccagatcctccgcgcgctccaggagtcgctcgccagcgagctcgccgccaggatgagcgccatgagcagcgccaccgacaacgccatcgagctccggaagaacctctccatggtctacaaccgccagcgccaggccaagatcaccggcgagatcctcgagatcgtcgccggcgccgacgccctcgcctaaatccaatcaactcatttcttcatcccatccacctcgcttgagctgctgaggttgctgctgttatatatactactctattcttttttacttcctttttctctcttgctattgtgtctgtaatttctgtgatagcacgaaaaaaaaaaggaaaaaagatcgatccgactcgatcgatgtaattgttaatcgcgcgagatacacaagatttcaattcagcgatgccaaatgtacaagcagagtattctactactatcttgcaatctcctctacttgcctttctagattaggagggatatcgccgtatgcagtttcttccttttcttgtgtgattttggtgttgacgacacttcctttttttcctttccttttcttttctgtttgcttcactttcctcgagcaagcaaacctgtgatgctgcttcaccgtgcacaactgaaacagtgtcgtgtcgtctattagctgcaagttagcaactttgacgggcagcagttcacaggatcatcggagaagaacgacgccgccggcgtccagagcttcctcagcgagcttcattcccgactgacgccggacacatatgcccatcgtcgatctctcgttctgcttttctccgattggtctccgtattgcataaggagaaggtgcaaactgagccgccgtaagtcgtcgcccagcccctccggcgacacctccaccagttcggcttaggcttcgcgcgcgaatctgcgatttctaatcgggctcggattcagcaatgccgcgcatatagagaagaattcacgaggattagccattaatcacagcaagctaatcaccgacttcaactccaactccgtctccgacttgctaccatcaccgatttcaactcggactcggactcggactcggctgccgataaatccaagcccgccgccactctccgtctacgcattccccacaattccttccacccatcctcgcagcagcgctcgttcgtccatggcgcttccccaccactcgagtccccgctcctcgcgcccgatcagccaccgccgcagtgagctcgccgtcgaggccaaggggagagtagtctccaataaggcgtcaggagggtcgcccgtcaagaagatgtcatccgcgccgtcgccggcgcccgtgtccttcaagaagggcgacgaggtgcgcatccgcacgccggttgggaggctagggaccacgacgctgcgcctcgtcatgtggctcggcgcggtcgtcgtctccgacgctgatgccgacgacggccacctcgaggtcatctacaacggcaacttcccgcgcgacgaccccttccggaccgtgcgcgtcgccgtcaaggacgtcaagctgcccgcgccgcgcccggccccgaccctgaccccggcaaacatggcggccccgcggccgaccacggccgtcaagtcgctgccgcggctgaagatgtttgtgctggagaaggagcagctgcgggccaaatccgaggccttgttggcaccgtgatcagtgttcttcagtagtagcagtagctgcagaagtttgtaggaatcagaacatgtcttggtttgcatggaaggcaatgtgatcttgtaaattctcatagataggatgatttcttggcatgagaagaagaacatgcaatctgtgtgaactgtaatttctcattgattatgaatggaagatcgaggccaatatatgcatgcatgatgcatgttgatccaagtgttcggatcagaatcacaatccagctgcactctgattacatgtatgattacaatccacctgccgataactttgatcttatagctaggattcagcttccaattctttgcatgcctttggctttccttgcctttgttgatcaagagcctgggtatgcagcaaacaaagcatctagctggtaatgtcattttcaattttcattcagacgaaccgtttggctctcagcaacatcaacgaatcccaaaagaattagtagtagtctgttcacaaagaaatttagttgaggcggcaatgttattttgtttcactttgttgctccgaaaagatgtaaactgccgaactgcggattaagggactgtttggcacagccccagctctagctccacccctcctggagctggagctcagccaaacagtttcagctccaccaaaactgggagtggagttgggtggagctctctcacaaaatatactagagttgtgaagctgggttttggcagctccacaactccactccagactcaattcctggagttatatttaggagttggagctataccaaacagaccctaagtagtgggctttgggccaaatgcgtcagagatatttaactatttgctacttttaggtgtggcaattaacgatttaccactgggcccatatatcatagacccatgtggacccacatgtcattgagataggagtgacaaataattaattgccaaatctaaaaatgacaaatagcgtggtggacaagatttatgtgacatcggttttctcggctagtgggttcaagcaaacaagaccggaggacctacaaatggggctcctgatttttgttgtaaaaatcgggcattgtttcagtttgttaagaagaatgtttctccactggcttaacacatgtttcagactattaaaatgatgaaacacggttgaatcatagattgaaacatgtaacatcaaagttcaattactgaaacatcaacaaatccataaaaatcaaaggacaaaattgaaacaccataagaaatctcgctgtaacaatttgatccaacacaaagaaacatcgagatacatcggctgaaacataaaaaaaaatcgtgaagatatcagtcagagctggcttcctccctcacctccaatggcggcagtgcaggagtagaccgaaaaaatgacacccgtagacatccagcaagcggagacgagagctctggcgacaaccgtgacgaagaagacgaccatgctgctgttcacgaccggacaagaagctgccaggctgctccgtgtgagtcgaccaaccttcgcctctgcctccatgtaaacacccctcaatcacaatcaggcggcatgccttgttccatccttggacggatgagctgacgactgacgtccaacatggcgtcgatggtggtgaaggcggcggctgtggcatcaaacagagaaaacagcatcgaacgtgagagagagaaagggaggtgcgagaaagacagagggagtcacaggtggttgggaaatagcgcacggcattttcttctctccgtcaggcgcacgtacgataaatagcatttttgaaacaagaccaacagaaaaggatttctttttttttttcagaacaactaggaaacaagatatcgtctatacaacgggattagttatgagtgaaccattattttccatgatttagctatgctctgagtgcatgcgaaggtggcttaggcgtaacgtgaggaggtagaccgtggtaagctggttagaggctagaatagcacatcctgtgtactactatatactatactagtagttttttagtactactgtatactatacttttagtatacttttctaagtagtactagcttttctttggtacacctttttatgcagccaaagttcacactagagacctctaagagtaagtacaatagcaggctgtaagctagctataactatatatcgagaagaaaagagaagagagagaagaaagcgggctacagatttgtagccagctgcagcacggactctaagacgttgtgtgtgtatgagaggtaggaccgggtattaatggtgtagtatatttttataggtaactattatatgaatgggttattagattagctatagatgatttggagctaacatttggctatactattaaacttgctctaacacacttctagtatgtctttttatgcactagccactagagttaagagcttggccatatgtatagtactcctcatggctctcgttggcgcaaagacctgatacccacgaatcatacatgatacgcacaaggtatttgatgtctgtgtatcgagtccctaatacctaggtatcaggtaactggtacccagattattcgagttagtaccataggtactagacctgatactataggtatcgaggtacttggtcgctagatcgggatggtatccataagtaacagaccaggtactaggtatcgggtacctaaagtacttagtatctatatcggtcagataccagtaggtaccagacctggtactaggtatcgggtacctaaaatacttagtatctatatcggtcagataccagtaggtaccagacctggtactaggtatcgggtacctaaggtattaggtacttggtccctagatcgggttgatacctgtaggtaccaaacctgatattgggtattggatacctcgtactacattgggtattaggtacctaagtttgcactgatgttagcatcttaacaattgaaaccggtgtgttatgtcttcagcaagaagtcgtgcgctgacatgtggccccttgagagaacacgaagagatgtgggttgacacgtggggatttacgtgaagttgataaaataacacaagtggttggtcggtcaaatagtcatgctcatcaagtttggccgtaatctgaagaggcccaatataacgggaaagtgttttcatccatcgaggggagtttcatgcatgccacctaaatagtcatcaaaaaattttttaaaaaaattggtaacatatattaatatgagatatatcactctacaaacatgcaagtttaaattcaactcctataagttgtaataaaaataacaaatatagctatgaatgtacgataactatttttagtttaattttttacttttgttgtaacttgtagaagtttaatttggtctttatgtttgtggagtgatatatttcatattaatctatattgtctattgttttcaaattttttaatgactatttagatgatatgcaaacaacaaggagatatccactcgagagatgaaaatccacatcccaatataaccacatatgtattgtttcagactatcagtcgatctctcgttccatttttgggattggtattgcttatggcggcggtgcaacctgagccgccgttcccttaccttccggcgacaccttcagattgaacaatgccgcgcagagaatgaatagattgtccaagtagaataccggatcagttaatcacagccaagctaatggctgacttgaactcggacaccgacttcaattccaactcggactcggctggctataaatccatgcgcggccgcctcccttcgcattcaccacaattccttccgccaatcctctgcactcccagcagcgctctcgttcgtccatggcgcttcgccgctcgagtccccgctcgtcgcgcctgatcatccaccgccgcagtgagctcgccgtcaaggcgaaggggagactagtctccaagaagcggtcagtatcaggatcgtccgtcaacaagatgcccttcaagaggggcgacgaggtgcttgtccgcactccgttggggaggctaggcaccacggcgctgcgcctcgtcttgtggctcggcgcggtcgtcgtctccgacgccgatgccgacgacggccacctcaaggtcatctacaacggcaacttcccgcgcgacgaccccttacggaccgtgcgcgtcgccgtcaaggacgtcaagctgcccgcgccgcgcccggccccgaccccgaccccggcaaacatggcggccccgcggccgaacacggccggcaagtcgctgccgcggctgaagatgtttgtgctggagaaggagcagctgcgtgccaactccgaggccttgttggcattgtgatcagtagtagcagtaggtgcagaagcttgtaggaatcagaacatgtcttcctctgttcttggtttgcatggaaggcgatgtgatcttttgaattctcgtagattggatgatttgttcgcatgagaagaagaacatgcaatctgtgtgaacttcaatttgccattgattatgaatgaaagatcgaggtttcgcttctttatatttttttttaccaatatattttatccttgattttgttgatatccaagagttcagatcagaatcataatccagctgccctctgattacatgtatgattacaatccacgtgctcacaactttgatgttgtagctaggattcagctttcaattctttgcacgcctttggctttcctttccttcgttgagatcaagagcctgggtatgcagcaaacaaagcatctagctggtaatgtcatttctactctgacttggatatcagtttgtgccagtctctgtgtcaatttttttctttctgaaaggaaggcaagggccatatgtatttccttcactttccgttcagacgaaccgtttggctctcaacaacatcaacgaatcccaaaagaactagtggtagtctgttcactctgttcacaaagaaatttagttgaagcggcaacattattttgtttcacttcgttgctccgaagagctgtaaactgctgaactagtgggccttgggacagatgcgtcatgcgtggtggataagatttatatgacataacggttttctcggctagtgggttcaagcaaacaagaccaatagaaaaggatttttttttcttttttggaagagtaccctccgatggatatatgagccatccatatattttgatccaaagtagaagttgtggcagatttgggaaaaaaaagcatcatggtagataagtacatttgcatgtatttttgcatggacttcttagggcgttcacagtgcgccttcgtggtattcagccccaaacaactacatagacgaaatgcttacgtgaaggagagaatggagtggggaccatgttttcatggggttcccatgtccaatttgggtacccagagcctcgtcagttttttcagaaaaaattgggtgagtgagagcgtcgttagttccgtgcatggccggaaccagcagcaggaggaaagacaatggcgggctagtggcggagaggggaggttattgttggtgcaggtgaagagggtggggcggcggctgcaaagctcgtcactagcaccggcgaggaaccggtggctacgatgccgacgaggaagccacggtcaacctcgcatcgtgtccgaaaagccgccgcatccgacagttctagtgagcttgccgcgtcgtcatccccccctcccctcccccctgcccacaattcgctgccgtcgcccaaagccagatctgactggatctggccgctcagcccgacgccatcgctgctctgcccgccgccgttgccgccgcttggatcaccccgccgccgctccaaccgaggctccactcggtgccatctaaaccgatggggaaagtgagaaagaagaactgcgaggaaaaaggggaagggaagattgaaaaaagaagataatggtgaggcccactacaacgaacttacacttgagtatgtgaatttagagggctttggatctagttggcaactgaggctcaccaagtgcgatagctgcaccgtgaacacccttatgcagctggtggggccactggtcaccgatccgtaatacgaatatgattttcttggctaatcactggattatgtgtgcgagttagttggagagaaaataggcatgctcctgtggttatgtgcatttacgtacacggtttgcatgcataggaattaggtgagatctagcggcagcgagaggatcaatctaaacggcgagctcgccgacgatgccacacgatgggtagctagcaggcgatgatcatagccaatagaagcctattaatgtgcaggtcaatagaatggtctgttctgcacaaataaattaaattggaagtcgaatataatatggatcagtgatggcgatgtcctccgccgacgagcatgtgcgcggcgatgcctctctcgtctccgcctccatgctaggcgtgctcatgctcctcctctatggcgagcgtgtgcacagatcagccgccgctacgagctcgccgtggaggcggtgagatcgacggcgagctccactacctgccttgatgtgccagagatggagagaagggaaggcgcaaagaggagggggagaagaagaggattgggctgacagtgggccccaccatgtttatttgttgtggctgacagtgggtcccatgtatctttcttttgttttggttgaccagactgccacgtgtgcgtccacgtaggactgaaactacactgggtcgatctaggggggtaattcgtcccttttgtaagttcaaggttaaaaataaccggtattagagttcagggttaaaaatcagacgaccataactattgagggggtaattcgtactttttttcaaaatataactacaatgggggcctcaaagcccacaagccaaccccacttgcattcctatttgttggtggactagcgtcccccacttcttaactttctactcatggtttactcaattcattttttaattatttatggattattgaaacggaatatttcttccacacttcaaacaatatactttctttaaaaaaaacctttttttctactgcattgctaatatcatttgttttaagctatttgttaaccttgtttcttaaaatatttgatttgtcaatgaagcggataattcactcgttccgtttttctccgattgatgtttgcatatggagacggtgcaaactgagccgccgtacgtcgtctccctgcccctccggcgacacctccaccagttcggcttaggcttcgagaaatctgcgatttcaacaatgccgcgtgtatatatagagcagaattcacaaggattagccattaatcacagcaagctaatcaccgagttcaactccaactccgtctccgacgtgctacgtagctagcttcattggtttcgactcggagtcggactcggctgccgataaatcctagcgctgcatccaccacaattccttccaccccatcctcgcagagtcgcagtcgcagctagcagcgctcgtagccgtcgtccatggcgcttccccgccgctcgagtccccgctcctcgcgcccgatcatccaccgcgccgtcgacgccaaggggaagaagccgtcaggacgatcgccggtcaacgagatgtccttcaagaagggcgacgaggtgcgcgtccgcacgccgttggggaggctaggcacaacgacgctgcgcctcgtcatgtggctcggcgcggtcgtcgtctccgacgccgacgccgccgacgacaacggacacctcgaggtcatctacaacggcaacttcccgcgcgacgaccccttccgtgccgtgcgcgtcgccgtcaaggacgtcaagctgcaggggccacgcccggccccgaccccggcaaacatggcggccccgcggccgaccacggccggcaagtcgctgccgcggctgaagatgcagatgctggagaaggagcagctgcgggccaactccgaggcgttcttggcattgtgatcagtgttattcagtaggtgcagaagcttgtaggattcagacatgtcttcctctgtttatttggtgtcatggaaggcacagtgatctcgtatttgtgataggatggtttactggaaatcttcgcaagagaacgtgtaatctgtgaagtgtatttatcattgattatgaatgaaagatcaagatttttttatatatacacgagcgatctgtttcgtctattatctcatgatcaatgcaatactatctttgcctctctctcttgttggtattgtttgagacaaatattaagtttacaatcacaatgctttactctactgctaaagaaaaacaatcctcattcgtttgtttctctaaagataactttaggtgtcaaaatcaccactacatataaggctatctctaatgtgcaacaaaaagtgatttaccaccttatctctttaagcgtgtgttaacattataacgatgctattataacaaatttatgctaaaaactatctaaacattgtcgagccggataactgtccaaacacgtgctaggtaatggtaaatacacgtagatatagaccctctttgtttaggcttataagccaacttataagtcgaaaagtctaagcctaaacaaacaagcagtttttccgtttggcttttttgaagccataagccactctaacactattaagccaaaagctaggttggagaagcttttttggcttgtgtgaggtagatgtatgactcaactactaaacttaggacattaaatccaccggcttataaatcatataagccaataagctgacttaaaagtctagaccaataaacctaagcctaaataaagagggccataatactaaagagctttgaaacacaactgctaattggcagccaatccatgctatgccctcacatgtgaatcaagcagcagaacatccattttatcgacgcttgagatatggcagatgatttgccctcgaacattatctgaccatggcccatcaatgacttggacactgacaatagtggccatgcaagcgaaccgacctgcaaacttacttacgtgtcaaataagtggttacccatggatttccacatcgtaacctagattgccgcatctagaaatgcaagtggatcgatccataaactcatttataatctatgggttacccattaattttgcctataaatagatttgtggattagactgcttacatccctagtggcctcgaatatagctcgcatcttagctcaagcttgcaacgcttgctggagcaacgtttgtgcatccttgcagggcgtgtcgcgtgatcgtagatcatgttgtgtgttatgacactcatgatgaaggtttcgtcctcagactctgttttctccctttatgaaatccattagcacgactgcacaagacaggcgcgttaacgatttggatctctgcaagcatcacaagcaattgatcaataaattaattacctatattaacatcacaactcaagtaattgatcaataacataaattgaccaatccatgttaaatgtataattactctacacttagcgcactaaggtcaggaacatataatgtttttcacaggcttatatttgtacagattatagaagtgccaaattgttcatttagtttgtatcaatgagttctttacaaagaagagcatcataggaaatacacaattatgtatactaagaatgttaaaaatgaaaactgcaaatatagaaaggacctcgatgaaaagtttttttttctagggaagggtatttttttacccgaactctacatccaacaattatgttaaaaactgcaaatataggacctaggacctcgatgaatagtttttttttttttgagaagggtattttttacgtgaactcttcatccaactagacatatgcaatattttagttctcaaataacccaatctaaaatcgctcctatgaagatttgaacttagaaccttttagctctcaaataacccaatctaaaattcgctcctatggagatttgaacttagaaccttgggtgctactcaggtcactgcaaccactaggcaaatataggacattgatgaatagtttaggcacataaaaactataaatgtagcaatgacaccctgctctcacgacaacaaaaaaaagttcaacgaatatgtgcttacgtcacctagacaggctgcaaaacaaagtgatagaccgtcatacttgtcatcgaagaacattgtaaatattgattagatgttatgcaggtatcttgattcttgcatagttctggacgcaacaggtacccaatctcttgtggatttttttccagttaggcaaaatataagggaaatctattaacttattaaaggaactaggaatgtagcccgcgcgaatgcgtgggcatgcgttttgtacactatgtttgacacagttataagagcaaaatatcaaccgtagaacatctacaaccatagaacatctaccatgatttcttcgtaaattgttttcgtcgacattaattgctttttaattttctaacctattagttttatattatagcagtatcatatttacctgatatttataagcaattatttataatcttcttcatcatttgaaaagaaggtagacttattttctttagaaaacatgtcaacgaaatgtaagtgtaaggtaaactaaggtatttttctttttttttcaattgcatatgtattattatggtttattcgatgatgaattgggtgagacatgaagctccactaaatatatgggtttatatagcctaatatgattgatgtagtttgagagttggtccatctatgaacatttcatgtagagtgggtaagaggttccacgcaagctaacgtgcatacgataacgatgaaatataattgtacaataatatttttgaaatgtgacataccatgaatacacgcttgtgtttccttttataagatagttctaacggttagaaataatggttctaccggttttaaagatataggagtactccaagaatgtagcttaaaaattatggttgttttaatatccaatattattgtgaaatgaacgtagctcaaccggttaggtttcttgtgatggaacttgctcgagttcagacttaacaaattctttcagtagtaggcaatgtacccgtcgatatcaagacgtacgtggtgatttcgtcaatctcaaaatatatcagcctagtctcttcaaaatactcaaaggggtatttgcatgtgtgcgttcacagaagtgattgtgcacgcgttgtgagcgcccgcgtttgtactttgtttaaaaaaaacatcaaacattatttattgtttctcttttatttaatagataaaacaatagggaggggatggcagtgttgtgtacatgtgatggtgaggaggtggagattatatttttctaacttttttaaataatttaagtgaaagccaatgatgaggtgtttcattttttctaagaatttctaaggtttttccctttttataggacgtgacacacggtgactcaagattttttcttaaaaaatagatttaatacatcaaattaaattgatttttcttataatttaattacaagatctaatctattggtttattatagatctcgattacatgcatatacttccgtatatgatgtagtattatattttatttttttatattatacaaaatcctatttttagaccgtagtttttccacggatactaagtacgcttttttttctttatagtacgcttttttttttgctttattttatcgtacatagatgtctattttttttcttccagctaacagtaggtagctttatatgttttttttaaaaagggagtagctatatttatggcgccatatttttcaccaaaaaatagtcggtatgtatttacattgtaattccctgaattacatatgcaattttagtgtatttataatataagtcccaaaattacatatgtaaatcctaaatttatatactaattacatatataagtggagtgtaactacagtgtaaattcgtataaatatataaataattattagttttacgatggaggtgaagtgctaatgagtttagagcttgattaggtgcagttggttctttcgcataagctgtaagatggggtgcagccttcaagtgcttgaaacgaatattactggacgatctcacggttaaaacattcgactgtacacaaatttagcaataccgttttttaattgtacttccctagggacatttattttttctttccttttcccagccaccggttgcatatgttttttaaggggaaaaactatcacctttttaataatagatctaatctaatggtgtaaataaacaggtccaccaatttaagtgaaaatcaacggtgagattagacagtgccacgtggcagcctaggagcgtttgtaggagtcccacgtggcggcttgagagcgtttgtaggaagttttatggacttttatttagtatataatagatagatagaaaaaggagtctccacgttcgctctcacatactagaaattctcatattaatcggagaaaaagaaaaacagagtccatatagaaatacaatttagaaatagttgaaattcggaattaaaaaaataaggaatattggaagaggtgattagagtctatatagaaatacaatttataaataactgaaattcagaattaaaattaaaaaaagaattaaaattttaaaaaaggaaatattggaagagaagagtagagtccatatagaaatacaatttataaataactgaaatttaaaattaaaaataaggaatattagaagtagagtatagagtctatatcgaaatgcaattaagaaataattgaaattcggaattaaaaataagggatattagaagtagagtataaagttcatatagaaatttaaaactaactaaaattcagaataaacataataaaattaaaattagagtttagagttcatgtaaaaaatacaatttacaaataactaaaattcaaaataaaacaacatgggaagtagagtctaaaatcaatatatgaatacaatttagaagtaactgaaattcaaaattaaaaattaaagaatattgaaacatgagtctacgtagaaatacaattagaaataataaaaatttttgcgaccagttctacatatggagatggtggaagctgagccgccgtcatctccttgtccaccgctggcggcggcggcggcgacacacacctagcttcgcgttcccgcctgcttggcgccattcgggattgcatgatggtggcgaggcgtaacggacgtctccgattccgagtcgagctcggattgaagaattgtgtctgacagccacgctttgcttccttcacagacttcaattcgaactcggactcggctgccgataaatccaagcgcgccgcccccaccacaattccttccacccatcatcgcagcagctctcggcgctcgtccatggcgcttccccgccgctcgagtccccgctcctcgcgcccgatcatccaccgccgcactgagctcgccgtcgaggcgcaggggagagtagtctccaagaagccgtcaggatcaggatcgcccatcaacaagatgtccttcaagaagggcgacgaggtgcgcgtccgcacgccggtggggaggctagggaccacggcgctgcgcctcgtcatgtggctcggcgcggtcgtcgtctccgacgccgacgacggacacctcgaggtcatctacaacggcaacttcccgcgcgacgaccccttccggaccgtgcgcgtcgccgtcaaggacgtcaagctgccggcgccgcgcccggccccgaccccggcaaacattgcggccccgcggccgaacaaggccggcaagaatctgccgcggctgaagatgtttgtgctggagaaggagcagctgcgtgccaaatccgaggcctttttggcatcgtgatcagtgttcttcagtaggtgcagtagctgcagaagctcgtataaatcagaacatgtcttggttttgcatggaaggcaatgtggtcttgtaaattctcatagataggatgatttcttggcatgagaagaagaacatgcaatctgttggaactgtaatttctcattgattatgaatgaaagatcgaggtttctcttcttgtttcatttttttttaccaatatatgcatgcatgatgcatgttatccttggttttgttgatccaagtgtttggatcagaatcacaatccagctgccctctgattacatgtatgattacaatccacctgctgataactttgatcttatagctaggattcagcttccaattctttgaatgcctttggctttccttgcctttgttgatcaagagagcctggatatgcagcaaacaaagcatctagctggtaatgtcattttcacttttcgttcagacgaaccgtttggctctcaacaacgtcaacgaatcccaaaagaattagtagtagtctgttcacaaagaaatttagttgaggcggcaatgttattttgtttccctttgttgctccgaagagatgtaaactgccgaactgtggattaagtagtgggctttgggccaaatacgtcatgcgtggtggacaggatttatgtgacatcggttttctcggctagtgggttcaagcaaacaaggccggaggacctagaaatggggctccctatttttgttgtaaaaatcgggcattgtttcagttttttaagaagaatgtttcaccactggtttaacacatgtttcagactattaaaatgatgaaacatgattgaatcatggattgaaacatgaaacatcaaagttcaattactaaaacaccaacaaatccataaaaatcaaaagacaaaattgaaacaccataagaaatctcgctgtaacaatttgatccaatcacaaagaaatatcgagatacatcggctaaaacataaaaaaaatcatgaaaatatcaatcagatctggcttcctccctctcctccaatggctgcagtgcaggagtagaccgaaaaaacgacacccgtagacatccagcaagtggagacgagagctctggcgacaaccgcggtgaagaagacgaccattgccgccgttcacggccggacaggaagctgccaggttgctccgtgtgagtcgaccaaccttcgcctctgcctccatgtaaacacccctcaatcacagtcaggcggcatgccttgttccatccttggacggatgagctgatgtccaacatggtgtcgatggtggcggcggcagctgtggcatcaagcagagaaaacatcgtcgaacgtgagagagagaaagggaggtgcgagaaagacagagtcacgggtggttgggaaatagcgcccgatattttcttctctccgtcgggcgcacgataaatagcatttttgaaacaagaccaacagaaaaggttttttttttcttttttgaaaaactaggaaacaagataccgtctatacaatgggataagttatatatgagtgaaccgttattttccatgatttagatatgttctaagtgcatgcgaaggtgggctaggcgtaacgtgaggaggcagaccgtggtaagctggttagaggctagagtagcatatactgtatactattatactagtttgacggagcgtggggctcctcaccgggagaccgcgcaggcccccctttgccggttcggccgggggccctgggtgaggttctaagctccttgtctgtgtgtggaaggttcgcgagaatggaaaaagcacaagacacgggcgatgtatacaggttcgggccgctgagaagcgtaataccctactcctgtgttttggtggatctgtgtatgaagaagctacaaagtgcgagccagcccccgatccttctgggatcgtttttcttctctccctcttttttctaagtgggcaaggtactccttttatatctcaaggggataccacatgccccctctctccctccaacttgacttctcttcattaatggacggagatttgtatggctgctgtccgaatgaccttctgatgggacggcccatacctacctccacttccgccggaagcaggcgcgacgtgggaaaatggctgtctgctgacgacatgaccattgacagaccggtcacaaatcggtcattcttgtccaccacgtgtcagtttaacaatctgcatgttcgcccttcttcatacaacatcttgcctgtaatggttaggatgaagcctggcatatatctgaccggaaccaacgtgccatctccaggagctaacacgccggctccggctagggacgagtgcttggaggctctcgtcctgacgggatggggcgaggcatgcgtcagaccgcctgtcgccacctaacccacgatctgaccggtctgtgactggtcactgaccggataaacgagcgcgctacactgcgttacatgcggcgtgacgcgctcgtccaaaccgcaataaatgtggttaggtgagccccgctatgctcacctaccccatatacgcggcgcaaaacccacaaggggtcggggtgcctcggccctcggggccgagacgggagcggtccgacccctcggggagacaaagagaagggcggccgcatcaccctcgggcccgacccccccccccccccgagggggttaggccacgtgggtgatcgtgtcttcctcaagtctctaagtcatgatactcccagtcccatgtcaccgacagcagcccccggcgttatgccagggcgatcgccctcctcgagggaagcggtcgggcgtgacgccacttcctaaggcctggtgacaggtggggccggtctaaaaatcgggacaagccggttcgtttttcctggagatatgatgatggcgcttcggtcagcgagcgtaattaacgcgcgcatgagatgttccatctcgactgccacagccgcatatccacctcatgcaccgcaaacgggcgaatgggattagtggaagcgtgggtgcgagaaacgagggtgcaagatagtgggcgcgagaaacgaggagccgggcacagcgttggcaagggtataaagtcgccgaggaagagatttgcttccttcctctcgccattattccccttgtcttcgccgcttgcgccctaactccttgtttcctgtgccctaccttcgcctcacgcgctcgctctcaaacatctcttcttccggcgtcatggcacggggctccgctccgcttgacggtagcgtgctgccgccttcccgcatcgtgagcgagagacaggccgggctgccgcgccgcttcatgccggaatctgccaccggccgggagatagtctcgctgggcgagggatgcccggcgccacgctacccggggcggtccgtcttcttcctcccttttgctatggcagggctggttccgccattttcttctttcttcatggatgttctggagttttacgatctccagatggcgcacctcacccccaacgcggtaatgacattggccatcttcgcgcacctgtgcgagatgttcatcggggtgcgcccatcccttcggctgttccggtggttcttcaccgtacagccggtgtcgccgccgtcggtggttggtggttgctacttccagccgcgggggccggtgctgaaccgctacattccctgcgtcctccgcaagaagtgggatgactggaagagcgactggttctacacccccctcgccgacgaagcgcgcctccgacttccgagccagcctccagcgcaggcctccaactggcgggcgccggtagatctgggagatggctacgacgccgtcctcaaccgcttggcgggcctgcgatcccaggggctcacaggggccatggtgttcggcgactatcttcgtcgccggatcgcgccactccagcggcgcgcccggggcgcctgggagtacaccgggtccgaggactgtatgaggacccaccagggggtcagatgggactgggctcctgaggacttcaagatagtggtccaacgggtgctgaatctcagctccgtggaggcatccctcattcctcaaggagtcctccccctctgcagcgatccagaccgcgcctccatcctgaccatcatgcaggcggtcggggcgtcggaggagcaggctcctcgaggccacgatggcgcgggcgggagccgcaggggggaacaatctaccccgggagggggtcgtgcttctgggccccgcgacgggggcccggggagcggccgccctgccaacgcccgggggaagaggaagcaggaagaaacccctcccccatctcctccccgagggggcggggcggcgcgtgccagcagcaggcgcccggagggggccacgccgacgtcgcagcccgagggggagcggaagaagaaacggcttcgcaagatgggggggacagaaccatcccggggaaacctcatttcccctccaaggtggtcgtttaaccgaccccctcgcaggttcgtcccactcccatcgtggccgtattcattctctcaacgcgagttttcactcatccatcttgtttgtcttctggtctttcttctgtttcagcgagatcccgtcgcgtccctcccgccattccaagtctggccagtctgaggccgaggacccggcgaccacagaggctcggaggcgggaatctgaccggcgagaagccgcggatcgcctacgggaagccgaggaggccgcccaggtggccgtccgagctcgccaagctgaagaagccgctcgggaggaggccagacttcgccaggccgaggcggcaatgacttccgaggcagctcgcgacgagtccgcgggcgcatcgcttgggcccactccctcgggcgacgctcaggacaagccaggtccgggggacatccctgagtccggcacgtccatcggcgggccgagccgcgcggcatcctcaccgaggcggctcttccccacgccttccgttgctccactgagcgcagaaccccttctgcaggccttggccgtcgcaaacaccacggtgttggacgggttaagtgcccaggtggaggccctgcaggcagagcgggcggagcttgacgccgcatgggcgcgtgtcgaagaggggcgacactcggtggaggccatggtggaggtgggccgcaaggcacaccgccggcacgtctcagagctcgaagcccgtcggaaggtgctgggggagatcgccaaggaggtggaagaggagcggggggctgccctcatcgccaccaccatgatgaacgaggcgcaggacaccctccgccttcaatacgggagctgggaggcggagctagggaaaaagctcgacgccgcccggggggtccttgacgctgccgctgcccgagaacggcgggcggcggagaccgaggtggcatcccggcggcgcgaagaagcccttgaggcccgtgccatggcgctggaagagcgtgcctgcgccgtggagagggacctggcggatcgcgaggccgccgttgctattcgggaggtcacactggcggtgcacgaagccgcctgtgccgaagaagagtccgcgctccgcctccgcgaggacgcgctcaccgagcgggagtgagctctcgaggaggccgaggccgcggcgcaacggctggcggacagcctgtccctccgcgaggctgcgcaagaggaacaagcgcgtcgcaatctggaaagtgcccgcgccgagagggccgcactgaaccagcgggccgctgagctcgaggcgcgggagaaggagctggacgcgagggcgcgcagcggcggggcggccgcgggcgaaagcgacttaaccgcccgcctcgcagctgccgaacacaccatcgccgatctgcagggcgcgctagactcgtccgccggggaggtcgaagccctccgcttggcaggcgaggtagggcccgacatgcttcgggacgccgtctcccgtctagaccgcgccggccggcaggtgggcctctggggcgggcggactgcgaagtacgccgccaaccagggggcctcgcccagcgcctatcggagatagccgggactctccaacggctccccgaggagctcgagaggacgattaagtcatcctcgagggacctcgcccgaggagcggtggagctcgtactggcgagttaccaagccagggatcccgacttctccccatggacggcgctggacgagttccctcccgggaccgaggacggcgcgcgcgcgcaggtccgggacgtcgccgaccatatcgtccacagcttcgagggttcggcccctcggctcgcgttcgccctcaactccgacgaggaggacgatgacggcggagtgggcgacggtggcgacgaggctggcgacccgggtgcatcggagtgagcccccaggcccccgccaatctttaaatagcttcttcttttcttcttccgaggccttcgggcccccttcttatatagactaatttaatctgcaatcaaataaagaggaaattttttgtgtcaattctatttgttgtgtgtataagacgaggatgtctgtgccgcggtccttttgtgtcttggcttgaacaagggctcgtgcccaggtcctagtcctcaaatggctcgggtcggggctagtgcctggggagatccacatgtcgagactggccaggccgggagcgtggtgaccgagggttatgggtgacccgattgtgggtttttgccgattcccccccggagttcaccacgccccggggcacggctcggttctgggccccgtttggcgattttagccgacccgagcccccgagggcaggattgaacacgagtgacctatttcaagtcaagatccttcaaaaggaaacaacagcacagatacaacctttaggaaattgaaaatgcttttattgaagagagaatccattatatgccactgactttgtcacacatctacgatttaccatcgactttgtcacattctacaatataccatcgacttttgcttaacttctacgatttaccatcgccgtccaattagcctccgttagtactgtacaattttatccaaatgaccgaaatacccctaaaacaaaaacttccaaaatttggataaaaaattcaaaatatcatattataaacataagattgtaaacatccaaaatttggccaacaacttaaaatcttatatttcagaatttttatccaaattttgaatgtttttgtcccaggggttttttggtcattttgacaaatttgtacagtaccaacggagactaaccggacggcgatggtaaattgtagaagttaagcaaaagtcgatggcatattgtagaacgtgataaagtcagtggcaaatcatagacatgtgacaaagtcagtggcatataatggattctctctttattgaaatacagatataagagaaataagaatatgcatatgtggtagcccccggccaaccctgcacgcccgaggggggtgcggggttggcccgaggccgaaacctgacacccgatccccctttaggggtagaagcgacgaaggtgttcgatgttccacgggttaggcagctctgtgccgtcgcccgtggccagccgaacggagcccggccgggggacgccgatcactcgatacggaccctcccacattggtgagagcttgctcaatccagcacgcgtttggacgcggcataggacgaggtcgtcgacgcagagtgatcgggcccggacgtggcgctgatggtagcgccgcaggctctgctggtagcgcgcagctcggagggccgcgcgccgccttcgctcttccaagtagtcgaggtcatctctgcgaagctgatcttgatcagcctcgcagtacatggtggcccgaggggacctcagggtgagctcggatgggagaaccgcttccgcgccgtagacgaggaagaaaggcgtttccccggttgctcggcttggcgtggttcggttcgcccagagcaccgctggcaactcctcgatccacgaatcgccgtgcttcttgaggatgttgaaagtcttggttttaaggcctctgaggatttccgcattggcgcgctccacttggccgttgcttctggggtgggcaggtgaggcgaagcagagcttgatgcccatgtcttcgcagtaatcgccgaaaagttcactagtgaattgggtgccgttatccgtaataatacggttaggcactccaaaccgggctgtgatgcccttaatgaatttaagtgcggagtgcttatcgatcttgacgaccggataagcctcgggccacttagtgaacttgtcaatcgcgacatacagatactcaaacccgcccggggcccgcctaaacggtcccaggatatcgagcccccagacagcaaatggccatgaaagtggtatgatctgcagggcctgggccggctgatggatttgcttggcgtggaattgacacgctctgcatcgccggaccaggtcgaccgcatcattgagagctgttggccaatagaaaccttgacgaaaggctttgccaaccaaggtgcgtgaggcggagtgggctccgcattcgccttcatggatatcggcaagaagctcgacgccttgttcccgaggaatgcacttcaggaggattccgttagccgcgcgccgatagagggtcccttctaccagcacgtagcgtttggagatgcgctggacgcgttcactcccttcgcggtccttgggtagagtcttatctgtgaggtatgcttggatctcagcgatccaagcaatcaatctcagggagctgggagcgctcccctcgggtcccgaggcctggactccgacgggcatcgggggcctgtcaggcgcgtccgtctcccctaaggggtcgggtcgcgccgacggctgggcaagcctttcttcaaaggcgcccagtggggtctgggctcgcgaggaagcgagccgtgagagttcgtcggcaaccgtgttaccccgtctgggcacgtgccgaagctctatcccgtcaaaatggcgctccatacgccgtacttggcgcacgtaagcgtccatctgcgggtcagagcaccggtactccttacagacctggttaacgaccagctgggagtcgcctaacaccaggaggcggcggatccccagtccagctgccaccctgagtcccgcaaggagtccctcgtactctgccatattattggtcgcccgaaagtcaaggcgaaccaaatatctgaggacgtctccgctcggcgaggtcaacgtgacccccgcaccggcgccctgaagagacagggagccgtcgaactgcatcacccagtgggtggtgtgaggcggctgcgaggggcccgagctggcctcggggactgagacgggctcgggagctggggtccactctgccacaaaatcggcgagggcctggctcttgatagcgtggcgtggttcaaagtgcaaatcaaactcagaaagttcgattgcccatttcaccacccgtccagtaccctctcgattatgcaagatttggccgagggggtaagacgtaaccaccgtgacccgatgcgcctggaaataatggcgcaatttcctcgaagccatcagaatagcgtaaagcatcttctgggcctgagggtatcgggtcttggcgtcccggagggcctcactaacaaagtagacgggccgctgcacctttcggtggggccgatcctcttcgctaggggccacatccctggggcgctctttgtccgagcggcctcgcggggtgcactcgtcttctgtgccgacgacctcggggtcggaggatgacaggggcggccttcccacagtggcctcggggccgtcctgggggtcggggcctcctggcgtcgtcggacaagcgggcaaagggccaactccggtcgtcaggggccttaggccaccgttcggctcgggggcctcttctccctgctctctcccgggtcgagtcggcacagggttagcctcggggtcagagggcgataggtgcggccttcccgcagtggccctcgggccttcctgggggtcgggggcacctggcaccgtctgacaagcgggcagaggggcctgctccggtcgtcgggggccttgggccaccgttcggctcgggggcctctcctccctgctctctcccgggccaagccagcacagggtgggggtgcgcggaatgaggattgtcctcatcgcgctccacaaccaacgccgcactaaccacttgcggggtcgccgctaagtagagtagcaagggttcatttggctccggggcgaccagaactgggggagagctgagatatgccttcaactgagtgagggcacgttcagcttcctccgtccaaataaacggcccggagcgtttgaggagcttaaataagggtagcgccttctctcccagcctcgatatgaaccgacttagggcggccatgcaaccggtgacgcattgcacatccctaagcttgctgggggggcgcatccgctctatagctcgtatcttctcggggttggcctcgatgcctcgggcagagaccaaaaacccgagaagcttgcccgcaggtacaccgaacacgcacttatcggggttcagttttatgcgggcggagcggagactctcaaaagtctccgctagatccaagagtaaggtctcttggttgcgcgtctttacaaccaagtcatcgacataagcctcaacattacgtcctatttggctacccaaagaaattcgagtagtacgttgaaaagtaggacctgcattctttaacccgaagggcattgtcgtataacaataagttcctatgggggtaatgaatgcagttttttcctcatcctccctagccatgcggatctgatggtaaccagagtatgcatctaggaaacacaaaaggtcgcaccccgctgtggagtcgacaatctgatctatgcgaggcagggggtaagggtccttaggacatgccttgttaaggtcggtgtagtcgatgcacatccgaagcttgccgttcgccttgggaacgaccaccgggttcgccagccactccggatggatgacctcgcggatgaatccggcctccagaagtcgcgccacctcctcgcggatgaaggcttgacgttccggggcctgccgccgtactttctgccgaaccggccttgcgcccgaccttacggcgagacggtgctcaatcacctccctggggaccccgggcatatccgccggtctccatgcgaagacgtcagcgtttgcccgcaggaaggagacgagcgcgtcttcctatttgccatccagaagaccaccgattcgtgtggtcttggatgggccgtcgcccagggcaacctccttgaccgggacctcgtcgcatgtgactatccgctgcctcggggcggcgggggcggaggtgccaagcctctcgtcgcctccctcgggcttggacgcggcggtgaggtggtccgcgcgccgctccatacaagcaagcgcgactttgaggtcgccatggacagagatggggccaccggggcccggcatcttcatctggaggtaggcgtagtggactgccgccatgaacttcaccaacgcgggcctccctaggaccgcgttgtagggcagactgaggtccgccacatcaaagttcacccgctccgtgcggaagttggcggatccacctaaggtgaccgggaggtcgatatgacctagcggccaagtgtgaggcggcgtcacaccgataatcggctgggacggccggagcaccatccccggggccttgatagcgtcaaaggctgcgggggaaaggatgttgagggctgctcccccatcaatgaggacacgccccagcttcacgttgcaaacagtgggggaaaccaccattgcgatctgtcctccctgggcaacgcacggtgggtggtcggtctggtcgaaggtgagggcaacctccgaccaccgcgcccggcgcgtcgcctcatgagtaggggccgcggccagaagctctcgcttcatggccttgaggctccgacgagaaaagtgagcacacgctcccccatcgagagtggcaatggtggccccaggctcttggaaacctaggtcatcatcgccgtcatcgatgtcctcggcgggggccttctgcttggcctcacttcgccgattgccggaaggaaccgccggggacttgccctctcggcgctcctgcctcctctcctcctcccacttcctcgtccgctcagccaaacttttgactgcgcggcagtccgcgaggtcgtgaagggaggtgttgtggacggtgcaccacttgccggttgggcactccctgctgggagcgctggcctccttctttttgtcgctcgcaggcctcccctttcgggtggcccgcggagcgccctcgacggcgaggacatgaccctcgtcgtcggaatgggctgacctcttcttcctcctcctgtcacgccgccctgtccgagcagcggatccgggggcggccgaagctgccacaccggaaccggaggggttccaggtccatgcctcttccttacgagccactcggtccgcgagctgaaaaagctccgcggtagtctggggctctttggaggcgatcttttcgagcatgcggttgtgccgcacaccccccctgaacgcgtagatcacctcgtgtgcagggatgcatggtatggtgttgcggacttgacagaaccgctgaatgtatgagcgaagtgactcatcatcccttcgctgtactgcgtgcaagtccgcttcctcacctgggcgcggatatgtgccttgaaagttcatggtgaactgttggcataaatcctcccaagagtggacggacgcgggtggcaagttcattagccaaccccgtgcctgtcccttcagggccatgggaaagaaattcgccatgaccctgtcgtcacccccggcggcctcgatcccggtcgtgtagacctggagaaactcggcggggttgacgctcccgtcatatttttcggcgatggtgggccggaaccttgggggccaacggacattccgaaggctcgccacaaaggctctacagccgacaccaccaaccgggggcacggagggctgatccccgtgtccgtgtcgaggtgacactccggacgaggaggcgccctccgttgcgtgggcagcacgtcggccattacgccggtgctcgatactgatgcgggcatctggccccctacgcagatcttcccgggtcggaggcgctgacgaaggagtggcggccgaatggcgagcaaccgccgccgctcgccgcgccctccgccttgacgacacggagccggtggtagcagctccagaggtcttggtggcggtggaccgctcaccagcacctaggcgctgtcgtgccgtcatgaccaagttggccacgtcgtccagccaacgttgggctggagactccaggtcagggacaatgggcgggtgacgtaggagcgcgcccgcagcttggagcgcgccctggggcgtgctgccgtcgccgtagacgaggaggcgacgctccccatctcgctgcccttctccatcacccgtggatgtcgaagtcacggatccttcgaccctctcgagcgcctcctcccggctaggactttggcgtggagggggcggtggagtacgagctcgacggcgtgggttcggctccccgtcgtcaccgctaacactcggagagaggttgtgcgcctttgcttgttcggccattgggctgaacaggaaaagcttggcgcacacgaaagaatgcgagagcttagaaaaacacacgcagaggcccctacctggcgcgccagatgacggagcgtggggctcctcaccgggagaccgcgcaggcccccctttgccggttcggccgggggccctgggtgaggttctaagctccttgtctgtgtgtggaaggttcgcgagaatggaaaaagcacaagacacgggcgatgtatacaggttcgggccgctgagaagcgtaataccctactcctgtgttttggtggatctgtgtatgaagaagctacaaagtgcgagccagcccccgatccttctgggatcgtttttcttctctccctcttttttctaagtgggcaaggtcctccttttatatctcaaggggataccacatgccccctctctccctccaacttgacttctcttcattaatggacggagatttgtatggctgctgtccgaatgaccttctgatgggacggcccatacctacctccacttccgccggaagcaggcgcgacgtgggaaaatggctgtctgctgacgacatgaccattgacagaccggtcacaaatcggtcattcttgtccaccacgtgtcagtttaacaatctgcatgttcgcccttcttcatacaacatcttgcctgtaatggttaggatgaagcctggcatatatctgactggaaccaacgtgccatctccaggagctaacacgccggctccggctagggacgagtgcttggaggctctcgtcctgacgggatggggcgaggcatgcgtcagaccgcctgtcgccacctaacccacgatctgaccggtctgtgactggtcactgaccggataaacgagcgcgctacactgcgttacatgcggcgtgacgcgctcgtccaaaccgcaataaatgtggttaggtgagccccgctatgctcacctaccccatatacgcggcgcaaaacccacaaggggtcggggcgcctcggccctcggggccgagacgggagcggtccgacccctcggggagacaaagagaagggcggccgcatcaccctcgggcccgaccccccccgagggggttaggccacgtgggtgatcgtgtctgcctcaagtctataagtcatgatactcccggtcccatgtcaccgacatagtttttttagtaccgctgtataccacacttttctaagtagtactggcttttcattggtacacctttttatgcatccaaagttcacactagagacctgctctaagagcaagtacaatagcaggctataagccagctataaccacatatcgagaagaaaagagaagagagaaaagaaagcgggttacagatttgtaggcagctgcaacacggaccccaagccgttgtgtgtgtataagaggtaggacagtgtattaatggtgtagtatatttttataggtaactattgcatgaatgagttattagattagctatagatgatttggagctaatatttggctatactattaaacttgctctaacactcttctagtatgtctttttatgcactagagttaagagcttgggcatatgtatagtattcctcatggctctcgttggctcgaagaccttatacccacaaatcatacatgatacgtgcagtgtatttaatgtctatgtatcgagtccttgatacctagatattaggtaactggtacctagattattcgagttagtaccataggtactagacctgatagtataggtatcggggtacttggtccctagatcaggatggtatccataagtaccagacctggtactaggtatcaggtacctaaataccatgtacttagtatctacatcggtcagataccagtaggtaccagacctggtactaggtatcgggtacctaaggtattaggtacttggtccctagatcgggttgatacctataggtacctgatctgatattgggtattgtgtagctcttaccaggtatcaggtacccaaatctattaacttattaaaggaatagaaaaaagagcctccatattcactctcatggcctagaaattcctacattaattggagaaaaagaaaacagaatccatatagaaatacaatttaaaatagttaaaattcagaattaaaaaataaggaatattgggagaggagactagagtccatatagaaatacaattgagaaacaatagaaattcggaattaaaaataaagaataatagtagtagggtatagagtccatatagaaatacaattaagaaataatagaacttcggaactaaaaataaggaatattagaagtagagtagagagtacatataagaatttaaaactaactaaaatttggaataaacataataaatttaaaagtagagtttagagttcgtataaaaatacaatttacaaataactaaaattcgaaataaaaaaaacatgggaagaagagtctaaagtcaatataagaatacaatttagaattaacttaaattcgaaattaaaaattagggaatattgaaaaataagtttagagtccacatagaaatacaattagaaataataaaaatttagaattaaaagtaaatcatattggaagaagagcctagagtccatataggaatataatttacaaataactaaaatttgatattaaaaataattaataaataacttgtatataaaatacaatataaatattatacattactagtttcgtaaaggtagtacaaaatttaaaattatgttgtcattttaatatatttgaataatacattgagaaaacatattgtcatggttatggataccacatacctaatagtaggtgactaaatctcggcaggacccaccacataccatgtcctatacggaaacaactttcggatataggaggagttccgataaggaaagacaaccagagttctacatgaaaacgacaagtactactcggattgtagccatattggtttccctagttctacttggacaagaggacacctatgggtataaatacaagccccctaggaggacagggggacacccaccatgagacaatcaacacccaacacaatcgacatagaagcctacatacgccaagacacaccgccggatatcgacttcagggataaacacggctagtaccctacggtgtctccggatactgtcaggagagacgaaagcgctaaccgggcacgaattcgaggtggaaggctaccctgttgtcgactacgagtcagatcatcagaccgacatgttgacaacagttagataggctaccccaaacattgtactggtgtggttatcataaataagagcaataccagcttcggccaacaagatgtagggttattacctgacaactcatgggcccaaacctgtataaaaatcctcgtctccatctcttttacctcagtctcgcatatatcctagcaccgacgatccccatactgtccaaataccgtagtcgagacatcaaacgtcgacagtggcgcgccaggtagggggattttggtgcttcagggtttcgacgagatgagtttaagagatggattctccgataacatgctactcgacaacttcggttatggggagatctaatccgaccggagtatgtcgtccaataagatcggaaccatcattgtcaaattttcgatccggcgagatcgatcaatcttcatcaagacgtagccaccatggaggacggcaaatcggtattgccgcccgcgcgacttcggcccagatcgaacacggtgccgattcccaccaaccaaaatcgctcaacgcaggctgcacatgattcatccgagaacaagtgccgctgtgtcactgacgtgtcgtgtcatgcctagacacgtgtatgcatgtgacaggttacactgctctacgaccaaaccaacaagatacgtcaaagtctaccgcatgcacatatatatatcttctgtagatagtatatcgggcatgcaaatcaaggtatttagtggattaatttactaagttaatctactaatttcgtagatatattcggcatatatctacaaaggtacgcaatattttatatgcaatttatcgtacctattcagatcatacaacattgtcatatcagtaatttattatgtttacctagagcatattttttatacaatatcaattatgcgagtgtttccgatgttaaatcaactacggtttaacgctggcggctcgctctgttttcttctgtataaatcatgcttgtttacggtttacataatgcctgatacttacatctgctcgttatatcctgataattctagaagatccatgcagcttttcgaatacatactcgatattatctgctatatatcttgccttctagaaaatatttttcaggaacaattgagcactcgggtaggttatggtcgagtacactccattatcgagaacattctcgacaaatgcggagttatcgcacccaacctaccaacgaagaccgatgacctatctcatagcaccggccatcgctggactactcgagaaaaggttgttaacagataattcctggcgaacgccgttggcttgatcacccgacatgattgagaacggacatccggatataccacgagttgggtgtgtgagtcatgctggccacatgagacgcacatgtaataaaccaactcgagcagttccattggtgctcgagagataattctactcgctcgctggttctcgcaccaagacgtagcaatttctcacaccacagcttccattggtgctcgagagataattctactcgctcgctggttctcgcaccaggacgtagcaatctctcacaccacagcttccattggtgctcgagagataattctactcgctcgctggttctcgaaccggtacgtagcaatctctcgtgccttaacttcagatagttgaggtatgactacggcggcgtagcggtcctcgcaccatgacttcagatggtcgaggtatgactatggcggcgcggcggtcctcgcaccataacttcagatgattgaggaacagctacaactggtcttcgaccggcagcgtagcgatcctcgtgccacgactccaaatgattgagagacacctactcaccggttctcaaccagttgatcgtagtgatctctcgtacatttgcttctagtggtcgagttacgactactgcctggtcctcgaccaacgatgtagcgtctctcccactacttccacttcaagtggtcgagttacgactactgtctagtcctcgaccagcgacgtaccgtttctcccaccacttccacttcaagtggtcgagttacgactactgcctggtcctcgaccagcgacatagcgtttctcccaccacttccacttcaagtggtcgagttacgactactgccttgtcctcgaccagcgatgtagcgtctctcccactacttccacttcaagtggtcgagttacgactactgcctggtcctcgaccagcgatgtaccgtttctcccaccacttttcactttaagtagtcgagttacgactactgcctggtcctcgaccagcgacgtagcgtttctcccactactttcactttaagtgctcgagttacgactactgcctggtcctcgactagcgacgtagcgtttctcccactattttccgctttacgtggtcgagttacgactactacctagtcctcaactagcggtgtagtgatttctcctactacctctacttcaacaaagttgatagcaggtatgcaatatcgccaagtgttttacccagagatcccttaccacgacgacacctagagttgaaacctatcctactgtccctttacgccgtcttgacaaggcctccgaggaacctaagggatcttcggctggggacgcctagaaccgataaggccttgtcggatcctgtagagaagaaagaccatgtaagatctggtcgtgtaagagttctcgccgtgcgtattaaccaagccgtgtaatcggaaattaactttccaacttcacggctgggggataggatcagttcttgttcaactaaggcaggtcaagggtccaagagccttatcctccgagaacgattctccgacgataaggctgggggctagggagagtgtatgactctacaaactgactgatcgaagtcggtaagagagaagacgcttatacacaaaacattggtcggtaaaattaattcattttttccatacatattataacatgtcaccctttgagcgttcgctcgggggctatttctatttgatattcttttctgagtattgatttcaggaaaattctattcgacattgacgaagactccatgtctccatggttctacaccaagatcgactgaggcgagtacgacaaatgtcgacaaggctccgtcgcagactctacgccttctcgatcactcgagaatggttgctggatctcgacaaggaatacggaatgaagaaatggtgtacccgccgagataaaatttcttgacttcgatccaaattctcgattacagcaagacgggagacttagtcgtacgctctgtactttttcggtcgacatcagagattgacttagacaaaccctttcggtgcccgcacgaggctgacaaaggaagtctaacgttatctctgaactcaccgaaaatggtcacgtgagctcgataacagttcctccgaagtctgcagttgagaatatgaactcgttcatttgcatcgaagtcgggggttactgtcatagttatggataccacatacttaatagtagttgactaaatctcggcaggacctaccacataccatatcctatacagaaacaactttcggatataggaggagttccgataaggaaagacaaccagagttctacatggaaacgacaagtactactcggattgtaggcatattggtttccctagttctacttggacaaggggacacctatgggtataaatacaagcccccctaggaggacagggggacacccaccatgagacaatcaacacccaacacaatcgacatagaagccacaacatagaagcctacatacgccaagacacgccgccggatatcgactttagggataaacacggctagtatcctacggtgtctccggatactgtcaggaaagacgaaagcgctatctctgatctcgccgggcacggattcgaggtggaaggctaccctgttgtcgactacgagtcagatcgtcagactgacatgtcgacaacagttagataggctaccccaaacattgtactggtgtggttatcataaataagagcaataccgacttcggccaacaggatgtagggttattacctgacaactcaggggcccgaacttgtataaaaatcctcgtctccatctcttttacctcagtctcgcatatatcctagcaccgacgatccccatactgtccaaataccgtagtagagacatcaaacgtcgacacatatatgttattatatgacagaaaatataatgatgctaaccgcgcaatctgcgcgggccaccatgctagtttacactgatgttagcatcttaacaattgaaactggtgtgttgtgtcttcagcaagacgacgtgcgctgacatgtggccccttgagagaacacgaagagatgtggattgacatgtggatcctcacgtggggatttacgtgaagttgataaaataacacaagtgattggttgatcaaatagtcacgctcatcaagtttgaccgtaatctgaagaggcccaatataatgggaaagtgatttcatccatcacggggatattccctcgtttcgtgcatgccacctaaatagtcaccaaaaaatttgaaaaaaaaattggtaacatagaataatatgagatatatcactctacaaatatgcatgtttaaattaacttctataagttataataaaaataaaaaatatagctgcaaatgtatgataactatttttagtttaatttattacttttgttgcaacttgtagaagttgaatttggtcttgtatatttgtggagtaatatatttcatattaatctatgttgtcaattgtttttaaatttttaatgactacttagatgacatgcaaacaaggacatatccctcgagagatcacattccaatataaccacatatgtattgttttagactatcagtcgatctctcgtaccattttcgggattggtattgcttacgacggcggtgcaaactgagccgccgttcccttaccttccggcgacaccttcagattgaacaatgccgcgcagagattgtccaagtagaatactggatcagttaatcacagccaagctaatagccgacttgaactcggacaccgacttcaattccaactcggactcggctggctataaatccatgcgcggccgcctccgcattcaccagcaattccttccgccaatcctcgcactcccagcagcgctctcgtcgtcaatggcgcttccccgccgctcgagtcacatctcctcgcgcccgatcatccactgccgcagtgagctcgccgtcgaggcgaaggggagagtagtctccaagaagccgtccggatcaggatcgcccatcaacaagatgtcctccttcaagaagggcgacgaggtgcgcgtccgcacgtcgttggggaggctagggaccacggcactgcgcctcgtcatgtggctcggcgcggtcgtcgtctccgacgcagacgccgacgacggacacctggaggtcatctacaacggcaacttcccgcgcgacgaccccttccagaccgtgcgcgtcgccgtcaaggacgtcaagctgccggcgcggcgcccggccccgaccccggcaaacatggcggccccgcggccgaacaaggccggcaagtcgctgccgcggctgaagatgtttatgctggagaaggagctgctgcgggccaaccccgaggccttgttggcatcgtgatcagtgttcttcagtagtagcagtaggtgcagaagctcgtatgaatcagaacatttcttcctctgttcttggtttgcatggaaggcaatgtgatcttgtaaaatgtaaattctcgtagataggatgatttcttggcatgagaagaaggacatgcaatctgtcaactgtaatttcacattgattatgaatgaaagatcgaggtttctcttcttgtttcatttttttaccaatatatgcatgcatgatgcgtgttatccttggttttgttgatccaagtgttcagatcagaatcacaatccagctgccctctgattacacgtatgattacaatccacctgctgacaactttgatcttgtagctaggattcagcttccaattctttgcacgcctttggctttcctttcctttgttgagaaccagggtatgcagcaaacaaggcatctagctggtaatgtcatttctattctgaattggatagtggtttgtgctagtctctgtgccatttttcttttctgaaaggaaggcaagggccatatgtatttccctcactttggctctcaagaacatcaacgaatcccaaaagaacctagacatagctaggcttagtcttttttttgacggcaagagtatttggtcctcttgttttttaaaatactagcaaaatatctatgcgttgtaacgggtgaaatcgctcataaatcatgtcttttaccaacttaatcttataaggatagctttaaaagtcatgatgttcgttttggaggactaaatattgtttacattaattaaaaaaatattttgacatgataggttctgattataatgggatagattgatgaataaactcagaggcacataagttattttcacagaaggatcaacatgtaaattcgtatgtgatccaaatatatttgagaatcagtttgatctatgttttgtcccagttgtcttggtagcttcatcccaattaggggtgaaaacggtcacggaaattcccgatcgatcgagcgccgtttccgtatatttaaaatttctaaacatgaaaacaaaacctatatacaagttgtagatatagatgcgatctacacttttcatttgagcttatctatggtattaaatatagattataagtttggatgatagtagtcttaaaagaatagcatttgtttcgaagacaaacagtattcttttcccctctttcccaactcacttctctcattttccacgcgcacacttttcaaactactaagcggtgcattttttgtgaaagttttttatatgaaagttgttttaaaaaaatcatattaatctattttttaagttttttaggctaactagaaaggtagcccgcgcagatgcgcgggcaatttatttattgtttacaaatataattggtaaattttgagataagtctaatggtttagaaaatttgaagattttttttcctaagagagtaggaaaggaaagaggagatgaggagagtacgtccgtaacagggaagggtgtggagaaggtgggtgcatatactttttttattcgatctaatagttaaagtattggacccaccaatttaaaagaaaatcaatggatagattttagagtgtcacttggcttaatccaaacaaattaaaattaaatcaggtctacttgaaaaaacacaactaaattgttttactttttcgcaattacgtagtacatttatgaagtgatatttgacatcctaaaatatgatatgaaattatttaaaattatcataacattaattattatatatttgcccaagatgtggtgatgtatttagaaccgcaatataaattttataagacacaaatattttatttaattaaagaaatacaaagggatcataaattgattatataatttaaaataatttaaaagatgaatgtttagagataattgatttgatattttttatttatattatagatctagtttatatttgcacatatttgtggagtaatatatttttatatggtaaaaagttatattttaaagaccattgattttgttctgacggtaatatgtattatcgattttaatttatttttaatcttaaattgttggtttaattatgtatagagaaacagttagattagatataatatgtatagcttaaaataactaataactgtggttgtttttttttatcataactactaaaaaaatatagatcagtggagggggcagaaagtgttgtgcgtgtctaatggtgggggtgaggtggaggggactttgtttttctattttttttctaaatcatttaggtcaaaaaccaattatcatgtattttgttttttagaaaatcttttttaattttaaagtcatcataatgacttaaaaaggtaatattagatacaccgatttaagctggacgatttaactggagattgcttggttcgaattagctacgtaatatcacggtaaagccatgtaaactgatttaattagctgtatatgttatattaccgttaatttccttccacaaatcatgtataataactaatttaattagctatgtataatcttcgtgttaatctcctagctcccatatatatacacatacatacatacatacatacatacatatacatatatatatatatatatatatatatatatatatatatatatatatatatatatatatatatatatatatatatatatatgccgtgcatataataaatatagctatgattagtagtaatacaatatgacagctaattaatctcaacttctaacaaccatagatactaatcatccttccggcaaaccatacatacgtacgggagaaaggtagatctaattcattggtataaaataatgggtccaccaatttaagtgaaaatcaatgacagataaagatctaatctaacaatgtaaaataatgggtccacaatttaagtgaaaatcgacagtgaaattatattgtgccatatggcggcctaggagcatttgtaggagcgccatgtgacggcttgaaagcgtttgtagaaagtttaatggacttttagtatataatagatagatacttaattaatctcactataatcgcgtgctttgttttctgtgtcgggaggcaaggttggtaaccatgcttccgaaagtgtttgtaggtgagatgtaaggtgactttgtttgaagcaaaaagtcttgagtttgaatttttcttagtacgtgtatatgaatatgggcacatgtatcatgtgatttgtgggaacgagagtatgaattttgcttagcacgtgtatatgaatatgggcacatttatcatctgatttgtgggaaagagtgtgtatatgaatatgggcacatgtatcatctgatttgtggggaagagtataatggtatagatgcctaaaaaatacatcaaatatttttttttgatttttttagcacctgcaaaaataaaaaacgggtgcacccctacacctataatactggttcaagaaccgacggtaattggtgccggaacctatatatgatataaacttttagaaccggcacattagtgcacggaagcaaggaatacatgtccctccgttaatatctcgttccatttatcggattggtatttcttatggaggcggtgtgctggtgcaaaccgagccgccgtcgtctctttgccctccggcgaggcggcgatacctccatcagttcgcgttcccgtagtagcgatctcagatttcgtatcggtctcgattgatcaatgccgcgtagagcagaatcggattcagaaggattaaccgttaatcacagcctctaagcaccgacttcaactcgaactccgtctccgacttgcttccttcaccgatttcaactcggactccgcttcggctgccgataaatcctagcgcgccgcccctcaccgtctccgcattcaccacaattccttccacccatcctcgcagcagcgctagctcgtcgtccatggcgcttccccgtcgctcgagtccccgctcctcgcgcccgatcatccaccgcgccgtcgacgccaaggggagagtagtctccaagaagccatcagcagggtcgcccgtcaagaagatgtcatccgcgccgtcgacggcgacgcccgtgtccttcaagaagggcgacgaggtgcgcgtccgcacgccggtggggaggctaggcaccacggcgctgcgcctcgtcatgtggctcggcgcggtcgtcgtctccgactccgacgccgacgacggacacctcgaggtcatctacaacggcaacttcccgcgcgacgacccattccggaccgtgcgcgtcgccgtaaaggacgtcaagctgcccgcgccgcgcccggccccgaccccggctaacatggcggccccgcggccgaccacggccggcaagaatctgccgcggctgaagatgtttgtgctggagaaggagcagctgcgggccaaatccgaggccctctttgcatcgtgatcagtgttcttcagttgtagcagtagctgcagaagcttgtaggaatcagacatgtatctgttttcctctgtttttttgacagtgattgtcgtaggtaggattattttttcgagttcttcgcatgagaagaagaacatgtaatcatcatcgattatgaataaaatatcaagaattcatttatacgctggctcgttctctctgttatctcaagaacaataaatgcatgctatccttatttgttgacgagccaaatgttcgatcacaatcatcaattcatcataactcataaggtggccaaagtgaaattaactctaatctgaaagaagatataagctgattgcacacttcacaccagtcctatgcactggcctatcctggaacggtggtgatcaaacttatcgacactcgatacagttatcctgcagtcctacgggagtatgtcaagaaaccaagacggtttggtgtttgacacttcaaaacttatctttcaaatctcgttttccatttataccacctttactggataggccagtgcataggactggtgtgaagtgtgcagtgaattagtgaaatcagcttagatcttctttcagaattcagatcatcactgttgactgttttaaacccagaaacattctggtatgggcgtatgacaatcacggtatttgcaaatttgcaggtagcaaccagaagaagaaacagacgacaagcgatatttgttctagctaagcaaagcatgaaaactccagcatatacgagattgtgccccataggcatgatgatctgatctcaaaacacatgagaatacataggagatacggtctctactcaacgcctcagcaatcaacatcacaacaatagtcagctaaacggttgcaactccttgatgtgctccaaggagaggatcagaggactgcctcaatggtaacctagtaacctaccaatatacggccacatcaaacttgctaaatttttcttttcagggaaggatcgaggagttaattctcgataatcacagcaacagtctatgatcacgcttcctgccatgctcaaagaaaaggatctcaggacggagattggcctgactgtaccggtcgattaatcctttccaggattcagcttgctgcaaggagacgaacatttacgaatgatgatgatatcgaataattctgaaaccaaattcgagtgaaaactcaagtgcgaaagctgacaaggaattgcctggactgtcgtgctgtcatgtatgagccaccttgcctcgtcacgaccaaagcagaggtattgccgcccctcatcatcatagcataccttccattaaaaacagtttgaaaattacccagatgctatcgcgcgaataccagaaacagaactccatactagtcaggcaagcattacttacgataatctgacactacaattgcctattgccaagcaactgatccgaccaaagaagataataaaatatactcctacaatgatctaccaacatgatagcaaagcaatatttgaactgatttgacaggtataacataaatgacaaatcatacataaataaaccccagactagtacattagatactattcatatacaaaaacacactgaaactgagaagaaaaggtaaagaacgaatcaacctcaggaacaaatgaattcactttttttttcacagatatgcataaaaaggaaagacttctctcagcacgtactgcagaaaccagagtgtacatgctttctgattgcagaccttcgtagatatgactaatgtccaactccgctgctaggctgatcaatactttatgcatgttaatatggtttcccttgttgtctggccatctcaaaactgtgacaaaacagcaatagaagagaaactaaatcagcttgcgtgcatccccagtcccgaccaaggttcgagtcctctatctcagatctagcgtcttcttctcaatgacaccagatgcctaggtcctcctagatattctcgatttaggctctaagtttaggtcgattgatgaaagatgcagacatctgtccccattactcagcttaaaagtccccttatatttcttttcttcatattaataagaagaatgcttgttgtctcctaggttttccctaattgccagaaatgaataaatgatgtatgtgcacagaaggctggcatcaaattgtcgcaggaaaggtcgtggcgattaattattttatgttgcagccattacaatagcagatatggtgtaatttatattcaacgattgatatggttttcaggataaaattaaagatcagatgatacactgatccaatgatttctttcgcttatctttcctttctcctacatagaagaaacatatgcacacaattacattgaaatgttagtcgagaaggcggtacctatcatgaaaaaatgtggtggataccataggtatcgggtaatcctatgcccacagccaccattcctgaagtcacaaactgactgcttgtctacagctttcaagagttcactgaaagactccaactgaataagtaaaaggatgttagtttgctaattaaagaaaagatggacatataaaaaaggaaatatcaaaaggatacactgtgcagtatgtaccgtagttccttcaacagaacccaaattaatactgtggaagaatgtagacttggttttcatggggacctcattcacacagttgcatttcttctcaataatgtgcaacccaaaaagattgtgtgctaggcatatacaacccagaaggctgggcactattgctgtttgtggcaccaaagattcacccttgaactcaaaatgcaaaggagtttgtgccacgtgcagcctctcaaggattgattcaacaactctatacgcagaaatgtttccagcctaaaaaaaaagaagaaccagtgatcttattggctacgagagcaacatgctcaaactttccttatgttacagtcaatatgtacactcggaagtgcaagtgggacagaacttggtttgcagtcaagactcagacaatataaaggtgactcttgtatcaaattagtaaaataagcatttgcagaattgaacctgcaacattctatcacgacaaacagggttttaatttaatttactttaaagaacggcaaattgttgcacaaaatggccaaaagattagcacagattcatatggatcacagaaatgtttatttctgtaaacatttctgtttcttttaataaattgtattatctctcaaattaaaagcctaaaatactaaacaatcactttgtgtattagagcaatgagccaatgagaatgtaaaacaagcttgggagtagtacgtaccaataagtagtttaagaagaatgccattttgcctatcttttccaatagtgcccaaacagaactatggagtcaaaactcaaaacttgaaagatatcaggcagctatccagttcattttatatgaaatatttataacttatccattataaatatgagtaaactacatggagacggttagcatttgataagaaagttgctctctggtattttccctgaggtcacaggctgcatttagataggtgggaaacagaaagcgaacgcaaaccttttcatcaatcacaaaacttctcaaagaatcaaccatgaatatcgctgaactaggtaggtcacatgttttgcactggtcccaagaacggaagatacgcaacaagatagcgcgatatactctggctttaacatcaggggatatacatggtatctcccagagatcaccgcagaatctccttatgtgccacaaagactgcagttatgcagagagaatcagagataggaaaactaatagctaaatattaaaaactgaaggatccaaacacacgttacccggagaatggcatccaaaggaacctgtggtttatgacaattttgtggatgagcaagtaaagcatcctctaggggatcattaaccaattttgcctgtcaacaatgaatatcatacacaaataaagttacagacatgctttacaagttcagttcgtgctgaaagaaccatactgacccaaaggcaagcctttgcaataggtgaaataaccgcaaggcaatcaacttgacaagttttcagaagactttccttccagtaatccacctcagcatcaattaatagcatctcaactcgtgcagagccaatctgcaaatacagcaactaggatttaagcattgatcaacgagattaaaatgatggtataaaattagagagcaaacataattttttttttaaaaaaaggaaaacatacccaagaatcaaaataagtcttgatgtcaatatctctctcaaaaatggccttaggaaggaaataaacacctccttgtattccttttagctcttcccatgagctgaatttcagcttcgctttacccaatgctcgacttatgttgttaagaatgtcaggtccatcaacaaaacattctctccacatgctgaaacacaattccatgggatcctcaagcaaaggttcagataatagacaggcaaaaagtcgatctgcctggctagaaccatcagtttctcttgatgcaatcttctcacaatcaaaagatagtgtgcctgtctcttgggaccaggtaatcccaacaagcgaatcttgctggctctcttgttcgccattgcgacgcttatgatggttgcagcctctatgggtatgcacaacgagcgaatcttgctggctctcttgttcatcattgtgatgcttctgatgttcccaacctctctgggtctgcacaacgagcttaagcggcttgagcaattcacacagttcctgaaggtgtgtggaactcaactgtccaatcccacaagacccacacatggatactaccaaaggtgctactggcctgacccggttcattatgaacttgtgcatgatgtacagaaggttgagagaaacgacttccaaatcaatgagctcaaagacgatttccttaacctcgcgcaagatctttgtcctccctgccaaatcatctccatcggttggctcccatctccatgatctgagaagctccctctcactgtcagatattctttcgggtactaatgacagaaattctttgcccacaatatgttcctcatcgatgtgactcttgaaagccgcgaattccacgtagatcattccggagcagaaagggcaagaccaacccttcttgacgaacacctcagcatcggaaagcatacttgtcatatccatcaaccctcgtgagcggcagtacgacttcatctctccaaaactcaccttgaggagcgcttgccgctcctcctcgctcatgcggctccagcgatcgccggcgattccgaggtcgacggtttccggcggccactccggcgtggacgcgggctccggtgaagccgcggcttgccccttgcccttctcgatcctcgcacgctgcccgcggatcgtctctcggccgtgggctttcctgtactcgagatcgaaggggttgtcgtgatgatcggcggaggagtagcggttgctcacgaaggtgtagtgcaacgccgggtcggtgggctccgccacgcggagggcgcggtcacgcacctccgctgcctcgtcaaacaaatccatggagatgagcgcgtcgatgagcagcgaggcgatgtgggggcagcgcggggcgagcaccgccgccagctcgagctgaaccctctcctgctgccgactgttgcgctgaaggtagcagcgcgcgaggatggcgcgggcgagtggcgaccacgggtacctgccgacgagcgccgtcgcgagcgagagcccgtgcgcgtgcccttgctcgccctcctccgtcagcgcgacgatcgccctgcccgcctcctcgcggaaggcggcgtcgcagtccgaccagtcccggttgctcttgctccccacgacaacacccgccatgggatgggaggagctgcggcttcggcctcagcctcagacgtgctgctgctgcggcggcgtcgtcctcgtcgtcgtggacgtggtcacggcgcgaggcagaaggcggcggattgggtcccgccgcaccgctccccggtcggccgagggggaggggcgcgaggtgttcgacgaaatgccgaagcggagaacgaaggtggcggcggaggcggaggatgaggaggcgggtggggagcaagtctctctcggcggagcaggagggggaggagacatgtagccggcgacggcgaggcggttgctgaggtttcggccgttggggtggggcccaactgccagagagacggagagagagagaggcccgttgtggtggggcccacgacacccgctagcgaagggatgcggtgtcggcggcggcgcttccattctagaagcttctggagacagccctgacctgcgccgacgagaggaagggagggaagagctatggaatggaagagaaagggaagaaggggaagaaggggaggggggaactttgagattcgtgcgaaagccatcagaatgaatgggtagtttgtgatcggcccaactagtttttgataggaataagttcacttcaggtctttgtccaacaacaatactggatcgattttgctatcgatcactcgcgtgatttttttgctgacatttcatgtttttttttttgcagcctcgtcagccggcgcgtcggacaccagcacatcggccttcgtgtctagctagcccaagcgcacacgataatggatattggagaagcacggtgacacggtggcctctaaccgtcgagccagccgctggtagcacggccaacactgatcggcgagagacaccgtccctctcgtcgttgtcgtgaaatataaaattacagtcctatataactaaacttgtatttgtaaatttagttgatttgacatgtaagtgcactgtaattttaataaaaataatatgtaagtaaatatgtacttattattttctttaaaatataaaattacagtcttatataactaaaattacatatataaatttagttgatatgacatgtaagtgcactgtaattatgataaaattgttgtgtaagtaaatttgtattagttattttattttgtagtccggtggatgcaaatccaagggaagaaaaaatctggttgattttttttaaaaaatcacccgagtgatgcataggcggtccaacatacatagtggaacgacttccaggaaaagcaataatacaaaggatcatgcttacttttcctaagcacttggaggcaactcaaagcttctggccagattattgcaaaacgaaattaaaatcagaacatttttctttgttcagtacggcaaagcatgaaactaaactaaaccagtccacgcactgaatgagaggtgaaagcaagacgatactattatttcttttaagtaagaaaagaactaaacccatcctaattaatttactatcgcctggaagctcttcgacaacactattatatatcgtgaggcgcagttgaatctccagttctccaccctttggattgtccttggcacctttttcatcatcttggtaagactgtatatatacttcaggtgtgccgatattcaggcctggtaagcacacaaaatcatgcaaagacgattaagtgaaactaatcaaagtttttatatcttctgagtaagaaaaggacattatattcttgtcacattaatatcttcttgaactgaatctatgtcttaatacttgcctcagcagtcagcaacattaccatcctcggaacataataccttttcaggtggatcatcgcgcagtttatcctgttaaacatgagtaaaacaaccatgaaaagaatgataattaagcaaatatataggtggtatattctaaacaaattaaataaagtcctatgtataacataaaaactatagtagtagactaacccataggtaatccttcatggctggtaagctgactttacgataatcacaagtacagacttccacgagctttttcttcaaatcatcaacttcggcatccaattgcaagatatcgatatctaatttagcctgcagcacattttacagccaaagcttagaagattggttcagtataatatcaaaggtacaaacactatctgaaaattaacagaaattcagggtacagtaaaatgaacctttttagtaaaataactttcatgcgtattcatctctattaagccacgttttagctcgattttctctaccaatgcagctgcacttgcaatcaacttttcgaggacacgagctccgttatcaagacaggcttgcctcatgttgttccatgaagtaaccgggtcttgtctccgaggtctagatagccagcgaaagagagcatcttgattgctagaagaaccatcgataatgatccttaacgcatcctcttcgacaactatggaaggaacgaaatcctcacgaacgaccgagacataatcaaaatgatcattactatcctgcagcttggcatcatcatcaccagcactcaatccaggcatagtcgatcgttcaaaaaatccaggcacaatcatatccagagtgagtgccaggacgtgaagcgccacaggatgcagcttagcgatgctgcagataggattctggggaggatcagcagaagcagctgctgctgctgtttcttcttcaatcgtccatctgttggtgaattcgaccaggttatccaagagatcgacggacagtgccttgcgatccttgatgcgctggagcgtgctcttgatcttgctcaagaacctctcgctctcatcatcatcatcgtcatcggatggcgctaatttaaccgcgcaagatccgatcagctctgcctcttgttcttcagatattctctccggcacgagcagcggcgatcgttggagatccgggaagaactcgtctgcgacgtgcgactggaagcactccgcggtgaggaaaaccatcatgcattgcggatcggggcacatccagcagatccaatctccggtgtccttggccaagtccaccgcgcaggcgagggcgctcatctgagcgtccgatagtggctctcctgtgtagtgcgctttcagatcctcgacgctcaccgtcaggaagccgcggcggcgctcgtcgtcgtcggcggcggcggcggcggccatggcgacggccttcgacgaggcctggaggaggaggaaccggagccgctccttggcgagcatccgcgcctctttggtcggcggcggctccagctgcaggtgcagaagctcctccgccgccgccgccgccgtgtcgtcggcgagggcgagggcgagcgcgcgctcgcactcccgcgccgcgagatcgaaccgctccatggcggcgtacgccctggcgagcgcgagggcggcgtcgaggtcggccggggcgaggtccctggcgtggaggagagggccgagctgccgccacctggcgtcgtcgtcgcggctgtccatgttactcgtgagaggaggaggacgcggcgtttacgtgaggagaaggcggcggcccgcggctgcgttgttgttatataggagtaataatcgggttgcaatggtgtccctaacaagttctctaattacatgtaaacccttcaaaatttcagttgcaattttatccctaacacaaatattcgtcacgccaaacagctcgctgagtttccctttttttagtttctcgctcagttccacttccacttttttttttgggggggggggggggttggctaagggataaaaatattatccatgtctcactgtctcacgccgcccctatgtgccctcaccttacgggataaataagttatatatatacttcccgtgtatgataaaaatatcaaactgatagatggtatgtttcgtaaaaaaaaattattttgttaaaatattaaataaattatttttgaaatgtatactagttaatagttaatcaatcatgtgctaattgctctttgatttttattgctagaataagcttacctcgtttggctgtgtttgtttattgttaggaactctttttctctgacacgtaaaatatagtggtagattagcatatgattaattatgtattagattaaaaaattaaataaatagattaatacaattgtttaaaaacatctttctttttttaaaagggtgcatttaatggtttagtaagtatgcgtgtgaaaaatgggcgtttgggactgggggaggtgctttatttctttaaacagcgataagcttcttgcagtactccctccatccgacaaaaactccattttcagttttggatacactctcttatttcaaagttttctatgattagtaattttattgttattagatgataaaaaataaataatactttatgtttgactaacttttttaaaaaatatatatatatttttaaaataagacgaacggtcaaatgttggatatataaacctagaaatgaagactttgtgggatgcaggggtagttctgtggtgccttttttttttcacaatttaagacaacgttgatcacgacgatttgtggatgcagtgagcctattgcatcgaattttttttttaaaaggaaatattgcatcgaatttctccggacatatatttgcctgttttctccgagatactatatgaacaatccttttgaaacgagatctttggcaaagggtgccggaacacctctgttttctgtgacagccgccaggtgttcgatgtcatccccggcttcctcggcgagcttctctccacgacagatgcgagaacacgcattccgtcgctagctcgttccatttttgcgactagttctgcaaatggagatggtggaaactgagccgccggtccgccgtcatctccttgcccttcgcgtaaacggagatctccgatttcgagtcgagttcggattgaagctaggaatgtctcgcagagcatagatgcgtataatcggattattcatcagaagtattctgcttggcatccacacgctttgcttccttcaacgatttcaattcgaactcggactcggctgccgataaatccaagcgcgccgcccctcgccgtctccgcattcaccacaattccttccacccatcctcgcagcagagctcgttcgtccatggcgcttccccgccgctcgagtccccgctcctcgcgcccgatcatccaccgcgccgtcgacgccaaggggaagaagccgtcaggaggatcgccgcctgtcaacaagatgtccttcaagaagggcgacgaggtgcgcgtccgcacgtcgttggggaggctagggaccacgacgctgcgcctcgtcatgtggctcggcgcggtcgtcgtctccgacgccgacgacgacggacacctcgaggtcatctacaatggcaacttcccgcgcgacgatcccttccggaccgtgcgcgtcgccgtcaaggacgtcaagcttccggcgccgcgcccggccccgaccccggcaaacatggcggcccagcggccgaccacggccgggaagtcgctgccgcggctgaagatgcagatgctggagaaggagcagctgcgggccaactccgaggcgttcttggcattgtgattagtgttcttcagtaggtgcagaagcttgtaggattcagacattgtcttcctctgttctttgggtgccaatgtcatcgaaggcacagtgatcttgtaatgtcttagataggatggtttattggaattcttcgcaagaagaacgtgtaatctgtgaagtgtatttatcattgattatgaatgaaagatcaagattctttttttatacacgagtgatgtgtttcgtctattatctcatgaccaatgcaatactatccttgtcttttttttgtttgagcaaagtgttaagattaaaatcacaatgatttaccctactgataaagaaaaacaatcattcatttgtttctctaaagataactttaggtgtaaaaatcaccactacatataaggccatctccaatgtgcaacaaaaagtgatttaccatcggtctctatatctctttaagtgcgtgttaacattataacgatgctattataacaaaaaaattagacaaagttaatatagcaaaattatgctagaaactatctaaacatggttgagctggatgactgtccaaacacgtgctagctaatggtaaatacatgtagatactactattcattattcaagagagctttgaaatacaactgccctcaaacatgatctagccatgacccatcaacgacttggacactgacaagagtggatctgcagtggagaccaaaggagacgatggtcaaataagccagatctaggctggtgcattttttttttgttttctgatgttttaatcgatgtatctatcatgtttttggggttggatccaaatgttgcactgcggtagtctgatcttatttcatctgttcttgcatattggttgaatctcaatgttccatttgtgaggatgagttgttcaatcttgatccaactatgtttcagcatttaatagattgaaacattttttatttagtggtgaaacattttttactaggagtgaaacaacgcttgatttttaggaaaagatcgggcgtccgatttgtagtcaccttcatatacttcccaaatcattcttgagataaaacgattatccacatcccaaatccgaaataaagaaaataaaagcaattactcccattgccgaatagtagtaatttagggtgtgattggttgggtggatgtgactggataaggatggtcattcaattttttttgtgtgtttggttcatatacaagatgagtgaccaaatcaggtggatgaaccgatgaaaccatccatgttttagcctggatgatgtggcctatgtcgattggttgtgatgggtttaattttttgttagcaaactataaataatttttcctactaaactatttatttaatttctaattcgattacatcattatattcattataattatatctttaaagcaagattttatatgttatattatgatggaaaatatgtatgacaagtgggcctaactaagttttgacttatcctattcatgttaaatctctctaaccaaataagaaattggatcactatatccatatatactgaacaaaaaacaaaaaattagatcgttatatccgataaaacatactatccacatgttatcttaaaccaaattactcctcatatttttatgacactgttctctcgacatggactctgtaaacaattactcctttcatttttatgacactgttccactactagacaaccgatattttatcgtgatacccaaaacatagatatctcggttagatttagaaccggtactaaagatatttttagtatcggttctaaaattctaattcccaaagactagatggaggatctttagtttcggttggtgttaccaatcggtacttggtaacaccaatccggactaaagatatttttagtaccggttggtgttatctaccaatactaaagatgccaccaaggttagttaaaaagaaagtatctccatccaagtcagatgtgtgtaataggtgggatggtaacatgcgtgaagtccaaggtgagaaatcttgtatttgaatctcacatccaacatattactttttatttagtatgcaagatcgagatctttagtctcattactagtctgggctgttagaaccgagaataaacgggttcggtagtaaagatcatttctctcgagaaaattccctacatacccctgaaaagttttgcaatctcttctatacccctgaattttgcctcatcccctacatgcctttgagttttcattttgatctcctatatccctattccgttagttgaccgtgaattgactgttaaatttttctaaaatgaccatatcgcccatttcccatacttatagtacatgctatttactctacttcataattcacaatgtgaaaaattgtaaactcatgataaaatcaaatgggacataattatttattgaaaagaaaatttaaactgtaaaccaaaatccatataagagttttagctagaaattctaaaccaaaattatttatttgttgggttcaaattttgatgaaaacaatatataaatttcataaaagttaatttaaattttttaatttaattttagaatttgttgtcaaataattatattccctttgtttatttacaaatagatctttttttcatataagaattgtgatttatcattaaactagtacataagtataacagaggggtaatatagtcaatttcaaaaacatttaacggtcaactaatagaatgtacatagaggagatcaaaataaaaactcaggggtatataagggatgaggcaaaattcaaaagtacataagggattggacgaactctaaaggatacgtatgggattttctccttctcttgcagtgttctctcatcatggactccgtaaacaagtgctccgattctaatggtgtcgctaacaagttctctaattacatacaaaccctttaaaattgcaatttaaattgcttattaattattagtccttctagtcactaatatttgtcatatatatagataagattcagtgaaccttctaactttcgaacgtccactttatattaaagtaactttataaaatttaggtgagactgtttgcggtcacggaggcgtgttgtttcgttaaacatagctactgcttcgtacagtagttttgatatgtttttttaaaaaaattataaatcctttattattatgatccaaattgcacaataccataaaaattttgccacgtgacacataaccctagatattatggttttaaaatttcacaaaaccataccataaatcatttttaacactcctatattaaaatttaaaaaaaggttgtcaaatttatatggtagattgtagaacttaaagaaaattcaaagtcaaaataattaacaatgtggtatgtgaaactttaagaacgtaatacgtgaggttatgtgttactctcacagaacttacaaccttaaatttttttaataaccaggtgatttcccgcgctttgctacaggaattactaagcaattctcaatatttttttaacaatctagttagcagtaaaaaggaaaaaataataatgaaacatcagggtttatcagacaaatgataccatgcttcaatgtgaaacatattgataagtatatgttaaatattgtaaaagtgatagatagatttgttaaaatatcgtgcaaatgatatgaggggtgatgattcaaggtttcacctgatgattcaaggtttcaaacatgctgctacccagtcaagtgaaattttgtccatgcatgtttggttttcaccttaatattgctatgttgtaggaagcaaacttatttagcaaaatgtaagtttattatactatgcaacagtaggaaataataagaatacctggtgatcagagatcttgacaggcaccaggaagaagtcattgtccacctccatggctccatagtatcctttcccccagccaccaccacctctttccgcatcttggacaggaggggatcctctttgtccccaatctctgcctgcagcacaccatccttgaacagcttcacacaaagtagcgaaagagaaagataatgccagaatagattgccagtgttgcccagcagaaaaaggaaagtctgtaaattcattctcacctaagatgaacaacagaggtcagtcctcaattctgtgtctgcaaaaatcaaccaagaaacaatgaggataatgagcagcacaacggaattagccaaggaggaagatttcctcttgttggacaaacgaaagaaaaaaagaagggcaccaattaacctgcagtagtagagtgggcgtgctggcaagagagaggaaccgatgatagcagcacgagcagcagaagcaaaggcactgctgccctcgtccgcgtccgccgtcgtcgccgccgccgacgccctcgaccgctgccaccgccctcgtccgtgtccgccgctgcctcgtcctccgagtttcctaatgggtgatcgatcgtcccggacgatcatctcatgtttcctttctgacaccgtattaactttctattttagtaaatttatccacctaaagtttgtatacctcaagtttacacatctaaagtttatacgtctaaagtttagagacccaaagtttataagtcaaaagtttatatatctgattcaaatttaaatttgaattcaaaattttttatatatatagtatttctatgcatctaaagtttatacacctaaaatttatagacccaaagtttataagtcaaaagcttatatatccgatttaaatttgaatttgaatttaaatattttttatatagtatttctacatataaaattttctaactttgtttttttattttttttagaaaattatgatgtagtaggaagagaagaaggggaggaggaaggggtagaggagctgtcataggggaggaacgggtgatcgctcacagcgaccacccgcccattagcacccccctcgtcctcgtccacctccaccctcgaccgctgccgcctccctcttccgcgtccgctaccaccctcgaccaccgctgtcctctcgcgacctccgtcgctgctgccctcgtccgcgtccgccgtcgtcgtcgccgccgctgccaccgccctcgtccgcgtccgccgccgccctcgactaccgccgccctcaatcgcctcttccgcgtccgccgcagccgccgccctcgaccgccgctgtcctcgtccgtaacctccgccgccaccgccctcatccgcaaacgccgctgccgtcgctgtcgccattgacaaagttcgtcgccgccgtgtagcgcccgttccgtcgtggcgcctagcgggaaaattatctcttaaaaaccctaattgcgaaatttgtttccttgcttgttgtctagtgtccgtgccatctcaagatctcaatccccgatctatcgtcgagttcaactccaaatccaattccttccaaatcgaatccctccgcaaaagtctagtttgcctcccccgggttcgatgggccgaattccgctcggcccatctcttccccggccccctctctcccgggcgtctctctctctctctctctctctcgcactctcccatctccccctcccctcccccggcgcgctctccctccgctccgccgcgcccgcgcgccgcgcacgctgcgtgcgcgagcgcgcaagccgcgccgagcgcctccttccccctccgctccgcccgcgcgccccgtgcacgagcgcgagagccgcccgcgccgagtcgagccgcgcctctccatccgccgcgccctcccgttgcaagccgcgcgcgcgtgccgagtggccgaccgtctggttgccgccgccgtcaccctctgccgcgccagcccgcgcctgtcgcctgtgtcgtcgcgccgctccaaaccgccccgccgtcatcgccgtcgtcatcgcctcggccccgccactcccgcgctagcctccaagggacggaggcagagcctccctcctccctcagccgcgcgcccccgctccctgctccttttcccgaagaggcaaggggacaagccccctttctctccctccttttccccttttcctcctcgccggcgtcatccgcctctgtcgccgttttggccgcaagcaccgagcgccagctagcgccttgaccgcccgaagtcggtttccaaaccgacgttgccgcccttaaagccccgggcgccctccctctcttctcctctcgttgcccctctcgccgccgcgccattgccgtcgctcccgtgctctgtctcgcctccgccgtccatcgccgagcaccgggagagccggtgcgttcgtggacgcggaaggggacttcggccgcgccctcttcttcctcttcctcggcccgaggccggagagattactcccgcgccgccggcctctcgtcacagcgcccctcctcttctcggtgatgtctctctccgttcttcctcctcgctccatctcctccccctagctttcggtagtagcttgagtagactccccgtagttagccggcgccgccccgaccgttgccgtcgctcgccgtgtgctcgccgccgtcgccgcccgagctccgtagcacccgctcgtcgccggccttgctcggcgtagttccacccaatccgacgctagcgtcgagttcccgaagccgcgtagatgctctcaccgccgggaatcggtctctcgtgacctcgtcgccgtttccctcttctcccgccaccggttgccgccgccgcaatccgccgccatcgagcaacctccggcgaatccgagccgttggctcgtctccccttgtcacgtgcaaccgcccggtgtgcacgcttttgcccgtatcaccgtggttcgctccgccgctcgccgccgccgcccgccgtccattcgcggccgggtcgtcgtctacctcccgccagcccacgtggccgccacgtaggcgccacgtcggcgccagctcagcctagaccgggtcgggccgaccccggtcggtccctccgcgtgcgcgcgatccaccgcgagccgtgaggctgcgcgtgggcccgccgcacctgcgtccaccgcggaccccgcgcatgcaccgcgtcccgtccccgcccgcgcgcgtgcgtcgcgtgctccctccgcacggtgagccgagccgctgacaagcgggtcccacccgggaccgcgcgtggtgagcccggtccaccggactctctcctccctcccgcgcgcgcgcgcgcttgggccgtcttgggctggccggcccattaagctcggccgagccgccccaaatcccttgggccgcaccctagccgcccgaggaaagtctaaatttcctccctcctttcttttctttttcttttccgaaaaggatttaattccttttcctttaggccaaaaattcaataatcttagaaattcaatatcttcccaaccgtaaatccgtttgactctgttcaacttccaaaatttcccaaatctcgagatctatctagtggcacgcttagaggtctttaatagggctttattttcgccgattgttgagttgtcccgtttcgcgtgtagtttcggagcccgaagacccgcagtgcgaggatttcgaggatcaagctccagatctcgagcaaggcaagccacccttgaacatcttgagcctatatttgaaatttaattatattgcttgcgaaatattatgcattgataggatcacacttaatctgttgtcccgtctgcaaggcagattggcagacctacctaatttgttgcatttgatccttcctttgttaattgttataccatgtccccttgtaaccacccagttgcacctcgatattcgtgcactctatgcgagtatcgacggtcgccttcaaacttaaaatctgagtaacaacttgggtaaaactggagttttacaaaagacttggaaaacccgacacctgggtcggcgcttgcgaactaaatgaatttccaaaaccgcggaccggggaacgtaccgggtgtacggtttcccgctctcgcacttaaggaccgattccttggaatttcatccaaacataagacaagtacgaccacatgggtggaatgggacacccctggctgagtaactagcttatcaggggagccttgatgccgagagacatgtggattcgccggggtggtgtcggggaggacccctgggcttcctggcacagtatggtctgggacctaacctgttgttggtctgggacccctctcgtcggcatatggtaaacctgtatcggctttcgaaatgccttgtcatgaaagcttggaggtctcccgacgtggctgatccccacgggctgggtgatccgggttagtaatgtcgtgtgggtaaagtgtaccccctctgcagaggttaacaaactgttcgaacagccgtgcccacggtcatgggcggatgtgaggtgattcctagcgtagttttgtttgactactgcttgtgaaattgttgtgtaaaaaggggttcggtgtttgaaaaatctgcagctgatgggatcagctaggcccgggtggccgtttgaaaagttgttggcccgggtggccgtttgaaaagctgttggccgggtgccaaccttgttgcaatcctaaagactgacacattgcacatactccgaccggacgggacgcactgtctcaaccgtgtcgtttgagaagcactcactcagttgtttcagaaaagagttcaaataaaatcaattgcaaaaataccagcctttccttgaggcctgcattaaacacttatttcccctggcttgctgagtattcccgtacttacccttgctctataaaaaaaaatcccccccagttgctgaagaagatgaagtggatcctgctgacgaggagttcttccaggagcatgtcggctacgatgagttttagggtttcggcctagttcccaagtcgcgcctgtgatgattggtccaagtcctggcttccgctttccttttgtaatgcagttgtgagctcgggatctgtccgcagcccaacatgactgtacttctactctataataaagagacctctgttgctgtgatactctgcctccctgtgataccagcactatttcctgggactggtatcgattagcaggttaatttggagcgtcacgggctagttccggtcgggactagttcggggcgtgacacgccgtagtcgttgttgctgtcgggggaggcgaatatgcgatgaggccgggagaggcgaatagtctatgaggccggagggaggcgatgcggtgaggagcgaagggaccgagggcattgctacaaaacggaatgagtaccactgagatgtaatccaacggctgataattaaatgatgatgtggcttcaccaaatctcagctttgggttttaactttatagaaagaagggataccttagattttgtgattataataggtgggattttataaaatttattttaacattattatttttacaatttaagacaacgatgatgacgacgatttgtggatgcagtcaccctattgcatcaaatttctccagacatatatttgccggttttctgcgagatacaatttgaacaatctttttgaaacgaggacttggcaaagggtaccggaacacctccgttttctgtgacagccgccaggtgttcgatgtcatccccggcttcctcggcgagcttccttccacgacagatgcgagaacacgcattccgtcgttacctcgttccatttttatgactagctccgcaaatggagacggtggaagctgagccgctgtcatctccttgtcctccgccgccgccggcggcgacacacctagcttcgctgcgcgttcccgcctgcttggcgccattcggaatggattgcatgatggtggagaggcgtaacggacgtctccgattccgagtcgagctcggattgacgaatcgtgcctgacagcgccgacttcaattcggactcggacccggctggtgataaatcctcgcagccccgatcgccgcctccctccgcattcaccacgattccctccacccatcctcgtcgcagcagcgctagctcgtcgtccatggcgcttccccgccgctcgagtccccgctcctcgcgcccgatcatccaccgcgccgtcgacgccaaggggaagaagccgtcaggaggatcgccgcccgtcaacaagatgtcatccgcgccggccgcgccagcagtgtccttccagaagggcgacgaggtgcgcgtccgcacgccggtggggaggctagggaccacggcgctgcgcctcgtcatgtggctcggcgcggtcgtcgtctccgacgccgtcgatggacacctcgaggtcatctacaacggcaacttcccgcgcgacgatcccttccggaccgtgctcgtcgccgtcaaggacgtcaagctgcccgcgccccgcccggccccgaccccggcaaacatggtggccccgcggccgaccacggccggcaagtcgctgccgcggctgaagatgcagatgctggagaagaagcaactgcgggccaactctgaggctttgttggcactgtgatcagtagtagcagtagcttgtaggattcagatatgtcttcctctgtttttttttggtgtcatggaaggcacagtatctcgtatttgtgataggatggtttactggaaatcttcgcaagagaacgtgtaatctgtgaactgtatttatcgttgattatgaatgaaagatcaagatttttcttctttttttttacacgagctatcgatgtgtttcgtctattatctcatgatcaatgcaatactatgcttgcctttttctttttcttttttttttggtttgagccaagtgttaagattacagtcacaatgatttaccctactgctaaagaaaatcaatccttcatttgtttctctaaagataactttaggtgtacacagtacacgaactttgaaatacaactgacaatgggccaatccatcctatggttagcagttagcacctctgagccagggttgtctcgaacatgatcaggtcatgacccatcaatggcttggacactgacaatagtggcctcgattgttatcaataaggagctcgcatcttagctcaagctctcgcgacgcttgctggagcaacgtttgcaaatccttacggggcgtgtcgtgtgatcgtagatcgatcatgtggtgtgttatgacactcgagatcaaggtttcgtcctcagactctgttactccctttagtttcagatgaatttcgaaatcaacttgatccattagcacgactgcacgagatgggcatgttaacattagatttggatcctgtaagcatcacaagtaattgatcaatccatgttaaatgtataattattctacacttggcacactaattaaggtcaggaacatataatgtttttcacaggcttatgtttgtacagattatagaagtgccacttttgttcatttagtttgtatcaatgagttctttacaaagaagagcactaaggagagcttactaggtcctccatggaatgtttaggctatgccaaaccactacctcctgtaaaatcaaggagttgatttaagaatttgtgtgatgaaaatattggtggtttgtgatattttatttgtgataaattggtttcttgtgacgagagttaggagattgatagatggttggttttgtgaagtggttgtgcggttgacccgagaggtcagaccagccggcctgacggtctgatcgggcaaggttctgtttgatgtcaatttcaggttatcttgtccgttttggatagtttcttcgtggatttaacttctagattgtttctataagtatggatactgttgttatgctaatgtgagttaagttggaatgaacttgtgttcagaatatggtttctttattgttgcatgtgcaggtgttatttagatcgaagtcaacttgagagaagtggatgtccagagatcaagagaccatgcgggatactaaaggctagagaacgatgcaaatagtgataaaattccatatgacatacaagaggaattatgtgcatatatatggaaaatggagtcgaattcggacgtgagtctaaattcggaaagattgataaatataagggcctattcactttgctaccaaaaaaacattaccaaaatttggcattgccaaaattttagcatagttgtcaaaaatttggtaacttgccaaaattttggcatgatttcttatatagttaccaaaatttggtaacaaactaaatgtagccatttttttggcaactttaccaaaatttggtaaggttgaaaatggcatcaaagtgaacaggccctaagagatgagttagatacttgcaagagagggtttcctacgtggatgggaatcctaattaatgttagattcgtgagctttgtacaacattcctcatgtataaatagaaagggagggtgaggcatcccggtatcgatttttgagagagttgaattgagagaaatgttagagttctgagtctagtcgagattttggtgaggagtgttgttggtgcactttgtaaacactagttgatgcaataaagttgagatagttcaatctacatcttctagtttttatctacctgtgttttctaggtcccgacggtcagaccgacagcaaggtgacgttctaaccgacgagagtgcggtggtctaactgcaggtggcgcggtggtctgaccggccagacaatggaagtctgaccggcagcacgagggcggttcgaccgacgccttcaggacttcgtcgcctacttcatttgaggcaaatcttttattccgcaaaatattttgggtttttggttttccctaccattcacccctctctgataggtttgtttagtcttgttcgatcatatacctccatttttatttacatgggcagcgtaaaaaaaagagggagtataaatgtagcaatgaccaccccaaaaaaaaagacattaaccataacaggaaatacacaattatgtatattaagaatgttaaaaatgacaactgcaaataagatctcgatgaatagtttaggcacatgaaaactataaaatgtagcaatggcaccctgccctcacgacaaaaaataattataaattatatacagcattagggtggcctgttgaccaaattatctatgcaatgcttttagtttgatttgatacttatcgcatatgtggttaacctctaatttttcttacttcgtaggtttcaatttgccccacttgtgccggagagggtggagtcatttcagagtatcgcaaagaaatgtgctggagagggcgtgttcatgttggcaaggagatcaaagtaaaagttcctctaggtgttaggattccatcggatggctgattgagccgggagcgtttcagccgaagcccataggatggctgattcgactgagcccattcagcaaaacaaagtgggctcacaatggagggtaactggcgtttggttgatcaaggtggatattttccgtttcagttttactatatatttatggacaagttttctctcaaaaaattatgaaatgtaaataccctattgattataatttaattattatattataacttgtatgtaattttcatattataatatcaaattattaaatttgcttcaaggttcttgcaaacgtaagaggagaaaatcactgtgcgtgcacggggtgaggggattcgatatcacgacctccgctttgcaggaatcagcatgttacgacggaatttacgaaagttatatacaggatatattgaattacatgcatgattacatactacgactgtactatatttctgcccgaaaatttctctacaaaagcataaacagtcccgctgaactactactcctgtaacctgataggcccaattcaggcccacgaacgtgtttgggccgaaatgtgaacttgaacaggcctggattgaggcccaatacaactatgggcctaggtggaggcctcctgaacacaaaagaaagggaaaaaacccaagtgagaaaccctaaccgcgcgaggcgcctctcctcctctgcttgcctgccatggagttcgatcgccggaaggcggcggcgctggccgcgctcgcgtcgccggcgccggacaagtcgccgaagggcggcgtcgacgcgcccatcgcgccgctcctcgacgccctgaactcccacccggacctcttcaccacctcctcctgctccggccgcgtctccgtcctcgcgcagccgccgccgccgcagcaggccgaccccggcggggccaagaccaagaagaaggcgcggggcggcgggtgggtgtacatctcccacgaccccgcggacccggaggccctggtggaggtgctgttcggtgtgaaggaagggggagggggaggcgatgatgagctcgtgttcaggttcgagccgatgattgtggccgtggagtgcagggacgcggctgcggcggcggcgctcgtggctgccgcggttggcgcggggttccgtgagtcaggtgagcgtttgaattcgttcagctataggtagtgagatagatggtgtttggttgagttctgtgtgtagtttgtgtaaaagaattcatttcttctgcagtttacttgggtcatttagttacctgtattgtactacatttccatttggaggtgctgtaatttcttgggttccaattctgtttaaaatgggtaaaattccggatgctctttgaattttttaatgtcgatttgatagagtttgcctaaaatttaccggtgaattaaggcacaggttaaattttcaagagttatgctttgacatatttatgttttagatggagatagtgtcatttatattgtctttccactttgcttgccttggtgtgccttttcaaatattctgatcaagctttttttatggtaccatttttaggcatcacaagcttgcagaaacgtgtaatggtagcattgagatgctcaattcggatggaggtgccactaggtcagaccaaagagctcgttgtctctcctgattatattaggtaccttgttagaattgccaacagtaaaatggaggctaacaagaagcgaatgggtggattcctggatcttttgcaggctaaggtatcatttgactttgcataccggtaggcattacatacctcatatttgcacctttctggcattgctgctcatctctaactgggcaataaccatgtgatatcatgcaaagttgaagcatgtatttcctggatatcgatttgatggataaagagaattataatatcctttttccaggtagtttagctattggtcatcacacttctttgtgaagaaaattaattttgtctgtagtgaaaggctcattgaagattatttagacatggaaagcttttattcctcaatttacttattaattctgctgttccatataccaccttatcaataagtatatggagtatggatttagggaatgctctaggcctctatcactttgctcattgtgttctttataagttttaatgcattggttccattcaaactgccagggtctcctaggttcatccaaaggatgtgcaactgcagataatgaatccttagttgcaaaaaagagtagtgatacctataattgtgatgctgataataattgtgataatggatttgtggagatttcactagaagcatcatatttggagagtcaagaccctgtacttcaaaatggtgccaagcatggttttggtaatgctaaacggcatgttctcatatctctttccttttatcctgcttttatttcccctcatggtgtcatgtaaacctattggcctgttcagtccttccatacatatgttgaggagattttggtttgtctaagagaatattaccatcaatacataagtacatgttagttatgtatgctaggcctattgattcagttctgcacattgatcttgtacaataaagtcaataaatgttatttgaaaatgaaatttggtgatgctggcactgtttcacaggagggcatttagtaagccatatttttttatggcattaaattggaaatattaccgtgccagttggctacatagtcttttcaattctaactcataactcagcagctcttatatatatttatcctagatacagagctctttttatatgactaaaccctattattccgtttattttcttctgtagattaacacaagaggaagcattgccaacattgtcaggaaatacaactcactgcctttctactgctgcattggagattactggtgaacctattgagaagctcttcttatggggacaatctgcttgtgcactcactgttggaagagagcaccatatcctaacttttggtggttttggagggccagggaggcacgcaagaagaaattactctcttctggttaatcctgggtcaggattgctgacagaattaaaggttactgggtcgccttcaccacggatgggccatacaattactgtagtaggcaatgatatttatgttgttggaggcagaagtggtccttcagaaattcttaatgatatctgggttttggaaagatctaacaatagatggtcaaaagtggactgcagtggggattttttccgtccaaggtattgtttagacgaaattctttatatctaattttcttttgtaccaaataaaaaaatgctaaaaatagtgctaactagctatgtccaaaagttatggaattagtttcttgaaaatagcaacccatttgcttcagggaagttatgtgtttttcaatgcaggcaccgacatgctgctgctgcagtagatcgcaaagtatatgtctttggtggactaagtgatgatggcttatgttcttgcatgaacataatggacacagcaagtatccaatggaatgtgatttctcctgatgacaaatggccatgtgctcgccactcgcattctctagtgtcctatggttcaaaattgtttctgtttggaggtcatgatggtcagagggcactgaatgatttctatagttttgatacaacaacacttaagtggaacaaagaaaacactaatgggaaagctccatcccctagattttcacattgcatgttcatctacaaagactatctcggcatacttggaggttgtcctattagagaaagcagtcaagaaattgcattgctaaatttaaagcataaaatctggttttatgtatccattccatcattgagccaatgcctttgtgtccgtagctcatcagtcatcattgatgatgatcttgtcattgttggtggtggtgcgtcttgctatgcatttggaactagattcagtcagccaataaaaattgatctgcatttgctggagtcaatatttaagcttgcatacaacaaggaaaaagaaatgtctgtacaacacggttcagtgtcgaatgtagacttattagaaggacatgaggaaaattgcaatcccagtgataatgtgaaggtggtgattgatactgctactctaggttcatctcctttggtccttcagctagaaaagaagtatgccaaattagcaaaagacattctaaaaaagtttggatggttggatcttactagaaaagttcgagtaagccaggataacatccatgttctctttcctgttagtaaaacttttcatgccctaatcactgataagcatctcaaggtacaacctgatgattcatgtgtttttgaagaactattgccgttttctgaaaataagctttttggggccagcatttctcttcagaaagcactagaaattttgttgttatgccgtggttccattctgaaagatgaagtagcgatcagccgcaaagcttctaaaactcctcaaaccatcatgagagagcttgtgtctgttctactggataaaaaaggattgcctacccggttattggagcaactgccaactaggtttggtctctgatcttaaatggagtatgaaatataaataataaatccataataatctaagaaaa

SEQ ID NO: 7264 - DNA, 1471 bp, Oryza sativa
ctattttggctgtgcacattattttgccgattgtgttttgtctaagtaaatattcatggtcgatgatggtatgccactggaggtagcatcccttggatgtggcggccgtggcatacatgcatacgaaattgatttgcagtacttagcagcgacaagaccatccttttatttctgaattgactatgcattatatatgttatttgcatagatggaagaaatgcaacgcattcggcggtccctgattgctaaagcagctggattagttgctgtaatgaatgcttacattctgtttattacaagaagagccatgcgacgtacccctaggatctcctatggcccattgtccgaaagggacatagctagacaatccaatcttagtttcatctatcatacagatgatacaaattacttaaatcagctcagaatgaagagagccccattttttcagttgtgtaacttgttacgagaaagagcgttgttgcgggacagtatacatagctcagtggaagaacaagttgccatgtttcttcttgttgtaggccacaaccacagatttagagctttgcaacccacttttaggaggtcaattgaaactatcagtagatacttcgctgaggtattattctctattggtgagctgcgaaatgagatgataaaaccaccctcatctgagcctcattcaaaaattacatccaatcgaagattcaacccttattttaaggtaaaaatttgtttgcagcgttttgactacaaaatatgttctttcaacaatcatgtcctaatatttctcactggtcattaggattgcattggtgcaatagatggaactcatgtgcttgctcgagttccatcaacaatatctgctgcctttaggggtaggaagaaagagaccacccagaatgtaatggctgcagtggactttgatcttagatttacatacgtacttgttgggtgggaaggatctgcacatgatgccctcatacttgcagatgccttggagagggatgatggtcttagtgtcccctcaggtaatagaagtgttaaaactaacgattaataaggattctcatttatctcatatgattattacactcatagcttttatctcttaggaaaatactatctcgttgatgctggatatgctgctagaccggggttccttccgccatattgtgggtgtcgataccatttgaaggagtatgatagaagaaactaccctcatgattcgagagagttgtttaatctaagacactcctctttaagggtcacgatcgagcgggcatttggcgcactcaaaaaccgcttcagaatactctataacaagcctttccatccatacaagacccaagtcaaattggtccttgcatgctgcatacttcataactggatacttcagtttgggatggatgaccatgtgccactagagagtgattggaactcagatagtgatgatgaggagtccgatgactta

SEQ ID NO: 7265 - DNA, 17521 bp, Oryza sativa
taggggaatggcgcaaattagggatgatttggctggtgctatgtggaacaatagagggtcgtctagggtctgacctgcttagggattaatttgtaactctctatctgtgaacttaggatggggtgcactgttatctattcatgcatgatgattgttgtaccctgttgcactgttatctattaatttgagacctcgagatatttgcaatgatgctgtttattacatctatcgatttatgttaaatttatttgttcatttgcatgtggtaaatataggatggctgaggctggtggcgggaatggtggccatggtggccatggtggacaccatggagccttgcattggacaaccaacatgtctagcttaatgctaaggcgcatggttgagcttatagcaacaggtgttaggactgacaagggtttcaaggaagttcaccttaaccaagttgctagatctttgtctgatcactatggaattgaaattagtagaacccaagtgtataaccatcttcgcaaatggcgtcaaaggtgggtgcgtatcactaggctcaaagaccttagtggggctctttgggatgatcagacctcaacgattatcctagaagaggagcactacatgggacatgtcaaggtttgtgtctaactatcacatacaaaacacactgcattagtacacatcatatctcactttaaatctaatgttctcatataggaacaccctaaggatgctgagtttctcaatgtgcctttagagaactatacacaaatggcaataattttttcaaataggcaagccactgggagatttgctatggggttaaatgaagcacttggaaaccctgctggtgaggctgacagtggtctgggacctcttgatggcactattggggatggtattgctgctggaccaagtggtgtgggtgctgaaggtcctggaattgctgctcgagcaagtggtgttgggcctactggtgaggattctacctcatataagaagaggaagagagcatctgctttgaatgaaggtgaagttgctctcatcagcaacatgacagattcagtgaacaacatggcttcagcaataggcgctactgcacatactgaggttcaccctgatttgtgcaacacagtgatggattttccaggtttcagtgaggatcagttggaccttgttctagcttatctaactaaggagaaggctgaaagccttgtatacattcagaagaatgaggctcgtcgtgctcgttgggttaggaagttcctgaatgagcatcaccctgagagcatctaactatttaactaactattatggagaggtggtactgggacaccatattatgtaatattgcttagatgcagattaaggtggtagtggacaccacatatatgtcttttgtagaatgttggctacctgttgattaaggtggtagtgaacaccagtagctgaatggcttttgtagtgtaaactgcagggtattgcatgacccatgttgaatctctgccttgcttcttcaatgatgattattgccactgatgaatgcttcacgccactgtttgtgctgcatatgaaaggatgcttctgcacttgctttttttatgttgttatggttccaagatgcttctgatgcatatgaagagatgcaattgtgagagatttccaagatgattaagattaatagtgttgatttgtaatgcataataacatatttcctgcacttagttcttttttgttagggtcaagctggaaaatactgcaattgatgattaatagtactaatctgtgatgcataagaacatactatatgcacttgtcattttaccagattgcatatgtataacaatttattactaatataccaattggtttagttttgtataacatcaatgtaattgtatatactcaaagaccaaaatatttgatctgttccttgtatatactcaaagaccaaccaaataaaatagacgtgcatagcaatattttaagcaatttagctcacaaataatagtaagccaaagagcaaataaaattttaacacgacctcatggagtaacctcaccgcacagaagtagacacttgagaaaattttcacaccacaaacttattagggtaacctcaccactcataggagagggtgtttacacccaagatgcatccatccaaccaaacaacatctcctgcatgcaaccattccaccaatcctttgctgcaaccaaccaaacatcatctcaacagatccaggttcatcagatgcgggcaaccaaacagctgcatgtgtatcctctcaaccaggccagactcagcctggatggaagagatgagccaggctaagggaatacgagcaaccaaacgcaccctaaagggatacaacatatcctaatattgtgaatctggatagactctttattcataattgtggtattaggatgtaaattcgtaggaccagaatgtgtcacatctctctaaaatctcttatattatgagacggatgaaatagatagtgcgtacaggcaagcgtttgttacctcctcgagggtcgtttttaggatcttgaaatgtgtcatgaggatcagactcaggttcgagcggaccaactggcagccaaggaagaaccgatcgatcccatatacatgagagagaatagataattggaaacacacatattagagtactcattcgttacggcgttacctggagaagaatggggttccgttttaggatctttacctgggtcctgcaggctatgcattggaccaatcgacgtcttagtaactggaccatgaggaaggagaatgaaagggtgagagctgggtcattaattagctagggaagggatcctctgacatgatgattttctcttgatttcacgtcggaggatccctttccggtcaccagggccacgtcgtggcttggatcatcaaactcatcgagccaaggcgaaagtgctatagctaagagcgtgttaattaattacctggaggaggcttggactcgcagttgggtgatatgggacggaccacggcgcggatcgtcagctctatgcttaacccgggatgttctactagaacgggtgttagtttcagttgacaagctgcaattaatatgccaaacaacagtgttaacagaaaactagcaatacatcatcattcagaacatacaaattaacacagtgcaacaccagccggtaattaatacatacctggagcggccggaggctcgacggccggcggagcagaagcagcagcagcgtcgccgcctgcagaaacgggagtggctgccacgacgctgctgataacgggcgccatcttcctgctactccttttggctgcctagctagctagatgtacgtagtattgtgtactagtgtgtatactagagatgttcgcttctacagttctactatatatggctatttatatatgcgtttcatatatcgatcagattcccatgacagacctcagtcacacctcttatggttattttttttatatgtggttcataaatagatcagattcccgtgacacaccaaacaccgttgaaccgtgaagaagctagaggcgtgcgtctacaccataaattaaaatagagtgaattagatattaggccacatcttattactagacttgcaagttagactaggggtaaaccaatattgtcactttgcgataaaaaaaaattgtcactttgaaataggtagttttgcacaagtttcatattggactggtgtttcctaattctcctctttctttgcttcattaagttgaggccgatgtctattagctcgagcatggtacaccaatgccactaatattgtcccatgctcgagagtgatcagatggcatcagtagtgggctctttgatttagaggaagaggagagggtggtgttaggtgaaacaaatggcaatattatgtggtctaaagtgaaaatcttggctaagacctcgtccaacccgcaacaagggtcaaaatatatggcctaaactgtaatttactcaataaaatatggcatacaccctctgttataaaatatacaaatttagtatgggatatgaatactacgaatttagacgacatcgaaattgagagttagaaaattactggagaaagaaatgtggcataaggttcagaccaaaactcggtggagaaatgaaatggttcgtctgtcaactatcaagtgctttgctcgtaccgccggctagaactctacatttttagataaatgatcacctactgatatatcaactctcacgaacaatgctatagacccccctcatcactaaaggcaaccgcaatgtataagttgaaagttggtattaacgtgaggcctcaagtagaaataactttgtgagacttaacaatatatattgtttggctaagaaaaataaggtggggtcaacccataaaaaatcatcctctaccttctttgaggtattccacgagtgatatgcttcccatgtgcaatcttttttttttcttttttttttctttgttgcttgcttgttgtaggtagtagtgtaaagacctgtaactattactacctcctcgcacaatgtgtactactagataacaaaggtatattaattgtttactacctggtttctaccacgttgtggttgctccaagggctcaaaatctttatctgtaatgggcaagccagtcaattaaaatttttgccggtgatgtggaggcttatctatagtggctcaaaatgatgagctgttagtgatatgaaaaatccaggcaacaaaatggaaaaaaaaaagaatctgctcttcctacccaagattgtcagtatcccgatttgtatcctagtatcttacgatactacgatcctaccaaaccaaaacgatatcgatcccacctagtatcctaattttcataatatctcgatcctactattcattactacacgatcatatgaaatcttaggtgatatcccgattctacgatccctacgatactacaaaatattatttaaaataacatggtttgaaaataattaaataaatatgcttaaatttatataaaactcagttaaatatatcaaaaccaacatgatttctctcgataaatgtctctatttgcataacatatatcattattaatttttttatatagaatggctatatataactaatataaatattaattaaacttaaaaaaaggaaaatcgcatagtatcccgatactacaatacgatattactttgagcaaaacgatattatctagtatcccgatcctgacaaccttgctcccaccgctatcaaagcactcgctcaaagccgctcttgccagctcaagctcggagtggctgtcatcgctatgcccactcgatgtagtcatcgtcgccgcttttccaccgcaccacccctcttcatgccggcttgagctcagagtggtcggatctagggagaaacggtagtaaggcaagacagggtggcagaagagggttggggcctgggggacaccatgtggttgccgagcatgctcaaggagttcaccatggctgcatcagtcaaaggtcaacatcatctctgtggctgtcgccgtttatcatcgagtagctgacgacgatgacgatagcggcaacagaggtgcggtacatgagtgggaggctggcaatggtgtggcttagggggaggatggacaacaccgccaacatgtgagaagtggatccgatgtagcactaccatgtcactgaatgtggagatggggcaggcagaggtggaaaggcggtgaactagtggagcgagcgatagagagggtggtggactaggaggaatgcggcataaaatcactattaagagcatgcctagctatcacattttgtaacagaatgaatgaagttaagttggacaattgatgtgtaattttgttgaatgaatgaagacattgtttaatcaatcaatgagtgaaatatagttttgtttaatgaatgaacggtcactgtatgtggtttgaataatcttagactgaatgtgggtcagcaatgctaatgcttgcgtcatattgttggtctggaattgttatcgtcggcaaaaatatgttggtcggtaaaaataatgtcggccggcaaatctaaacaactagaatatattgagtggtcagttggcaaaaatatgtcaatcaggaaatgtctttgccgactggtactggtcatctacaacaactcataataaagagttgttttaattagaaggttatttgtaacaacacctatttaggacatattacacacaatactccctctatttcacattatgagacgttttagtctttacatctctcatatagatttactaacatccatatgaatttaaacatgtagataaagcacatacatggatctatatgtatgaaactattcaaatcccaaaacgtcctataatttagaacagatgaagtaattatcactaatgggtctaagtccctgtagatacttttgactgttgatttaaatagccattatatatataatcatatgtaacatgttttttttaaccgccacaagtgacacattaaagatgtgagattctgtagaagtatttatatattttatgattactctctattttaatggaagatatgctttcaaatacacgtggttttactagcgactatccttggtcagttcggtcagagttatataccaccgcatctctgcaaagcatatataatttacttgccagttacgaaaattactccaacaacccatcggtaaaaaagtttagggtaaggcttttcaaaagccaacctagaatcatccatgccaacttaaaagtaaggtcctaactaagggcatgttcactttgatgccattttcaaccttaccaagttttggtaaagttaccaaaaaaagtggcgccctaaaccagcaccggggcaaattccaatcagtgagggctagttatttcagtgtggtagagctgtcctcgttgatgagggaccattagatgatattataattttatatttaattaaaaaaatagcataatgtgcattaggctggttggtaggatattctactccagcaatagactatagaatcggagcgcccgcggtaaacattgccgatatagaatattaacaagacggaacagagcgcacaccgttagattatatgttttgggacagccggcctatcaagacttcactacttaaaaattacatatagaggtcagcgctagatgtgtcagaacaactaaaaccagcacccatagtacatttcctatctccacatacaaaaccggcacctttaatatattatttataggtatcagttaattaaaaaccaacacctatgataaggtgccagtttcttttagaaaaccggcatcaatcccaaactgagctgaaccgggcaagccgatcacgtgcccttatccaccactcgttgtccgcctcctctctcttgctctcgccacctcctcctcgtcctcctccccgtatctggcatcggcggcggtggcttttcccgtggcggatacaacggtggcagtgtcagcagcgggtggggcggcgttagcgggttctcccacggcaggtccggcagcggtgaggtctcccacaacagattgggcgttggcggcaggtaggcggcatcgacgggtgttcccacgacgatccggcatcggtggggttcccgcggcggatccggcgtcgccggtgggcgggaggggaaggcggcgggctacaaggcgagagtatgagggggagaaggaggctcaccctcctctccatatggcaacggtggcagaggtggagaaaaatgccggttgcatcgtgttcttgatgttttttatgttaatctttttgatgttcttgatgttttttgtgtttatgtgttctttgatcttgtcaggatgaagtggagctacttgagcattgagccgctttttttttgttcatgtaacctcaaaggtgtcggttcctaaaccgacacctttgagaacatctcagaggtgccaataatgggtgccgttgggaaaactgcactgtcagtttttatccggtaatataccagacagtgctaccaagagcaacactagctgtttagaaaccaatagagttgtcgaatatcactgttggttcatctcataaacctgcaatgatattcatttccagccaaaaaatagattcataacttgatttacatttacatccatttcaaattgcacctcaatttgattggagaaaagaacgaatttgcatacatgcaaatgctccacgtatctacatacttgcatacacacagcaacaacgacaaaacttcacaacttgcagcaatagctttcacaagttgcagtaacaacaaagttttccaacacacaagttgcagtaacagcaaagttttccaacatacttgcagtaacttcaaattccaacttgcaagatttgcttagcaacaagaatctcacaactagttggtttgtgtgttgtatcgacatggcgataacttgttaaatggactctagcaacgatagtctaggctcccttgacatcgcggaatctagggctaccatctttctgatgaaacttaaaaggatttccaaactagttaagcatcattgagtgcctcatgctcaaattaagatgaatcgagtgctcatgctcagactaagatgatagattgatggtagtgtatatggtaagaatgaggaagaatctagttactactcctatatagtaggatagaattagtttatgaaaaatataagcgcacatattatatttattctttaaataagtcacgacattaaatttgtaaactagtagaaccaactcaaatgatctaaacatatatacgagaaagctacacatgaataaatcaaatagaaaacatgaagacgagcatatggatgatatgttgtgtggaggcgatggctcaagaaaatgtacacataaataaattaaacattcaaaacatcaggacgagatctagacatatatataagaaaattacacacgaatacatcaaacatacaaaatatgaagacgagtatacagacaatatgttgtgtgaaggcggtggcttggtactctaaaacgcataaccaaacgagaaaagtcacacctaattttttcggactctatgccaattcatcggagaacccgatgagatttcaaacacaaaattcacacgtatgtcacgtgtgcacgcacgcccctggagcccagccaggcgaagcgaggtgagcatgtacacggatgtttctccagttccctctacaatatatacattgctcaaatggctagaagagtattcactcttttaagaaagtctctcccctataactagctatgtggtactaaagtttcacatgcaactcttttcatgaggttgatctttatgatttttctaagaattattttcttcgagggctaatgcccatactataagtctaacattagtttctttcttttatttagtattgtttggttgatgacttatactttcatcccaacaacccacaagcccatttgcgcagcatatcgtccactattccacttaattagtgcaatttgcatttgcaatctcatttgtatccgtttcacacttgcacttgcaaacagaacgctcattggacagcgttggacagagatagatgattgcctccagatccagatcactcgatttataacgttgttttgttttgtttatgggtttagataccaggctgacagtctcacaccgagagctgctaccttgaccgctaatcatgttcacagattcattgctcaaagaggatgaaggcatgtgttcatatttggtcctattcttcggtcaagttctttgctccgggtttggtcaaaataactcatcatgcattcctacagatggatagatttctcagtctgtactgaagtgtgaataatttaagccaaaaatgcaggttcagaataatgtagtcgtccgtacatatagtttgctgtgagaatcttttaccagttcttggtatattgtaccccctcgttcttggaggaaacttttaatttggattgtgtttcaaatcagtaaaataaaaggatgcagctttctctctaaaagaaaaaagaataatgtactcatacgtacatagtttgctgtaagaatcagaaaaaccctctttgcctatggccaattaatgctggataaatcacatatctattttgggtgtgtttagttcacatcaaaattaaaagtttgattgaaattgaaacgatgtgatgaaaaagttggaagtttgaaaaaaaaaagttgggaactaaaccaggcctttctcagtctatactgaaatgtgagtttaagccaaatgcaggttcagaataatgaagttagtacatagtttgctgcgagagtaaggtacacatgaattcgttaccttaacacacactaaaaagaacaagtattaacggcagttccttgatctcactaaatttctgttaaaaacacacacgcgtgtaatatttgtggtactaatatttgaatcctactggagtccaccacacttatggtgcttgcatcaattccaatgtccaaaactaatattgttcgactaaaaccagttcattttgcggtatgtatttgctaattgtttgtttgattggattttctagaaaacttattcgttggtatacaacttttagaagacatacgtgaatgtagaattgtgaataatataggagtaattgctgacagcttcccaggagtgagagataaattcagctgaggactatataggctgaattctcgattgcccatgacagtatatacacatagcaactggcaactattctagttgcaaatgaaataactagtgagaacgccctcccaagcccccaacatcatactgaaaaacaaccactggtaggtacaaatattcaaatgtggttgaattgcattgcaaaaaacgtgtattcatggatcatacaagttcccaccgtgtcatggattagatcgaccagatgcctggtaccatagagagtatttatgtagcgtagtactcctattacaaagcaagttttcatcaactatagaagcttagccacacagaactaaatggcatgtttgggcgtcttgtcctcaggcattgtttggctttgcctatccattatctttatgattctaccaatagccatcagtgatgaacatgaaaatgatcgtcaagctctcctatgcttcaagtcccagctctcaggtccaccgggagtactagcctcatggagcaatgcgtcccaggagttctgcaattggcatggtgtcacttgcagcacaccatctccccgtcgtgtcactgcaatagacttggcatcagaaggcatctctggctccatatcaccttgcattgccaacctcacctctcttacaatgttgcaactatcaaacaatagcttcaatggcagcataccttcagtgctcggtctactcggacaactcaacaacctcaacctcagcatgaactctctagaaggtaacatcccttctgaactttcttcatgttcccaacttgaaatcttagatttgtcgaacaatttcatccaaggtgaaatcccagctagcctaagtcaatgcaatcgtcttaaaaagattcacctcagcaagaacaagctccaggggaggatcccttatgcttttgggaaccttcctaagcttgaaaaagttgttcttgctagcaatagactcaccggcgacataccagcgtctttaggaagcagcctttcgctcacatatgttaatctcgagagcaatgctctcacagggagcataccacagtccttactgaatagttcatccctcaaagtacttgtcctcacgagaaatacccttactggagaaatcccaaagcctttgttcacctcctcaactcttactgatatttaccttgatgagaataactttgttggttctataccacatgttactgccacccctctccctttacagtatctatatttagggggtaacaaactatcaggaacaataccttcctcattaggaaatctttcctccctacttgatctaagtctcacacggaacaatttaaccggtagcataccagatagtttaggccatattccaacactagaactgttgaatttgaatgtaaacaaattaactgggcatgttccatcatccatcttcaacttgtcatccctgaaaagtctagccatggcaaataactcactcacaggggaattaccatcaaacttaggttatacactcccaaatattaaaacattaattctgtccaataataggttcaaaggcccaatcccacctactcttgtcaatgcttccaatctgaaatcgctgtacttgcgcaataatagccttactgggctcattcctttctttggatcattgctaaatttggaggaagttatgttgtcatacaacaagctggaagcagctgactggagttttatttcatcactatcgaattgctccaaattgacaaaactattgatagatgggaacaatctcaaaggtaaactgcctcgttccattggcaatctttccagtagtctcaaatggttgtggctaagagacaacaaaatttctgggcatataccaccagagttgggaaatctaaagggcttggaaatgttgtacatggattacaatcttttgacaggaaacatacccccggcaattggaaatttgaacaacttggtcgttctagccatggcccaaaacaacctgtcaggacaaatccctgatacaattggcaaccttgttaagctaaccgatctgaagttagataggaattactttagtggaggcataccagcaactctagagcattgtactcaactggcaatactcaaccttgcccataactcactagatggaagaataccaaatcagatcttcaaaattttgtcacttcccaagagttggacctgtcacacaattacttgttcggaggaataccagaggaagttggaaatctcattaatctgaaaaaccttagcatctcaaacaacaggttgtctggcaacatcccatcctctcttggcaagtgtgttgctctggagtctcttgagatgcaaagcaacttattagtaggaagcataccaaaatcttttgagaagttggtaggcatctggaatatggatatttcacagaacaacttgactggaaaaataccagattttctttcaaacttcagtttactatatgatctgaatttatcattcaacaattttgaaggagaagttccagcaggtggtatttttcgtaatgctagtgtggtatcaatagaagggaataatggcttgtgtgcaagaacatcaatgggaggtataccactttgctcagtacaggttcacaggaataggagacacaagtctttggttctagtcctaatgatagtaataccaattgtttctatcactatcattctattaagttttgctgcatttttttggaggaagagaatgcaggttactccaaaattgccacaatgtaatgagcatgtgtttaagaatattacatatgaaaacattgccaaggccacaaataagttttcttcagataacttaattggatcaggatcatttgcaatggtttataagggtaatttggagcttcaggaagatgaagttgccatcaagatttttaatcttggtacatatggagcacacagaggtttcattgcagagtgtgaaaccctaagaaatgtccgccatcgaaatcttgtgaaaatcatcactttatgttcttcagtggatgccactggggcagacttcaaggctttggtgttccaatacatgcagaacgggaacttagacacgtggctacatccaaagtcccaagaacttagccaaggaaaggttctaactattagccaaagagttaatattgccttggatgtggcgtttgctttagattatcttcataaccaatgtgcaacgccactaatacattgtgacttgaagccaagcaatattcttttggatcttgatatggttgcatatgtcagtgactttggcctagcaagatttgtgtacaatagattgactgcacatgaagatacctcaacaagtttggcttgcctaaaagggtcaattggatacatcccaccaggtaaataggcttccaaacttttgactcagtttgttctttatatacttgtacagaaattttaaaaaatagagcctagccttatagttttataaaatttaatgcagagtacggcatgaggaaagatatctcaaccaagggtgatgtctacagttttggaatacttttgttagaaattataattgggagcaggccaactgatgaaaaatttaatggcagcacaaccctgcatgaatttgttcatggagcatttcccaataatatctacgaggtagttgatccaaccatgctacaaaatgaccttgttgcaaccgatgtgatggagaattgtatcattccattggtcaaaataggcctatgttgttctgtgccactgcccaacgaacgaccagaaatgggacaagttgcaaccatgattcttgaaatcaagcacgcggcctcaaacaggcatgtcagattaagctaacagctgccaggttctatttcatttatagaagaatataccaatataacatccactggatatttcactgtaaacgtagtatagttaatgacctcattagaagcttgaatggtagccacaatgcttgcacaggcatccctagtttttgaatgttgaaaccttttatggtttatattgtgcgacttacttgttcatcctctaatcactatgaagaaacatcgaattatgagtctttgagattggctcccttccatttttgccatctccggtggctaccggacgctgccgtggtgtatgaaaaacagcatacgcaaaatggtagctagtgttctacttgaatgacactggttgtgtttcagctacctttccatttttcatttgcattctgtatgtttagcgacatgcatgtttctcaatccaccgaaatttacttatcgtggcattagcatttcgtgtcgtttcttttgatataggatgataattcataataaaatgtaaagcagcataaaacatttgtagcctggttaaggacttgaagtaaaagagtagtagagacgtagagcggtaagcatatagaatgtcatgctgtaaacttactccacttctatagatggtttaggtagccaggtaggcaccgttcctgccaagttcttcaaaagcaagggttgaataactatgagcaccaatcaaattgtaaggaactcgaccgatttgcatagccctcgcccaacgggatacatcaagtaagaccgtcaaaatcgattaggtattttggcaaccaatttcgttgggaactaattagtctccgatcaaagccaaattataggtgtttgcagaagctggatttgggtcagattccaaaaccccaagttcaaacatgaccccaacacgaaattagcccaatgaaaggcatagattggagaccggatatatacagatcaatctcacaccgacctaattagcagaaaatcagatgatagatcaagcagataggcattcataggactggatagggggagcacctgctggctgcttgcctgctcgtgttcctgctaggctgctactctcggagtcccagctgccggcgccgctcactccagagtcccgagcggcggcgccgcccgtttcggtttcccttgcggactcgccgtcacctgcatagggcgccgccgccgccgtcggctgttgtcgtgggagcccgtcgctaggctacctctggttgtggttgggccatgaatcttgggctatcgttaccatgggaaaacggggagttgggccaggtgtctcgtggacctctcttggcccaagtcagctgtcggtatagaggtcggtcttcaaattcttaaccctgaaggaattcatttcaaaacttgtagccaagtaaaaatattcttctttttttctttcttgaaatatttttaacagaaatactatatgacaggaacctaactatgggacggcatacttaatgatccctacccgatgcgctatccgcttacaccatacattcgtggccctcctcctccttggctccttgcgatctctccatcatcctttttctcttccacctcgcttgtacatgtcgagaatggctcactgctcctcctcctcgttgtcgactcttgctcatcctcctactcaccactctctgttgttgctccatgcccctgctagcctgctcccgtcatacctggtatctaggtacaaacatgacatggcaggctgtggcttgctggttttggttgagaatctgagggcagtggtacaagcagttgcaccgctgtatgggcacggagatggcagtggcagcgctcgaggtttcgatggccgtgggggcgcgatatggtgttcttcctgtgatggggatgtacaaggatcctcttgcccttcctttttcttgatagatctaacggagcaagaggtcaaaatgatcaaatctagagcatcgattgcctcactcgcgttatgtgcagatacatcgtgcggctcatcatcctcggctagcacccgcaattataagccttaggagctgtttagttcacatactaaggtgtgtttagttcacactaaaattgaaagttttgttgaaattggaatgatgtgatggaaaagttggaagtttgtgtatatatgaaagttttgatgtgatggaaaagttgaaagtttggaactaaactcggcctatattgcctaggttagccatactttctttgtcaaacttgtcaaatgcgaggctatcaaaatccaagccacactttagccaacaaaattaaatcatgccacaccttttagagtcactaacatctaagaccaatattataaaagagaaatcttgccacacttatggaagccaaccaaacacctatctaacatggtcaaacttacttaaccacaaatatggcaacttattggcatcaaccaaacagccccttagtaccccagtacccagtacctagctaggtacgaggtaccaagctgctgggagaagcagtgcgctgtcgttgcctagccaaccgacaagctacctgccaccggtggggaatttaactatttgccacttttaggtttgccaattatccaaatgcccctcttaggtttgcacttaataatttgtcaccggagagagataattttttaactatttgccacttttgcctacgtggcgtgccaccgtaccgtgccagcgtgaaaagcaacgtggaccccaccatcagtccctctcctctccttcttatctacctccgatcgtcgccgtgacctcccgccggccccgcgttggccccacaccgtcgtcccctgccggctgcagcggcagcgcgtcgttcggccgtagcaaccacgcgaggtagaaggtccacgaggaggacggcgaaggcggtgaacttcttgcaggtctcgcggtagtgcctctccgcctgtgactcgtacgctggtggcagtggtggcgtccgatgtcccgggcggcgacgacgcctggtggtggtgtcggtgctcg

SEQ ID NO: 7266 - DNA, 3995 bp, Oryza sativa
ctagttaacaccgttaagtgtaaaaactaacggaagtgctacatagggaagaaaaattttagaagtgcctagataggaaacttttgaagtttaggtgctatagagggaagaacaattttttttatgctagatagggaattttttcaaaaatcaacttctatcactctacctactccagcatataaaacgataagttttatccttaaataccttttacctacctattacttttactactttttctaataatgaggagtattttcatcatttttacttcccactattttcttcttggaagtctaggagttgatattttgtgggatggagggagtactgtacgggtgacaagtgacaaacagttcgaaagtttccaaagtttaatattggactccgctacactgctgtacccaggttacaagaaggtagtacaaaattaacgtagaatattattccctatgtttcgaaaagaacccaattctgaatttaaatttggagtttttttttaaaaaagaatttaaatatggacatatagtctgtttagtagagctccaactcctaaatttagcttcagaagttgggtttggagtgaagttgtggagcagcttaaactgttccacctctgtagtttattttgtgagagcgtttcacctagcttcgctcttattttggatagagctaaaactgtttagctgagttctagctcctggacaggtggaggcgtggagcgggagttagagctatgccaaacaggctcgtagtgtatattcaaatataaactcagtattatatttttttacgggcaattgtaaatttaccaatgctttgaattgttattttaaaactgccactagaaaattacaaaaataccactggaactatcattcgagtgtcatccttgcaaaattgaaaaaactagttgcaaatttgcaaatgcctcattttttttaagacagtgggagtactcttgagctattacaattaaaggctagcgaccgttgatctgataaaaactttactgaattattgattatgtctcttggtgaacatgcttaccaagggaaatgtttcgccagcaaacacgtaccaagcaaagaaaatcgtacgcccattggaagtagaagtggaaaagatgcatgcgtgtccagtgatcacatcttaggccattcattgtgggcctccgtggtatccagcctcaccagcaaaaggagaatattcgctgccacgtactcaatctacatagcattctcaagttcgcgtagctaaagttggctacgggttcctcgtcaggtttgaaggagggacccatgcttgacctccgcgctatcagcgaaaggaaagagaggaaagagacctcgtcagcatccccgcactccacgccgctgagctcgctactccgctcgggagaggccgctcgacgccgaaccggactaccccattctacgctgcagcagctgccagaggaggagggggaaagcgcggcggaggagatgagaaggggacagggaggcgtcagagaagtggaggcgctcaaggtcgaggccgacgtcgattcagagtcggcgccgtcgccgctagggctggctagcacctgtgtcgcgtgccgtcaccgctagggctgcgcccagcactggcatcgtgcgccgtcgctcggagctacctccgcccgccgcaactgcgtcgcctcgttgccgtgcccattctgcgccgccgcttgtcgtggtcccccgccactagatcctgccgccccgccgctcagcgttgctcgagggagagaggaggggtggtgtgccgagccgccccgctactaggggtgggcagaataagaccgaaccgaagaaccgagaccgaaaagaccgagaccgaaaaattcattctcaactattgaaagaccgaaatatattcggtttattcggtcatgggcctcaattaaccgaattgaccgaaataacctaattaggcccaacagatctagttggcccaataagcccactaataagaaaccctaggggcaggtgtgtcacaagcattgacgcatcgtttcatccccatccatcgtggagcggtgttgtcccaactcccgtctccatcccatccacatcctccttcgctccatcgccgggcgcagcttccgcctccagccggcgcgccgcctccaccgccgggcgtcgcctccagccggcgcgccttcgcctccaccgcctggcgccacctccagctggcccggcgccgcctccactaattgttgatttgctttgcttttgctgtttttacagatagttttgttgatttgctttgtttttgctgtttttaaggttagttcggtctatgaccgagaccgaactgaactaaccgaagaccgatttgctcggtcctgagatttgttggagaccgatcggtcttgagattataaagaccgaattttcaaaaagaccgatgtaccgaaccgaatttttcggttagaccgaatgcccacccctaccggctgcttcgagccgctccgctgccgattgggctgctcggtgccggcgtcgtgtcggttctgcccgactctctgcggtggggaaaggaagagacgggataggggaaagtgtaaagtgaaaaggtggtattggtgggacccactatacgctacttgtgtattgtggtctcgtggagtttgcactgtgtaacatgtggctaatattgtttttggtctagttgacataggaggtccaccaaaatttggggacgcactctgaacgaccataaaccgcaaagagtacgatgtcttaagtcagttgcctggtatgtaaaatagtaaaaagctaaaagctaaataataaaagtgactaagcctctcatcgtttcttctatggctaattaataagctacgaaaaaaatgaccgaagcataaaaacataatatatgattagacttttcttatacatgttctttccgatttaaaaatcaatgttggaaaatacaccgcgatgaatagctttaaaataagctctaaaaattagattcaaaactcaaattaaatttcgttgcaactgataagccaacaaccaaagtaaaataagtttcaaaattcaaaattagctagtatgccttataaaaagcctgaaagaggaatacaagaaagctgcaaggctcgatcaatctctcatggatagagacacataacaaattatcaatcttgcctccggcgccggtgatgcgtatggcttctcgatctcggctgtggtgacatcgtcgtcgcgttcacctcatgggtgttcccacagatcgatgtctcatgttaagagcttggattgacctcgcggagcaactgggagccaaataaggacaggccgtacatgagtagaaataaacaattaatataacacatcgtacattcatattcccttcgtcttaaaatatacgtaagggactttaagggtctgtttggttgccctcaccaaggttggcccgcaccagtccatgcaaattcctgatgtttggttgcctgcttgggcctcccagcctgtccacgcgaatgcaaaaaaaagcccctcagccaggcccgacagaaacggccgattcccacttcgctgctcggcctggctcgactgatgtacaccgctgcacccgcgcctgcacccgcgcgtgcaactcacggaggatggggtcactgttgcttcccagaatcgctccctccccgcctcacttctccctctcgcgaaaaaactagggtttaccctagctctgacgacggcgaggcgcggcgcggcactgctctcgtcgtcactccggtcgcgagcggcggccctctcctccgactccggctcttctccatcagttcctcccccggcgtcggtcatcctccctctcgtttgccggctctctccgtcgtgcccccctgttccaccatcactctccgttgagcaccagggtaagttcatggatggttgttcgtcgcccattgcaaggttgggcatcctcttccctgtccgtccttccccagttttttctcc

SEQ ID NO: 7267 - DNA, 23006 bp, Oryza sativa
ttcttttgatttaatgtaacacggtaaatataacatgccgatccactcttttgaaaaaaataataattaccctcttgtggtttcacttgtcattaattaacttaagtaattaataaccaatatcatgtacaggcaagtctggaaactaaagaggacagaaccgtcttttctcctgctagttaacactgttaagtgcaaaaactaacggaagtgctacataggctacacagggaaggaaaattttagaaatgtcttgggaacttttgaagtttaggtgttatagagggaagagcaacttttttttttttgctagatagggaattttctcttgattttttgtgagataaaatttaaacttcagaaattaagttttttgggatcgagggagtacgtacgtgtagctttacatcaggcaacatcaggttcattatgaatgttttcaggtggatctgaagcgtatccgacattgtctatcattccattgaaattgttgtcttcagccgtaccatctaatacggatgtgtttaattctttgggtgtaaagttttggaagtatacggatatatatttgaattactaaactgtagactaataacaaaataaattataaattccgcctgtaaactgcgatacgaatttattaagtctaattaatccgtcattagcaattgtttactgtagcatcacattgtcaaatcatagcataattaggctcaaaagattcgtctcgcaatttatatataaactgtgtaattgatttttttccccacatttaataccctatacatgtgtctaaatatttgatgtgatgttcttggcaaaatatttaaatctaaacatacatcaatattctcctcttcttcatgctcagtccaactaacgaattctcgttaggcataaaaccccttaaaattaacggactgtagatcaatcttttgttatggaactgtaccgattctgattcctacggtccaatgagagacgatcttctttcatgcttggaattaatttggaacgttgatcatctaacgctccatgataaaagatccatggaaggacaacaaatgcattccacgctctcttgttcgaaccacgtatattcagctccgattcatttgatctgctgcctgcatacaaagcgttaaaaagaccatccaaaatcaaatggatttgaaaccggcggctcacacagaaatgaaccgacggtaatctgacggttccgataggaagttttgtggtagttagtaaaaatataaagtcttatcttaatatgggcctgtttagttcgcaaaatgaaaatttttgggtgtcacatcggacgtttgaccgaatatcggaaagagtttttggacacgaatgaaaaaataatttcataacttacttggaaaccgcgagacgaatctttttagcctaattaatccaccattagcacatgtaggttactgtagcacttatgactaatcatggactaattagactcaaaatattcgtctcgcgatttcctccctaactgtgcaattagttttccttttaatctatatttaatatttcatgcatgtgtccaaagattcgatgtgatgttttttggaaaaactttttggaactaaaccgggccaatatttctcgctgcttcaacgttatgagttaaatgctcccataacctcgagtatttttatttatgttttcttgactcagtagtcgtattcttattggggcatagatcggagatgtaaatcatttctattattaaaaaatgagttaaatgagaatgctccttttttaacaaaggaagtttacagtatttttttaaaaaaatattttaattcttgtgcaatacattcatctaaaaatccttcgttccaaagaggccaactttgagagagagaaaaaaatcagaaccacacaggaaataaattaaatcacatagtgaggaggactgagttttgttacaatgttaaataaataaaaataaaaataattgtattggagttgcaaacaagaagattttcactttggctagtcttcttaacatgaattgtgcgcagagtttgacacttgatgactgaggaaattcgagaatcgagaccgacagagctgatttgggcctagataggtccacgaaccacgatggcccaaattatagcccaaccatacccagaagagggagccagcgcacaagcctagatagacccgagccgaggaaatcagccagctcgcgcggcagccgacgcgcgacgacggcggcgccccggcgagcgcgcgcgcagcacacacggcggtcgcaggccatcccatcaccgaggctggcatcagcggcggcgcgcgctcgcggcccggtgctgatctcttgcggcgaccgatgttttggttcgctggcgcgcgagctgcggcgccgaggcatggcggctggtgtggtgtgattggccggcggccggggacgccctattgcggggcacgctgccggagatacggcgaggtccatgtggcgcggcgcggtagctagggttccgagagtagccgggacacaaaggcagctatgatatgaggtgcgccccctttggccctaacctttgcaatttgtgcctatctgtctgctttgatctatcatcttgtttggtgcgaatcaggcggtgtgagattgatgcgtgcgtccgtctctactcttatttgcccttgattgtgctaattttgtactattgggttcatgtccaaacttgaggttttgcaatctgacacaaatctagctttgacgattgcctagcttcgatcggaatactagtgcaaattagttgaggtcctaccatttaattggtcctaccatagatgtattcaacttcttttggaagaacttgacatgaccgctgcctaaaactttaatagatgtacaagatgcaaatgaaaatggaaaaggtagtagctctgtataaccattgtcatttaaatacaacactagctaccatcctgctgatgctttatttcatacaccatgtatgcttgagaatatatgcttgatcttaaggatttcggcagaaacttgccccatttcccatcggtccttaggagatgcagcagagcagcatagacctattctgaccaatggaatgatgcaattctgcatcactgttgttatgttcatttcaccttgtagcatcctgggatcaacaatctcataggtattcttgggaaaagctcttgcaacatgttcatgaaggcttgtaccattattgattttttcatcagtaggactactccctgttatcatttccaataaaatcacaccgaagctgtagacatcacccttggttgatatcacttcactcatgccatactctgcatttaatttatgaatgtaataaattagatattttatatgtcctgtctccacaattctatgaagaacaaaaagagttggccattatgaatatggttatctcacctggtgggatgtatcctatagatccctttaggcaagccaaagattttgaacttccttcatatgcatttgaggtattgtttagacatcttgctaggccaaagtcactgacataagcaatcatgtcaaggtccaaaaggatattgcttggcttcaagtcacaatgtactagcggagatgcacattggttatgcagatagtccaaagcaaatgctacatccaaggctatattgattctttggttaaaagtcagagttttcctctcactgtgttcatgagcccttggatgtagccaagtgtccaagttcccgttggccatatattggaacacaagggctttgaagtctgccccattggaatccactgaagagcacagagtgatgatttttacaagatttcgatggcgaatgtttcttagagcttcacactccacactaaagctcctttggcccccataaattccaaggttaaatactttgatggcaacctcatcttgctgacggtctagattacctttgtaaaccgtcccaaacgatcctgtgccaattaaattggcagaactgaacctatctgtagcctttacaatgtcttgatatgttatgtttttcacatggtcattaatttgttggcaatgtgggtttgcttgcatctccttcattccataaattctcacaacataggatagaatgattataacagcaatgatagctggtatcagtatctctaggactagaaccaagatcttgagtttccttttcctctcagccaaaacagaacaagaaggaataccaacttttggaacgcttgtacacaaatgattatttccttcaattgatactgcattgtcaatgtcgaaaacgccacccgttggaatgactccatcaaaattgttgaaggataaattgaggtcatgtagggaactcagcaagttgaggaactgtgggattttcccagacaaattattccgagatatatccatctcttttatacttactaatttcataaaagattgcggaatacctcctacaaagaagttgctttgtatctcaagatactccagagtcacacactggccaagggaggatgggatctctccagacaacatgttgtttgagattccaagtttgttcaaattaatgagatttccaacttcgtctggcattcctccagtcaagtaattgtgtgacaagttcatctcttgagaaagcgaagtaattttgaatattatacttggtatattcccatctaatgagttgtgagcaaggttgagtatctggagttgagtacattgccctatacttgaaggtattcttccactgaagttgttcccatccaattttatatctgtcaactgaactaggttgccaaaaacgtcagggatatggcctgagagcttattttgtgcaaatgatagaacagttaagttgttcagatttccaattgtttgtggtatagtaccagtgaaaagattgtaatccataaacaatatactgagactctttagattacctatttctggcggtatcggtccatagattttgttatttcttagccataatccctcaagattgctagaaagattgccgattgaacttggcaaaattccttggaagctgttcccatctaacatcagttgagtcaatttagagcaattcgagagtgatgtcataaagctccaatcgcccggttctagcatgttgtatgacacatcaagttcttccaaattcggtaatgatccaaagaatggcacgagtccagtgaaactgttattacctaggtagagcatctctaggtggtaggcattgagaagtgaagctggaattgggccaacaaacttgtttgccgggaggatcaagccctgaatttttgtaagtgtgtagccaatatcagagggtaatcttcccacgagcgagttgtttcccatagcaagaaatgtcagggatgaaatgttgaagagagatggtggaactagaccagacaagttgttcacactcatggtcagtatctctagtgttcggatatgacctaagctctctggaatgctaccaactaaattgttcttagaaaggcgaagttcaagtagggaagaaaggttacctagtgagggcggtattgttcctgagatgcaattgtcccttaaggaaatatatttaatgggggaggacatggccgcaatagcgggtatagaaccaacaaagctgttttgttgtaggaaaatggcggtaagtgatgaagtattgaatagagactttgggacttctccactaagattattgctcatgagcctaagtacttggagagatgagctgtttgccaaggactctggtatgcttcctgtgatatcattattcccaagatcaacatatctgagagaaaagctgctgcctagagatggtggtatttcatctgtgagcctgttgctagtgaggaccagtgcttgcagcttagaaagattcccaaaagcagaggagattctaccttgcaaattgtttctgctgagattaatatcctgaagatgtatgcatttgcctaggctagctgggattgcaccttggaaggaattgcttgacaaatctaggatttcaatttgggaatatgaagaaagttgagatggaatgttaccttctaaagagttcatgctgaggttgaggttcctgagttttctcaggaggccaagcttgggtggtatgctgccatggaggctgttgtttgacagttgaagtgtcataagagaggtcaggttggcaatgcaaggtgatatggtgcccgtgatgccttctgatgagagatctattgcaatgacccggggaggacttcgtgagctgcaggtgactccatcccagttgcagaaattcaaggatgtgttgctccatgaggatagaactctagatggaccagagagctgagacttgaagcaaaggagagcctgtctatcgtcagtttcattgcagatggctaacgatatgctgcaaaagatgaagtgacaaagaacccatgcgatgtttggagacaggacactcgaagaggccattgctgttaattccaactatcaacaagagaccttctccgcaaatggctgatcaaatgttttgttggtagtccaagatatagtggcaaggaacaaggaagatgcacaaccagatttgctacctggtgtttgttcaaaacagaaaacctctatccaacactgtcagcaaagcaccttgtaattgagttgcttggaaagggtctagaaaactggaaagtgaaatgtggcatgcaatggaattactagactggtcgttcttggtaggccttttggcactcacacaatcccccatttagttattctgaaactacaagctgatgcccaagatttttgactcttcaggttgccacttaccttcctacatctgctagcctcctagtcctaaagaaaaactaaccccgactagctatgattctcgaatactggtgccatgtgaacgcacaccttattcctgaagagaaatatcgatagatgtgattcttcttgagttcccagggaatataatggatctctgatgatctatctgtctagccaacaaagaaataacctttacaatggctatatattctggagacattgggtagctgaactgaacagccttgtgccttgccggactagctacaacgaatggcattcgccgacagctccgccgcctccgctttcccggcgtccgcttcagccggcgatcctccagctgcaccggtggccgttccaggcggcaaccttccagctgctccggtcgtcaatcctcctgctgcaaagtctccagcagccgctccaggtaaagctaagctactgccccacacaaattgcttccatattttctctctgtatacacatattcattattctcttggtgtttttgttattgatttgtgatatgattaatattggtttggcacttaacggtgatgtgctgcagatccgccgatggatccgagtgacgagggtcgttacttccctacacaccggcttcctgagtatctgaagaatcatccctgagagactacagggacgtgctgggagaaccgtcctccattaccagaagattgtcgagtcgtcgtcaagctgcaagcattgctaactgctagagcagttacctacctactggatactgcgttacatctacgtgtaccgcaggatagattgtaatgttgttttcagatactccggatactgtgaccagtgaataaatcccaggcattagcccggtttctgctagggtttgtgcaattgtagacaacagtcttgtacaataaagcacagcaggaaggctgccaaaatataatatgtacatggttcattgtccatcagtctttgttattgagtgtttttgttgtcttggacgtgattttttcaggcttcagctagctctgagccgctgatgtgcggctgcccgcgcgccaaccctatacgtatataactatatacttatacgtataaaatctaaacgtattagcatacatataaattttatatgtatatacatatacgtgtgtatatatatatatatatatatatatatatatatatatatatatatatatatatatatatatatataggacactcatatggggcaccatggtgcccgggcaccatggtatcaaatacacaaaatcactcaaatttttcaaaattttcaaattgtgagtatatacctagttataataactcgattcatacctatacctatcaacaaaacaactcaaatttaactttatttcacaatccatgattacatacctaactaattatatgtatggatgctatatacctagaatcaaaatctaacaaaaacaagttcaaattcagttcaaacttgctttgaactagttagtaaagtagctaatgttaatatctaagtaattgaaaaagtttcatactcatttgaattaggtatatacttaatttcaacaatggtgcccgggcaccatggagcaccaaacaaatttactatatatatatatatatatatatatatatatatatatatatatatataaagatacatgtactgtataaatgttttggtacaaacataaactttgtataaatacggctaaagggaaaaaagcctgctaaaaaagaaaaacaaaatgcccaatttggcctgtgaaaataaattgggtcggcccgcttaaaaaacaaaagccatccatggaaaaaaaaaaaccaaaaatggaaaaggctaaatcccataggccgaaagaggaatgggccaactgaccgcgtggatcagatcgcgcttcatcagccgctgattgcaacaaatctactttgaatccctcaaataaaggtctaatctaattcgtatctctcaaccgcaaaaccaaatatctcgaacctccacctattaaaaccggtgtaaactgacgggacaggtggcagtgacgacctcggtctcctcctcatggatgctcacgacagtgggctccggtgccgcttgccaccggatgccacagcgctcgccatggatgaagctgcagcctcgtcgcccttaaccggctagccgacgagggagacccacccgtcctcaatctccttctagaggaggattgtggtgacgggctccggtgccgcatacttcttcatccctatttctttctcctccactcttctttcccttctccatcatctcttcacctacatctccccctggtatggcattcatctcctcacataagtggcgccgcacgatggagactgcgtccaccttcgtaatgcctcctgcctcctagccccctcgagctccttcatcactgttgtcctactgtcacccgcctttgttctcttctcgaactcctgccgccttgccaccgctgagatacgggggcaatacaacttcctcaagctcctccgtcactgtcgccttctcctcaacctcccgtcgccatggcaccatgccacccactcttgctgctgctgaatccataagattagggacgaaggagagagagagagtggggagaaagaaagggagagaggatgatatgtgggacctatatgccgactcagccggttagcaaaaccaccgagatagtaattttgtactggttttaatagttgggatttaagatttctggtattatggttaaaggatactaattagattgacgtacgagggagtcacgtggaattactccactgctgattagcgtttcgcctgaggtagtaaggttgggctgggcacttcagagctgagaatatgacaccgggccttcactgctgcacagcttacgtgggcctagagaggtccacgagatacgggcccaaccactagagcgcaccgcacgcaagcccggatagagcccaccgaggaagtcagccagctagagcggcagccggcgacggcggcgcctcagcgagcacggagcccacggcggcagcaggccatcccctcaccgtgggctggcacacagcagtggcgcacgctcgtcgccggtgctgctctctgcggcgaccaatgcttgctctgctggggcgagcgccggtgaggacatggcggctggtgtagtaggccggcggggatgccctctatgccggcgacagcgaggcccatgcgagtatgtggcggccgcgctcgagagggagcggcgcggcagctaggaggtgcgcccctatcctatcctatgaatgtttgatctataatctaattttgtgcgatttacccggtgtgagattgatctggatgcctccgtctccaatcttatttaccttccattgggctaattttgttcatgcccgaggttttgcaatctgacccaaaactaagcttctgcaaataccaaattggacttgatccgagagtagttgtgcaaatcggttgaggtcttaccatttgcttgatgctcatggaaatactcaacttttttagtttttgatgaagaacttggctggagcgctacctaaagttttaatagatgtacaagaataaccataaattagcaataaaaaaaacttccccaacgcccgcgtcgctcgccccagggcgacacaagcggcgacaccgcgcacgccgccacaaacttctcctcctcccctccgcctcgccgccgcccgagcagctgccggcaaagccgcgcggcggcaaggacggcggcggcggggccttctccctctctcgagaagcgcggccggggcaccggcgggacccgagcgaagcggacggcggcgacagtgtccggcgccatctgggccggatgcggcggatccggctccgccggaggtggatttggccttatcgcggccagatcgggaggggcgtgccgctcctgacaggaggcggcgaccgcgaccgttggtggggggggggggggacgacagatccggccactctggcggcggatccagtccccctggatggctgcggccggcgggcggaggtggccgacgccgaggaggtttgcggcggaaggcagtggcgacggcgaccgacggagtcgagagggcggcgacagcagccgacggagacattctctaattatagattaattaggcttaaaaaatttgtctcgtgaattagcttttatttatgtaattagttttgtaagtagtctatatttaatactctaaattagtgtctaaagacagggactaaagttaagtccctggatctaaacaccacctcaatctcaccgaatttatttctgcgacgatgacgacgcgttgctgctgcggccgattctccgcgacgtgcgctgctgctccttccccggcggcgtcgacgacgaggccaatcagatcgatactccgatccgaaaaatcacaccggtggatgtgtgattagtagatcgatctccaatgctctgatagcacttgttatgaaaatagatgcacaatggagacacaaattttacgtggaaaacccttacgggaaaaaccacgggcgccgatcactataaaggaattggatacaaatgcaagggatacattgggctatcgcaccctctctgtgcggcttacaaaggatatatatataggagaaatctaggagtcctaatagaaaactaatcctataaagtagagtcctgttagataactaatccgaatatattgtgggcccaaaatttgaatcacatatttaacaattggtttgtgatataccccctccatctatttttgatagtcatatttccaaatctggaaaatttatttttgataggtatatttcaattcaacaacctataatcttaatgactttctcggatttaatacatgacccttcattcttccacacttgattggttatatggacattgagaaatgtaaatattaatgaatcacttgattacgagaaatgactagtaacatgtttaaatggatgataagtagaattacttatccttggtctatgtgccaagatgaaatatgactataaaaaaaatagatggaaggagtaattaatattggtttggcatttaacggtgatgtgctgcagatccaccaatggatccgagcgacgaggatcgttacttccctacacaccggcttcctgagtatctgaagaatcatccctgagagactacagggacgtgctgggagaaccgtcctccattaccagaagattgttgagtcgtcgtcaagctgcaagcattgctaactgctagagcagctacctactggctactgcgttacgtgtacgtgtaccgcaggatagatttgtaatgttgttttcagatactccggattatttgacaggaaggattaatagcttattactgcataataccgcaccgaagatgttataaaattaaagctgacaccgaaatcaagtaggtgtagtggctaatccacatattcacttataggtgaaaatttcaagacttattttgatctataaatgagtttcgtggatgagtcacttacacggttacatctatttgttgacaaattttcttaatttgataaatgtaattatggtacaatactacaatcacgataaatataattatagtataattgtattataacttacatgtaacttgtatgtaacttttgaaaactccttcgtagcatgctattttcatgaaatcgaagttgtgggactgaattctctcacatgtatgtacgctgcgtttcttttttccttctttgcctacctgaatattgaaagaaatctagttggttcaaaattttgtgaaatttacgtatgagtatgagttatattatagttacatgtaacttacactataattatatctatcaaattttttatagaaaatttatcgataaatatatagcaaaattttactatattgtagccgaaagcacaaaggttaggcacttccgaattgagaatttgagaccggcctacactgcgacacagcttacatgggcccagagaggtccacgagaggccggcccaagtccattttctcctgtggtaacaatagcccatgaaattcattcatagcccaataccgaggaagtcagccatctcaggccagcggcagccggcgacggcggcgcctcggcgagcacgtagcagccacacggcggcagcaggccatcccctcgccgcggctggcatcagcattcagcagtggcgcacggccgccgccggtgctgctctctgcggcgaccaatgcttggtctgctggcgcgagcggcggcgaggacatggcggctggtgtagtaggtcggtgtggggatgcgccggcgacggcgaggcccatgtggcggccgcgctcgagagggagcggcgcggcagctaggaggtgcgcccctatcctatcctatgtatgtatatctatctgcttgatctatcatctgattttgtatcggggtcatgtccaaactcgagattttgcaatctgacccaaatccagcttctgcaaatacctaattggccttgatcggagactagctgtgcaaaccgattgaggtcttaccatttgctaggccaactttttttttctttttcgaaaaacatggctagagcgctgcgtaaaatcttaatggatgtacaagaataaacttacaggatccaaatgaaatggaaaaaggtagctcggtacaaccagtatcatttaagtagaacactagctatatcgtcttgctgatgctttgtttcacgcaccatgtatgcttgacaattcatgcttgatcttaaggatttcggcagaaacttgtcccatttcccaccggtcattaggagatgccacggagcagcaaagacctatcctaaccaatggaatgatgcaattctgcatcactgttgttaccttgatttctccttgtagcatcgtgggatcaacaatctcactggtattcttggggaaagctcttgcaacatgttcatgaaggcttgtaccgttattgaatttttcatccgtaggactgctccctgttaccatttctaatagaagaacaccgaagctgtagacatcacccttggttgatatcacttcactcatgccatactctgcatttaatttatgaatgcaataaattagagaatatatatatgtccagtctcagaattatatgaagaacaaatgagttggccattatgaatatggttatctcacctggtgggatgtaccctatagatccttttaggcaagtcaaactttttgaacttccttcatattcatttgcagtaatgtttagacatcttgctaggccaaagtcgctcacatacgcaatcatgtcaaggtctaaaaggatattgcttggcttcaagtcacaatgtactatcggagatgcacattggttatgcagatagtccaaagcaaatgctacatccaatgctatattgattctttggctaaaagtcagagttttcctcttgctgtgttcatgggcccttggatgtagccatgtgtccaagttcccattggccttgtagtggaacacaagggctttaaagtcagccccactagaatccactgaacagcagagtgtgatgattttgacaagatttcgatggcgaatgtttcttagggcttcacactccacactaaagctcctttgtgccccacatgtaccaagattaaatactttgatggcaacttcatcttgctgaggttctagattacctttataaaccgtcccaaacgatcctgtgccaattaaattagtagaactgaacctatctgtagcctttacaatgtcttgatatgttatgttcttcatgtgctcactaattagttggcaatgtgggtttgcttgcatctccttccttcgataaattctcacaacataagatagaatgattatagcaacaacaatagctggtattagtatctctaggactagaaccaagatcttgagtttccttttccggtcagtcaaaacagaacaaaaaggaatacctccttttggaactcttgtacacaaatgatcatttccttcaagcgacactgcagcattaatgtcgaatacaccaccccttggaactactccatcaaaattattataagataaattgagggaatgtagggagctcaatgatgtaaggaactctggaatatttccagacaaattgttctgagatatgtccatcctttttatgcttactaagttcacgaaagattgtggtatacttcctacaaagaagttgttttgaatctcgagatactccagaaccacacactggccaagggaggatgggattttgccggacaacatgttgtttgagattacaagtctgttcaaatgaatgagatttccaacttcgtttggtatttctccagacaagtaattgtgtgataagtccatctcttcagaaagggaagaaatttcaaatattttacttggtatattcccatctaatgagttgtgagcaatattgagtatctggagttgagtacactggcttatacttgcaggtatttttccactgaagttattcccatccaatttcagatctgtcaactgacttaagttgccaaaaatatcagggatatgacctgagagcttattttgtgcaaatgatagaacgaccaaactgttcatgtttccaattgttggtggtatattaccggtgaaaacattgtaatccataaacaatctattgaggctcttcaaattacctatttctgatggtatgggcccaaagaatttgttattttttagccataacgcctcaagattgctagaaagattgccaattgaacttggcaaatttccttgtaagttgttcccatctaacatcagtttagtcaatctagagcaattcgaaagtgatgtcatgaagccccaatcacctggttctagcatgttgtatgacacatcaagttcgtttaaatttggcaatgatccgaagaacgggatgagcccagtgaaactgtttttaccaaggtaaagcatctctaggtggtaggcattgagaagagaagctggaattgggccaacaaacttgtttgttgagaggatcaagccctgaattttcggaagtgtgtagcctatatcggagggtaatcttcccgtaagtgagttgtttgccatggcaagaaatatcagggacgacatgttaaagatagatggtggaactaggccagacaagttgttcacattcaaggccaacatttctagtgtttgaatatgacctaagctctctgggatgttgccaactaaattgttctcattaaggcgaaggctaagtagggaagaaaggttagctagtgaggaaggtattgctcctgagatatagttgttccttaaattgagatatttaattggggaagacttggcagtaacagcgggtatagaaccaacaaagctattctgttggaggcaaatggcaataagcgatgaagtattcaatagagacttcgggagttgtccactaagactattgctcattagtctaagtacttggagagatgaactgtttgccaaggattctggtatgcttcctgtgagagcattattgccaagatcaacatatctgagagaaacgctactgcctagaaatggtggtatgtcaccggtgagcctgtttctagcgaggaccagtgttttcagcttaggaagattcccaaaagtagagggaatgctaccctgcaacttgtttctgctgagattaatctcctgaagatgtatgcatttacttaggctagctgggatctcaccttggattgaattgttccacaaacctaggatttctagttgggaacatgaagaaagttcagatgggatgttaccttctaaagagttcatgctgaggttgaggttgttgagttcactcagtaggccaagcctggatggtatgcttccatggaagctgttgtttgacagttgtagcgttgtaagggaggtaaggttggcgatgcaacgtgatatggtacctgtgatgccttcagatgcgaggtctattgcaatgacacggtgaggacgtcgcacactgcaggtgactccatcccagctgcagaaattcaaggatgtgttgctccatgaggataaagctctagatggaccagatagctgagacttgaagcaaaggagggcctgtctatcatattcagtttcattgcagatggctaacaatatggaacaaaagaaggtacagagataaagaacccatgcaacattttgagataaggcactaaaagaggccattgctgtcgattacaaccgtctgagaagagatcttctgtgcgaatggttgttcaaaaatggtactgttaattgttagtccaatatatggtggcaaggaactaggaagataaacagatgtactacctagtgtttgttcaaagttgaaaaccttttgtgaacgcttattacaacatggatggacatcttcttgtcaggaaagcaccttgcaattgagttggtcacttggttggatggaagggcatggaccaaactgaaagcgaggtgcgagaagtgagatgcactggaactagactggtcgctttttatatttggaaagttgcagttgctgaaccttttttttttttatccaaagttgctgaaccttttagcagagcactcgcagaacatatgcattcattcaggcttcccaattttttttcccaaaaacgtcacatcaaatctttggacacatgtatagagcattaaatatagataaaaacaaaaactaattgtacagtttacatgaaaatcgcgagacgaatgacgaatcttttgagtataattagtctatgattagccataagtactacagtaaccgacatgtgctaatgatggcttaattaggctcaaaagattagtctcgcggtttccaggcgagttatgaaattagttttttcattcatgtccgaaaatcccttccgacatcatgtccgaaaatcccttccgacatctggtcaaacatccgatgtgacatctaaaaattttcttttcgcgaactaaccacacccttagtttagagtttctgaagctacatctttcacacaatggttttttttgactcttcaggttcgccacaaccatcttgccaagaaaattcaaccacgactattattccgtgtacaggtgtaaacgcacaccttatttcctgaagaaaaatatcagcgcacgtgattcttcgacatccattggacgggtgcttgaaggcttgaagcataaatagatactcccttctacatcccatcatagtatgtgtcacatctaaccaaaacttcttatatttttattatttatctatttgtcttattaaaagaactaatacaagtatcgtttatttttgttataacttgttttaatcaaacatcgtgctgaaagtcaacggtaccatctatttaaaaaaaaaatgagggagtatcctctctatatcgaaccatgcaaagacacactcacgcacccttgggctatatattctggatgcactcatcgctgaacagcgtatgctctccagtttccaccggcctacctagatcgggagaatggctgacagctccgccgcctcccccattccggtggcctattcatccggtgatcctccgtctgcgacgccggtgcccgttccaggcagtgatcttccagctgctccggccgccaagtctcaagaagcctctccagctggtatctaacaacaccccatacaaaactgtttctacattttctgcaaatatatggagtacatgtgtattgctgctcttggtctatttttgttattgatttctgctagtcagtagttcaccactacatgcttatgtgatgcagttccggtgatcgatcctagcaaagaggagcgtatgggttctgggcatccacttcccgggggtaaagattaaatacactgggcacagggacgtgttaaaaccgttctcctacatcgaatgtccggaactgccttacgtgtactgtgcaccgtgagattgtgatgttgtttcagataatttcagacactatgatcagggaataaatccccactggcgttaggctagttactgctagggataatgcagatcaggctgtgcaattgtagacaattgtcttgtatcaataaagtgcagccagttggtgccaaagtatacctctctacatgcctcagattgttcagcacttcttctgtattgatttttatgtgatatcttcagctagcgctgatgtagcgagtcggcgaccagcgaccactactttcgtaccgcatcagcagcaaagtacgacctccgccggttacaaatatatggcatttgatttttctttttacgatctttgagttgtaactttatccataatgattttttacaataacttcatatacatatagtaataagattgtgacattataaaagttactatcgagggagttgataaatatcgattttagaggtcgatattgtagctgaggagcacaaataaaactcagcccatagcaactgagtagcacaaatactagtagtacagcttaacccgtactacttgattccattccaacatgttacaacttttttcgccgggaaggctgaaggaggccatccaagtatattaagaaggaataaagttacaaaaaaattctggacagagactgtcgaggtcggaggtgcattgaaatgcataaccaaagccacatgctaatcacacaagcacagcccactgagagaaaaacctagcaccgagatgacccccgctatttgtggccgatcgccgccgggccaacgacaacaccacaaagacgagactctaaaagcgatgcctccaaggaggtcacgacatcaaggatgccgccatcgcccatctaaggagatgtggttttcacctagagaaaactagccaagggagaaaggtatccttgccagcgccctcaagggggttacgacgcccaaaagcgtagacgctgccagcccgatgaatcatcaggcgaggctttcacccggaaacccttcaaccttgcttgagatccatcgcccatcaactcagaaaccatctgacaagcagatcagcacgaggcctccaccacaccgcgccggcgcccctccaccggccgaccaccacaacatgttacaactacaacgagatttaatccatcctaagataaacagatctggatagaacctcatcctagttatacattttgggaactgaggaagcagtcgagaaggtggacttctttccattatttgactggatgatagcccctgatttaatcaagcccagatagagccaagccgagagacagagacgaccccacgccggcggaccgggctccctccgcaggaacgccggcgctcggtggcagctcgaactccgagagtagcaggtacgcgcaaccccacgtatgcctgtcaatccatccggacgtgtggcgagatcgatccatgtagggttccgctgtcgcagcctcttccgattaagcgaatttcatgtctggattcgaggtttagtccccaaatccagattctgtagacatctgattaattagctttgtctggataccaattgcatagatggattgcgctctaaccgcttggaattgttcttttaggaatatcccactcacgataattaaagaaaaatgagacattgctaatctttaagataatagattaaataacccggcctctacatccacttggatgtacacagcacatgagacatgctaatgcccaaatgaatgcttccttctgcaaatgtcacaaacggaaatggactgaaaaaagggggaaaacataagatggtacattggtattcttctttacatccatctctgttgctagctacaatcctggcaaatctcttccttcttctagtatagccgtcatcctaggctgtgctcgctcctgagtcacctttccccttgcgctcacagctgttgtagcagggactggtgctcgcgccaacaatgcaaatgtttctcttctcttcattcaccatctatctttgataacgcatgcttgattccaaggatctcagtacaaacttgtcccatttcgcatcggtgtttgggtgaagtcatggagcaagagagtcctattctgaccaacagaataacgcaactctgcagcacctcagttgcatcgatctcatcttgtagcatggtgggatcaacaaccttgaatgtatctttgggaaagttactagcgacaagatcacgcaggcttgtaccgtcattaaatatttcttctgtcggactaatatttgtgaccatttccagaagaagcactccaaaactatagacgtcaccctttgttgatctctcttcgctcatgccatactctgcagttaaattaaaaataagtataaaattagataataggcacagcaaattgttttgcatgggtctaagaaaaacaaaaaaagaacaactttattttaaaaaagctatctcacctggtgggatgtatccgattgatccttttaggcaatacaaacttgttaaactatcttgatctgaatttgatcttgtgcatatgaatcttgctagaccgaaatcactgacatatgcaaccatgtcagggcctaaaagaatgttgcttggcttcaagtcgcaatgtacgagtggagttgcacaacggttgtgaagataatccagagcaaatgctatgtctaaagctatattgatcctctggcataatgtcagaaaatttctttgactatgctcatgttcctttggatgtaaccacatttgaaggttcccgttttggatgtattcaaataccaaggccctaaattctgcccctgtagaatccactgaagagcacacagtgatgactttgacaagatttctatggcggacattttttagggcttcacactctgcagcaaagctcctatgtgctccgtatgtgctaaggttaaaaatcttgatggctacttgatcttgtcggaattccagattgcccttgtaaaccgttccaaatgatcctgatccaatcaaattagcggaggaaaacccatttgtggccttcacaatgtcttgatatgtaatcttctccatgtccccattgaatagtcgcaagtgcggctcttgttgcattgacttcctcgaattttgaggcactctcttccttgaacgaatcattagaaaacacaaaatggtgataacaacaacaacaactggtgtaactattttgaaagctagaaccaataacctgtgcacccttcccctgtccaccaatgcagaacaaaaaggtatacctttcaatggtgcccttgcacataaacgatcatttccttcaattgagatcacactagtgtccagaaaaacaccaaaacttggaagtggtccataaaaattgttgaaggataaattaagattaattagagacttgaaggacgcaaggaactctgggatttttccagacaacttgttatgagaaatatctaatttattgatgctttgcaattttgcaaaagattctggaattatcccttcaaggaaattactttgcagctcaagagattcaagaatcacacactgaccaagagcggatgggatgttaccagacaacctattgtttgagatgctaagtttgttaagattaataagattgccaacttcttgtggtattcctccagacaagtaattgtgtgacaaatccaaatgttcagaaagagaaaagattttgaagatatgaactggtatagtcccatgaagtgaattgtgagcaaggttgagtgttttgagttgagcgcagtgatgtatactctcaggtatacttccactcaagttatttccatcaagattcagttcattcagctgaacaaggttacctatagtaccagggatttgcccagacagtctgttttgtgcaaaggacaggaatacgaggttgtgtaaatatccaattgttggtggtatattaccagttaaataattgtaatccatgtacaacatattcaaactcttaaggttgccgatccctggtggtataagccaggaaatttggttatttcttagccacaagtactcaagactactcgaaaggttaccaatcgaacttggtaggttcccttgaagattattcccatccagcatcagttcagtcaatctggagcaatttgagagtgatgagacaaagctccagtcatttgcttctagcatgttgtatgccatgtcaagtttggtcagattctgcaatgatccaaataatggaatgggcccacataagctattatttgcaaggg

SEQ ID NO: 7268 - DNA, 8097 bp, Oryza sativa
gcatgcctgcaggtcgactctagaagatccccattcctaacagaaataaggacaaatcaccatatgagatatggattggtagaaaaccatcactttcttatttgcgcacatgggggtgcttggcgaaagtcaatgtaccaataacgaagaagcgcaaacttgaacctaagactgtggactgtgtttttctgggatatgctcatcatagcattgcctatagatttttaatagttaaatccgaggtaccggacatgcatgttggtacaattatggagtgtcatgatgctaccttctttgagagctttttcccaatgaaggatatacatagtggttcgaaccaaccctctgaaataattcccagttcaatcacaccaccagaacaaactgaacatacacatgaacttgtctctgaggaggatgtcagtgaagctcctcgaaggagtaagagataaaggacggctaagtcttttggtgatgatttcactgtgtacctcgtggatgacactcctaagtcaatttcagaagcatatgcatctcctgatgcagactactggaaggaggctgtccgtagtgaaatggattccattatcgctaacgggacttgggaggtgacagagcgaccctatgggtgtaaacctgtggggtgcaagtgggtgttcaagaagaagcttaggcctgacggtactattgaaaagtacaaggctcggcttgttgctaagggctatactcagaaagaaggcgaagatttctttgacacttactcacctgttgctagattgaccacaattcgtgtgctactttccctagcagcctcacatggtcttctcgttcatcaaatggacgttaagacagcttttcttaatggagagctggatgaggagatctatatgtatcaacctgatgggtttgtagttgaaggtcaagaaggcaaagtatgcaaattgttgaagtctttgtatagtctgaaacaagctcctaagcaatggcatgagaaatttgacaaaacattgacatctgcaggcttttcagtcaatgaggcagataaatgtgtgtactatcgccatggtgggggtgagggagttattttgtgcttgtatgttgacgacatactgatatttgggacaaatcttgaggtgataaatgaggttaaatcattcttgtctcaaaattttgatatgaaggatttgggagtagctgatgttatcttaaacattaagctaattagaggtgagaatgggattacactcttgcagtcccattatgtggagaagatattgaatcgttttggctacattgatagtaagccttctccaacaccttatgatcctagcttgttgcttcgcaagaacaagagaattgctaggaattaactggaatactcccaaatcattggctcgttaatgtatctggctagtgcaactaggcctgatatctcctttgctgtgagcaagttgagccgatttacctctaatccgggagatgatcactggcgtgcgcttgagcgagtaatgcgctatctgaaaggtactgtggaattggggcttcactatactgggtatcctgcggtactggagggttatagtgattctaactggatctctgatgtggatgagatcaaagccactagtggatatgttttcacactgggtggtggtgctgtttcatggaggtcttgcaaacagaccattttgacgaggtcaaccatggaagcagagctaacggcactggatactgctactgttgaggcagaatggctgcgtgatctattaatggatctgcctgttgttgaaaaaccggtgccggctatccttatgaactgtgacaatcaaacggtaattgtcaaagtgaatagttctaaggataatatgaaatcgtctagacatgtgaaaagacgattgaagtctgtcaggaaattaagaaactccggagttataacgttggattacatccaaacagcgagaaacctggcagatcccttcacgaagggactatcacgaaatgtgatagacaatgcatcgaaggagatgggtttgagacccatgtgagttatactatggtggtaacccagtctatgtgatcgaagatcccgtgaattagatcctgggaagaacaaaccattaataaactagaggagagtaccaatatatataccctctccaagtgaagatgcatatactctcgtgagctgcaaggcaggttggctatgccttaatgagttctgttggctttaattagcgaagatgttgtccttcagagcattcttgaaagaactcacctttgtgagcttgactgttggtcgcagtctatgaagattttgggtgaatcttctaggaagcttactaaagacctaggagtatgacttatacgctccacccgaggggtagtctacagacggtctagtaccagataagactttaagtgaaacttgcttgcacaagacttgcaattcaaggcgtagtccattgttcaagttgtgagtaagtgtagcttggagttctaggtggatgttcaaccttaattggtctccatcgaaccgctggtatataaacagtatattggaaaaggcaaatctcagtgggattttgagatttggtgggggattgttggaattaatgaatgggccttagcccactcgaagattaattctttggaaaatcacaaaagcccacctcatgggatggcatgcatgtggagtttagtaccaccttgcttattctaggagagggggacctccttaaaagggaggatgtcctcctagccacttgaagcatgtgtggtggagagaagaggggaaacacacgagcgctcgctcgcctcgcctggccgggctgggccgggcagggcaggcggcgcgcgtgcacgacgtacgcgtcgaatggtccgaaaaattggctcctcacccttgcgcagatgcagcctccttttgcagttttgttttgctgcaaattcggatttgtttttgttttggaaacgttccgaaaaatccggtgcgtgcaaacggcgtggagtccggataagttacgcgcgacttatccggttcggttacgcgcagtagagatcgtgcgggcgccctgatcaagcgacccttctctatataaaccgacctgccgtcttcacgcaacgattgcgaaatcaatctagggtttgcctcctactctgtactgcgccgtcgctcgtagactactccatcccgctcgccggcgtgcaccggcgatcgggagagcaggtctccggaacctctgccttcgacgtcctgcaccgggagaaggcggcaataaggttttttgggaagcgcttcgcgcgactactccctgtttgttcgcgacggctcgccttcctcttcgctcgcgtgtttcatgtcttcgtagacacctgcgaaaagtttcgaccaagcaaccggtctttccgtcacctcggtacgtgttcaatatgttgcgcatatttgatctgttcatgttatactgtgtagtttacatgtatagatctaatgatgcgttcatgctagttttcatctgtaatgtcatgatttatttatggaatagattaaatcattatatatctataatctcaacatttggtttgtctcaaacacgaagagctgaaaatgcttctttgattgcgatgacttcagcgtaaacatcttgcattgctgggcgatcttttggtgtctccatggagcatgagataccaagtttagcaagttgcatgacgcagctcaacattccagtcatgacatgattttcagggtcacaattattctcggtatcttcttcaatgttgaatatgtaaacgtcttcaactccttacaggaaggatcagatgcttgcttgactttattcctcttcttcagtagaatgagcgctaaacatgatgttagagccagacaaatagctataggtcctactatcttaagtattttattggtgtgctttccctttgatggctttacattgcagagtggtaactgtagcaatggatatgtaccacataacttcttgttcccttggataaaaacctcacttgcattctgaaatatcccttcagttggtacctgtccttcaaaatcattgaaggacaaattgagaagcttcatggacccaaaggattccatgaattcaggtattttaccagatagattgttctgagaaagatctaactcaacaatgcctcttaaatttatgaaagaatcaggaattcgtccatcaagaaggttcccttccatacggagagagcttaagtggacacagtcgccaagagcagagggaatttgtcctgacagtcggttattggaaatatttagaatatcaagattgatcgagccaccaatctctgatggtatttctccatcgagttggttgtgagacaagtccaaccattcagaaagagaggaaagagtaacgagttcctctggtatgctactatcaaagctgttacaagacaggtttaaagcttctagattcttgcaactccctaaggagctaggaatcggtccactcaaattattttcctgtaagtagagctcacttagatgacttagattaccaaatgaagttggaatttgtcctgaaattttgttttgggataagcttaggataaacaagtttagcagatttccaagtgaatctggaagatttccagtaagtagatttttttccatataaagaagcgtaaggcttgtgagtttctctatctcttgaggtatggtaccggatatttcatttcctgttagcagcaacacctgtaagcttgttgaaagttttgcgatggaacttggtagggttcctttgaggatgtttttgtccaggcataattgaaccaactgtctactagttatcaatgaggataagaaagaccagtctccagcttctagtcgattcatcccgagattcaattccatcaagtcaggcaggttcccaaaagaaggaataataccatggaatgcattgtcacgaagattaatcacttggagattttttgcaatgcctagtgaagtggggatctgcccttggaattgatttccttgcaagatcagtgttttgatatttggaagggtatatcctatgttatctggaatttctccaatgagtttattagtgcccatgccaaggtatacgagattagacatgttgtacagagaagccggaactgtccctgacaagttgttatatgtcaagtccagttcttgcaagtttggtattctgcttaaactagatggaatggttccctggaagttgttctgtgaaaggtagagtatttcaagggaggagaggttttctatagaggaaggtatgctacctgagagattgttttgggataagctgagataccacagtggtgaggagatatttgagattggtgggatagacccaacaaagttattaactgcaaggcttatgagattaagtgacgagctattaaaaagagcaaaaggaatctcgccgccaagacgattattagttaaatcaagcaatatgagtgatgaactattagctaggagaggtgggatgcctccagtgaggctgttatttgtgagaatgaccacattcagaaaagagttacttccaagtgagaaaggaatattgccgcttaggttgttatttgaaagatataaaactgaaaggttggagagtgtacctaatccttctgggattactccttgaagtttattgtcaaacaagcagatagcttgaagatttgagcatttgttcatgcttgaggggatctcaccatcaatcgagttatttgagatatcaatgatctgaaggttagagcatgaagacagagcctctggtatcgtgccagtgaggccattagaggtgaggttcaggtaggtgaggcgacgcaaatgaccaatttcaggtggaatgttgccagtcaactgattaaatggaaggtggattattgtcaagaaagtaagattaccaatgcaaggtggtatttggccatggaggttggatgactctaggttcaattcagtgactcgagatgtgtggctcttgctacaagtgacaccgggccattgacagtattgcgaagaatcatttctccaggaagccatgactccggcattgtcattgagatggagcttgaggcaaagcagagcctgaaaatcggtagtatctgatgcatcatggagtggtgcagtgggaactagggagaatgcagtgatgagaaagaatgagaagcatgccaataagattgtgaccagaacagggatgctgtgggagcccaaaggcgccatcagttttgctaatgagaattacaatgtgagcaacaggtgtttcttacttgggtacgttgcaaactgaagctgtctggtgtagtggttgttgtgctaatgtacatgaatttatagaccagcagcaacaccataagcaaggcaattgtaatggccaagtggtggagattggccgtactccggcatatacggcaggacctagacttagacgctcatggctttggcccagcttaagatttgtgcttgaactttgcttcggcactttgtagctcaattgggagctgagattaacagttgccacttaaaatatgcaactcatatgtcatgttgtagtgatgttatcaagtgcatcgatccatgtatctgtctgttactgcagtctacattgctaacttagcgtatactctggggtttcactgttctctcgtcgagacaagcaaattaattggacaaagtaactaagataactgcctaactagagcattagaattgtcctgatcttgcatgagaaagcaacttttacaagtgtaagatgtttttactctatattctaaaggtttggttgcagggagttagcaataatgtcagttttttcccaaacacaaccaggctagcaagctagttagagtgtctattctattgctaatccaaactgatattcggacgaagtagtcgtcagcgtttcccttaatgaaacaagcacagtgacagtagtgttcaccgttcactgtctgactctgaaagtctaattgtaaactcagctcgtcaatttttcagtcgaattgcactgaaaaatatcatcttcttcagtcagcagtcaaatgacccgaactaatacggcaatgtatatgcgtagtacatagaatagttcctttaaatctgttcacagatgtctcatcgaaaaaactgaaatctgttcacatattcaaagacttcaaacttgactctgacttcaattactctccatgctttgcttggttgccagaaatctacagttcgggtggatcatctaagtgaaattaaaacgggatagagaacagggttagaaattctggaacgaaattttagaaatttcggtcattttggatacgatattatttcgaccgaattttttattttttttaattttttcatgaattttggtaatatttgttcaaattcaactaaatgttgtttaaaatttcagaaatttcggaccgaaatttccgaatcggtgagcaccgatccaatcggctaaaccgatgggtttaaccctgatagagaaaggattatggccttccggtgatctgtgagtcgactagctaattcgtagtgacagcatgacaaattgacaatagcgtgccaccgtggtagactcgtcccatacatgtttggatgggagcggccggccggcgggcggcgacgccgtgcaagactcggcagtaacaagtatgctctgctgacgaatgtagtcccaccaaatcaggagtcctccactgcacgccatgcacactagtggagaaaccgtctttggtcggtcgcccgaaatccacaatagtctcggttccactaaaaaccgggactaaagacggttggtggctacagcgggcatatttgatcggttggtgttaccaatcgggactaaaaatgatttttagttccggttctaaatctgtcaggccttgtcaggccccctgagatcaccaaccgggactaaagataagggatctttaatcccggttgataacatcaaccgggaataaagcgtatgcaccagcccacgcagaagcgcatgcgtagcccctctctctctatcttccatccttatctctttttcttctccttccttatctccatcctctccatccttctccttccat

SEQ ID NO: 7269 - DNA, 3928 bp, Oryza sativa
gggaacctcacaaaggtaccggttttcccaacaggtacctttgagattccacgaaaaaaaaagttggctcgatgcatcagctcgattcgagccaagaagctcccttcaccccgaccaatgaaagaacattcaagaacacaaagaacactaagtcactaatcacatactaattccttcttggaatcgaatcaaccacactttacccccccaaaattaaccacaatcatcatcattgaatcacaaaaggaataatagaatcacaacaacaacaacatctaaaaacatcacagaacttccaagaaccttactcccgtcgccgttggatccaccctcggctgtcgccaccaccatcggatcctcagacgagggagggaggcgagaggggtcagagggagccactaccaccgccgccgcccgatctgccctgggagggaggcaagagggggcggagagagttgccgcccctgacgcccccaccaccaccagatccacccgcggccgccggagacatcgccggatccgctatgggagggaggcgagagggagaggaggagggggcagtgaagagagagagagagagagagtgagagcgagagagatggggaggggtgtcagtttttctttaggatcgacaactatggttcgtgaaaggtgttggttctttgttttttccaccgcgcaaggtgagcaaaagtctataggtgtcggttttaactgttccggcacctatagtgccgacctctatgtgtctttctgtagtagtgtttgttcctcatcttttgtcttcttctctcaacttgcctatgtggcttcttgattgtcatcatcttgttggtgcgagggattagcggatattaattcatctttgaatggtgaagcattcatttaagaacatcaacctctcatatgaggctaaacctaaattaaggagctgggaaatatacctggacaagggtcaagaaagacaatgatactaaagatttatatctatttcatctcttttgaaaataaaaaaaaagaataactacatctattttaaaatataatctgttcttgcacgttttttccaaaataaaaatctgaaaaatatacggcaagtgcgagtccagacagtctcacagattacagattactgtgtggcaccctgccggtatcatctgcaaacggcgtgctcaactcattacgtacatgttctgccgatcgattaccgcgtgatgactgtcagctagcgccgagtgccgccaacccgtgcaagacccggcggatcatgtcgtatctacagctcccagagatgccaactggaccagtctataatttcttctagactcggcacaatcaaacgagtcaagccaggccactagttgcattcagcaagaaaccaagagatttttgcgccgtcgtacgttacgggcgggcggagagtccgcgcgccgggtgagatcgacattctgcccattttaagcgactgccgttttcctattgtcgccgtgcgtctcggctggtacctggctgcagcctgctctgctcccccctggcctcatctccagcagaagtaagagcgtatagcaaacacactgagaatcaataggcgacgatcgatcgagcgctggacgtgcgatgacagtagtgcggttctgctccccgcatctccttctgctgttgctactggttgttactgctagtagtcctgaaatttttacattttgatcctttttgaaaacttagtttacaaatagacccctgaaaaaacttaaaccggaaatggtcctttttgggacgccagagtggttggcgccgtaccccaacatggcggcgccagccacactggcgccgtgcccgtgccaccgtggcaatagggctgtcgtggaggtgctgactaggccgaagggggctccagccagagtggcgccgcccctcataccacggcgccagcatggctggcgcgcccctcctctgcgggccccaccaactttctccctcccctcaaaattttcaccctgttctgcctccgggcaacggctggcgccccccctcccctcctagaccgcggcgaccccgatgcggacaaccccgacgacgacgactgggcggcgacgacgaatggacgcccgaatctggcgggcaaaggtagcggagagcggcgcaacgatgacgctgaccccgcgacaacgacgacgaccccgacgacgagtgggctcccggatccggcgggcggaggtggccgagagcggtgcgacgacgaccccaacgacgatcccgacgaccacgacaactgggcggcgatggggcggcgacgtgggcctcgtccctcccggatccgacggcggcgggcctcgtcccgtccagatcggcggtggcgggcctcgtcccactcggatccggcgagagcgagggtggccggcggtgggagagggagcgggagcgggcggcggcggaaccggggcgggcggcggtgggagcgggggcaggtggcacgggagcggtcggcgagctcgggcagcggcaccgccgcctgcgggctagggttttttttttggaattttatttttttctggcgattttttctctttgcatgcggtcggcttaagcgcccggattttcgcatgagggtgccctggccgcatgcaaagttggcgattttcacagacgatttcccgcatgcggttgcaccaaccgcatgcgaaaatctctcccgcccgtatgcaaagacctcttttgtagtagtgcttggcttcaagccaaattaccttggcgactggcgagttgtcttttgtgttgtgcatggccagccaatattgaggcaaggaagagaccgggccactgagcgtgcgatatttgtggtggcatcgaacgtaagatcgatgggaacagatgtagcgtggacgtggatggagtattcagtactgtctcgtcatgcagcgagtcctgggaaggatcagcctacctgtcaagcaaatacacgaatgagccttcattttactgatgggcctttgcagagattagaagaatggatttccttggccaaaatttatctatgcaatccatagtgagaaatggcacacgtacaattttttttttcacaaactcttactaacaatgataacaagcgtttgatttatatctatataaaagttataaaaaaatcgagatatacttagaatgacatatcacagttagtaagatccactaagaaaaatttagcacctatagacttttccacggtgagctaacctaaattttaacattgttaactattacaaatgagtaaatggcacattatgatactgactttcaatggctagttgttctgtcagtgtcctaagaaggcagttatgaagacggctatacaagtcacttatcgaagtctaggtgatcatgcaattcattgtttcatactatctattcctctcctaaagtgccggtggacgatggctgaaattgagttgatatgacaattattgagggcagaaatgaatcaattaaatgttagaaacttaaaaggttattttagagaagttctctaataaatccagatggtttttttcccctcaaaatcttaccatcaatgaacttggaaagcgtgataatccgtcgttggttcaaaacaacggtcctagccttccgctgaatagtcttgacagagcagcatataccacacacagttacaggtaggcttcaataaaacgcaacctaaagccccgttaaaagcggagcatgagggatccatctggtcagccagcaaggccagtagaaaaaaaaaaacagagagaaaactgtgctttaagcaggaaactaggaaggtttgtggatgggaaccatgggagctacccgttccggccttctggcactagccatcctctgcgcatctctttgccttgcactggtggacagctctgacgcaagggaagctccgcacaacagtcctgaa

SEQ ID NO: 7270 - DNA, 17129 bp, Oryza sativa
ctgttggctcaagcccggcccgtgagcccccgaacccattcatcatcccactagcgttagcgtaggcggaatagcatcctagggcgcacgcgtcacgccccgtccctcctcccccatctctcctctctcgaggaactcaatcacgcacaaaaattaccagattacccccaaccccatcatctccgatctctctctccaccgcggcgtctctctctctctctcctcccccacccccaaccaccacttcctccatcaccaaagcgccgctccctcgccgtcgccgccacctccgccgccgccgccggtgccggtcgtcgaggcgggaggactcctccccgcgcgccgcgctcgatccgtccgctccccagtacgcccgaggtgaggcccgtccccttcgattggttccttccttcgctctcacttttcccttccccccagtctggaatcccggcgactgaccccccctgtttcgatctccgtgcgcgggggagcggtcgatccggtcggtgaatgcggccggggttagctttgggtcgccccgctgctggtggcttgtcgagagtggataggccctagggttcatgtgtgactttttgcggcgcgccaatccgtagtaagcatgaacacactgataggttctctcttttttttttgcgaagtttgttgagatttagaagagagtttaggttacaaatacgacattaatcccgcaagcagctgccccggggtaaaagattactagcatcccgtccaggacgagcctgactaccccactgataggttcaaccggcgtatggaacctcgaggataggttctctttgtgtatagaacacactgataggttctcttcgtgtatggattatccaacgggggatggattgagccttccattggacgtttggctctgtgtgctggttgctagattggatttagaatatgagagtcatgaatcgtgttgcattattatactagtgaaatggattgtttcttcactgagctatgtgtttcctacagtgatgcatcttctataagctatcgcgattgtttctttaacagattaagcgtggtagttgctatgttatgtatcaagagagaaggaaaccttcacgcatatatgtggttttaatggttaatgtttgcaatgttcttgaggcatacagttcgtacacatggagattctttaccgattgtttagaacaaccgagttagttcaagcaatgcatatataaagcttgaaatggaccttttatgttctgctctgtagtgggaacacatgcactgtgagtgatcttggattctgggatcaggcttacatgatcatttcgtttcctcccattcttttgatttcagtgtcaggaggatatgactatgttaggtcattttggcgtgttctaatgttgttattatgcagaatagaactctgcaacttgtcgttcagcattttcttgtcccaaacatatttcacttacctgtagcatctagacaatgttctaatcttttgatgtttttatctcagaaacaaggagaaaagttaaatacctaccgttgtatggtttaccattgtactctttctgtagcttcttgatcactaaatatttacatttacagtttctgaacctgtgttatgcttgctgcaattcaacgcagactgatttaatagcagttagactctatcatacatctttcaaaaaaaatttctttctggaagttttctcaatgaactacttacatatctgtggttttttgacttggtacagggcagtgatactctgctgcttagttgggtgcagtgtgcactacaagtctacaacaatggagcttgacagtctaagagaggcgtttgatcgagttattgaaaaacgtgcttcctcttctgctaaagctcaggaagttattgatcagatagtgagtgaagttgagcaggcaatcacgaagatgcagatgatgaatacagattccatgggtactgctgaccattcatccatcctggcagaattgaaagccaagttgaatgaattggcgccactaaatcaactagaaggttgtcaaaaggaattgaatgttgcacttagcaaatatctcaagctgctcgagaagtctttcagtccagacatatcgaaagcatatcgaaatgtggattttgaggccagtactataaacagcataatagcaaatcatttctaccgccagggcctttttgatcttggagactcatttgtccgtgagtgtggtgaatcagatggggcacacttgaaactacaattccaagagatgtattcaattcttgaagcaatgcaagttagaaacctccaacctgctctcagttgggctgccaagaaccatgatcagcttttgcagaatggttcaatgcttgagttgaaacttcatcagcttcagtttgttgagatactaacaaaaggaagtagagatgaggctttaaagtatgcaagaactcacttagtgccctttgcatccttgcacaaggcagagatccaaaagctaatggcctgccttctctgggctgataggcttgatcagtccccttatgccgaattcatgtcatcgactcattgggagaagctagcagaggagcttacccatcaattctgcagtcttttggggcaatctagtgagagcccacttggtgtggcagtatcagctggctttcaaggacttccaaccttgctgaagctaacgacagtgatggctgccaaaaaacaggagtggcaggcgatgaaacaactgccagtacccatagatatcggaccagaattccagtaccactctgtctttgtatgtccggtgctcagagagcagtcgagtgatgaaaaccctccaatgctgatgccctgcggacacgttgtgtcgaaacaatcgataatgaagctatcaaagagcagctccagacccttcaaatgcccatactgtccctcagaggctgttgcttctcagtgcaagcagctacatttctgaatgttctttccctgctcagatatgtttatacacgtgttaatttatgttcctgtggcacccatccaataactaccttgtaatataatcctgtatgttaatgaacattctagtgctgtctctggatgttaatctgtacagttgcaaattcctgttcgttttatcaaattatatctctggcatgactgaacagaaaataagtgctactagtcactctggcagtcttagggcttatgattgtgtattggttttacagccatgtagatcggtcaaatcatgtgtaaaattggcagtgagcctttctgtttaagtttcctgctaaacatggtaatgaacatttatctggccaattgataccgaatagattgctgctattagcttatctttttataagcattttgtgttgttagtaacttagcatgtcttttgttagcaattagggttcgatccatatgcttgtctgctaatactttgtaaattcattaaaaaaataaaatactacttctgttttaaaatataaacgatgttgttgacttttagacatttgtctatttgtcttattaaaaaaatagaaaaaaatacataattatggagtatatttattttgttatgagttgttttatctcattttgttatgagttatttttatcactataaatattttaagtataatttatattttacgtatttaaaaaattaaacaatatgaatggttaaacgcgtgctcaaaagctaatggctttatttattgaaaaacggaggggcatgaagatcgaacaaatcatactggttaatcgcttaacaaattcttggctccgcgccgtgtaatgtaccaattctctgttattagtaacagtacgcaggtcatccatctagaaaaatgaaaatgacaaaaaaaaaaaggtaaaagaaagtagtaataaggatctttcaaagagaaaaaaagaaaaaaaaaagaagaaaaagctcgccgtgccccgtcaccgtcttttttacctccgtgtctacttgtgcttgattgacggttgtgattttttttaaaaaaaagaaaaaaaaagctcgctgtggtccgtccatccaccgcacggccggcgacaccggcgattgccagggctcgtcggcgagcggcggtgccggccgaggtgctgggctgctagcgcgagacgaagcggaacgagctgtggcggcgaaacgcggccgccgaggcccaactgtccaagcagcggcagcacgcgggcggcgccacaaccagggcttccgcgaccatgaggtacacgctcattcactcatccgtctgtctgattgatttgtggttgggattttgggctggattaggctgcgctagctagatcgatctgaatgtgcatccatctacactctgctctacttctgattgggcgaatttcgcgcttgattcatgcccgaatcggatgtctcggtcccaatctgacacaaaatcagcctctagaacatccagttggcttcaatctgatgctagttgtgctaatcgatttagctctggttgcttgaactgcgcttgtagttattcaatttgaagagttaaaaggaatgtggcacgaatgctaatgccactaattatgttggttcaaaaaaaaaaagggaaaagaaaagctactaatatgttacattactattcttctatacatgaaattgccaaatcttaatttgcctcatctgacacccatgtttgaggctgcatgtttgattctaagaatcatggtagaaacctgccccatttctggccgctctctaggcaatgccattgaacatgagagtcctattttaaccaatggaacgaaacacctctccatcatatcggctacactgatatcatcttgtagcattgtgggatcaacaacctcgtgagtattatcgggcaatgctctatcaacaaaatcatgcagggttgtgtcaccattaaaattttcatcggtaggactgctacctgttaccatttctaagagaaggattccaaagctgtagacatcacccttggttgagatatcttcgttcataccatactctgcattcagatttatagaaatcataaaattagaaaccagacaccatgtgtaccataaatagaatgaacaacttacaaattagcttatctcacccggtggaatatatccaatagatccttttagacaagccaagcttgttgatatatctttatgtgcattcgatcttgtgtatacaaatcttgctaggccaaagtcactgacgtgtgcaaccatgtcactatccaacagaatattgcttggcttcaaatcacaatgtactaatggcaattcacactggttatgaagataatccaaagcaaatgctacatccaaggcgatattaattctctgtcttaaagtcagaacctttgtttgactactatgttcatgggattttggatgtaaccacatatctagattcccatttggaaaatatgggaacactatagccttgaagtctgccccagttgaatccacagaagaacatagagtaataattttcacgagatttcggtggcggacattttgtagggtttcacactcggcaacaaagctcttattagatccatggatatcaaggttaaaaatcttgatggcgatatgttcttcctgaagatgcagattgcccttttctttgaaaggaaaatgcagattgcccttataaactgtaccaaatgatcctgagccaagtaagttagttgaagagaatctatttgtggcctttagaacatcttcatatgttatgttcctgtgctcattcagctgttgtacatgtggctctgcttgcattctcttcatacaaataatttttgcaaggcataataaagtgaaagtgatagcaacaattggtattactatcgttaggactagaaccaatgacctactatggttccttttcttgtcaaccaattttgaacaaagaggcatacctgtcgttggagtttctgtgcacagatggtcatttccttcaattgacaccacactagcattggcaaaaataccactgcttggcaccactccatgaaaattattgaatgataagttgagaacttgcaaagaacgcaacaacgttagaaactgtggaatttctcccgataagttgttatgagatatatccatcaccttgatgcctaacatgttcacaaatgtttgcggaatgcttcctacaaagaagttgctttgcatctcaagatactctagaaccacgcattgactaagagtggatgggatatctccagacaatctgttgtatgaaatgataagcttattcagattgacaaggttgcctacttcatctgatatgcttccggacaagtaattgtatgacaagtctaacaccattgaaagtgaagaaattttaaagattgtctctggtattgttccatttagtgaattgtgagcaaggttgagtatttcgagttgagtacaataccctatactcagaggtatgcttccactcaagttgttcctatccaaatttagataattcagctgaacaagtttcccaatgttgtctgggatttgaccagagagtctgttttgagcaaaggacagaatgcctaatttgtgcaaatttccgattgttagagatatatttccagtcaattgattgtaatccatgtacaactcagtgaggctcttaagattgccgatctcttgtggtataggtccggaaattttattatttcttagccacaaccgttggagactactagatagattgccaacagaacttggcaggtttccttgaagattgttcccatccaacatcagcttagtcaatcttgtgcaatttgaaagtgacgagataaagccccagtcgcctgcttctagcatgttgtatgccacatcaaggtcctccaagtttgtcagtgatccaaaggatggcatgattccagttaacttgttttcagctaggtaaagcatttgtagatgggttgaattgagaagagaggttggaattgagcccttaaacttgtttgctaatagaatcaagccttcaatgtttgggagtgtatagccgatctctaaaggtaatcttccggtgagtgagttatttgccacagtaagaaatgtcagggatgacatattgaagaggggtggtggaattgtcccagagaaattgttcaaagtcaacatcaatgtctgtagcgttggaatatgtcctaagctctctggtatgctcccatctaaacaattctgtgaaaggcgaagataaagtagggaggaaaggttccccagagaggaaggtattgttcctgtgagacagttttctcctaaatcaagatattgaacttgtggagagacggttttaacaggtggtatagaaccggaaaaattgttctggttgaggtaaatgccgttaagtgacaacgtgttgagtagagcctttgggagttctccactgagactattgctattgagaatgagttgttggagagatgaactattcaacatgggctttgggatccctccggtaagagcattcttcccaagattgacatatgtgagtgtaaggctactgcccaaagagggtggtatgtcacctgaaagtctgttgtttgccaggaaaagtacactcagtttaggaaggtccccaaaagcagaggggatgctcccttggagcttgttgttgccaaggagaatttgttgaagatgcacacattgacttagactaggtggaatctcaccttgcagggaattgttctgcagatctaggatctgaagttgtgaacatgaagagagttctgatggtatgttaccttccagagagttcatgctgaggtcgaggttctggagttcgttcaggaagccaagctcagacggtatgccgccatggaagctattgtttgatagttgcagccttgtaagagaggtgatgttggcaatacaaggtgatattgagcctatgatgccttcggatgggagatcaatggcgataacacggcgaggagctctcctgctgcatgtgactccatgccagttgcagggtaacaaggatgcattgttccatgaggctagaactccagttggacctgagagctgcgacttgaagcaaaggagagcgtctcgatcagtctcagtttcatcactgatggctaatggctggaagaaaaggaaatgaaatataagatggcaaatgacgcctgtagagaagactctcaaagcagccattgctgttcgtttttgagagaatggtgggaacttggaggatggcatgatgcatgcttttgtagaagttggaactgaacatgcttcaattatcccagtaaaaaaagttactttttttaaggaagtctaaaaagtggcttgaattgtttgggagtaattggagtaaacgcttgtacaagtcactgtgagggtacaaagtctgagctaaattatttggaaggttaacaaaaaagggtcgataatcacttccacatccgtgatccatcgacgattcggcacaccaatacgtgtgagttgaaatttactgtaactcatctttccaaataattgttattgtacaccattaatcttcaaacttttgacaactcattttctttaaaggttttctaaatacttaattaaaattaccatattattaataaagcatattaaattctaaacatattcattaaactctactttatattattataactatttaagagctatcagtactcgaagttgaaacgaaggaagcacaaattgttcatattacgtattggatcgttgaaccagattatttgtcccatactttaaaagtacattattttaaaaataatatcttttactgttttgtctagatcactttaagttagttgttaagtttatttattaaaatatttactttatcactatacttaaatagataatccgtgacaacaatctatccaataatttatttcaaactgagccactagtcttttccttttggtcctatgatccttactgaagtggagtaggagtactactcagtatactaagtactgttagtactccctccatttaaaaaatataaagggcctcatcttttcgcttatgcttatgtttatcagccaaaatttgaattttcaaccttaaatttggttttcatcgaagtttatttttcagcctttgcttttagatcgctaagaacacatattaaaagtttattcacaatttactttttagtctgcaaatatgccgtttggcttattccacaaataaacgaaacaatggggctgaaagagttttggttggatgagatacatcagtttgtccagattcgtaatagtaggatatgtcctaaccaaaactctttatattttggcagtggcgaacccaaagggtagtccatgtaggcccaggactaccctagaatttggcctagaaaagactagatattcatttttcttggcccatcaaaaaagtatggcctaacaaaaaaaaccctaaggggctgtttgggagagctcctctacaaaaaaaatgagctcctctccaggaaatcttctccaccgggagctcctggagctagcacctgtttgggtaataatacatatggtccagctccagatttggtaggaggagtgaaaggactgttttgcccatggatcttgtatggatgttgattactaatatatagtgatgtttaatatttctcacagccataacaataataaaaaataaaatatattacaaaatagacttgttgcaagacgatacaagtagctatttcaagaacggtacaaaattagctcgaatagctaatttttttataataaaaaataaaaaaattataaaatagacttttttcaagacgatgcaagcacctatttcaatcctgctgcgagaggtaatgttgcagcaaaacgcgaaaacggccacgatcgagctacacagtagactggagagcgcacagtcacagtgcaaagcaacacgcatggcaatgctgctactgtactagggaattgcacctccgagtagctaatttttttatcgtaatatttattttacatcttaatggaacacatgcaaatctgccgcaattgagaaacgagttgggagcaaaatccgcacaaggtaccacattttaatcaaaggttcataattgaagtccaacaaagatacattatcatcttatgtcttacaaatctagcgccaagaaattgataaagcggtggctagttcatcacggaagagatccatagttcctgcacttctttcgggagttgactcatcagatgccgttcgaggaactgcgtatttgttgtaccgttctggtattgttggaataaaattagggtcacgatcaaacctagcaaaatcaggatcctcacctccatgctcacgaatgtaattatgaaggaccatagcagccacaacaatcattttttgcttgtacatggggtagcacggcatcttgtacagaatttgccacttcatttttagtaatccaaatgatcgctcaataacattgcggatggaagagtgcacacgattgaatttttccattggagtattgggttccatacctctgtgccactctggtaaatggtatctctcacctttgtatggagcaagataaccgggacgattaggatatcctgcgtcaacaacatagtatttgcctacaaaagatagcatagtatgattattgatacattttagtaacacatgcacagttagcacaaatagagagcataatacaagtgtggtaccttgtggaggatgagggaagaatttttcatccactcttaatgcattgtataaaacacttgtgtcatgcatagctcccggttgacccgttgcaacataagtaaaacgcatgtcaaagtcacaaacggcaagcacattttgagtgggaattccagtttttccaatatatctaacttgctcatcaggtgacaatgacacacggatatgagttccatcaagagcaccaatacaatctttgaaatggggaaaagttcttctatcatctcttatcctcttatgaaccgaacgaaaattgggatcttttggtcgaatgtaatcttttgccatggccatcaaagaatttaaaacctcatcaaattttctactaatggtttcaccagaatgtttgaacctattttgagctctcctattggactcatttccaccacatgtaaacagaaacattgcaagcatctcatgagtactcatatgcagggatggttcgagtccatacctttgcaccaacaaatcatttaggtccaaaaaaagatctgtgttcatacgaagctgtgaatgacattcaccaggagtccgcaatgtctctagcaaccatcccatgccactaagaattgatgtccttggtggatttttgtgaaggtacatatcagcataaacttgagctatttgggcaccacctaaaacaagtttccagaacaaggtcaccatcagtagagtcccctgactcactctcactttcactgtcagtcacctgcaggccaaaaaaaaagagaacaacacttgttagatcacagcacttgttacaaatagtataaaaaataaacttaacatatattatatctgtagacgccatcacagcacttgttaaattatactaattaacttaacacaatcacagaaaaaaaaaaacttcatccaagtgacatcaatctgtagatgccatttcttttcccagccttcatccaaatccattcaatcagacaaacaagcatgagtctaacagtactattattacaccaaatccattacaaatatttcaaatgggagaaattatgaaataacaagaaggcctgcataacagcaagtatggatcatgctccatacttggcattgtactttctcctaagccaattaaacctaaactctttatttggtagggtcataaacatgtccctttggtcctttttgacaaataactctatagcaataaaatgctcatcactaccataatctgccccacaatccaaaactagatccatgatttgttgcacggttacttcatttgacttttttgatgtgaaagaggaggctgactcagcaatcttggtgatttgttcttgaataacaagtgctgtccctatctttgatttcttgcctttgtcaagaacagcccgagatcttctctttccaataccaatggaaggagaaacctcatggcactcctgggcctcgtcattcatttcctccatgggggtctcttggacctcttcatcatcaactacaagattatcttcctggacctcctcagtcatgtgctcaggtatgatggggttctcactcataggattccaatgatcggatgcatcattaataatgtcagaaaacataatgttaaggtcatctacattctgcaagggtttcttcctaaacttgccgcatccaggaatatcctattcaatttcaaccatgaaacaatgtgttagaagcaagctaattctagttaataattaaggggcaggtataaagctaattcaccttttttgcctttctccaccactcatcatccattacaatcacacctcttgagtgatcccatcctgttccagtttgctgcctcattaatttttgccatgccacaaaatcaggcttcatcttatcccacttattcctgagctgtcgcttactcaactcaattccagttatttggcgaaacaactggatcacttcgtcatagcctacggagttcaaatgggtatttggcctatttcctttcaccacttgttgggcaaacaattgacaaacaatggtagtatgctcatcaatccattccattgaatcaccctgtccagtcaaattagagattttatagttttcaagatgcaaataaatggacgattttagctttctgaaataaaaaatatatcacataacagaaggtaatacttcatccatatgcttatggttttgactacaacccaaattagctagcttcttcatatcatacacgaagcacatgaggttataccattggatgtcatccaaatatcagacaagtaattacctggttcgtcgctccagtacgcgggggacgagcttgctgctgggcagcgccggtcggctgggacccgcgccccagtgcgacgccggcgggtgagcagccgcgccccacggcggctccggcggcagggctgccgtgccccaggatggctccgacagcgggaggcgggcagccgcgccccagggctgctccggcagcaggaggcgggtgcagggcggctccggcagcgggaggcgggcagccgcgcccctggccgcgccactggccggcagcaggaggcgggcagccgcgcccctggccggttgcgggaggagggaagccgcgcccgtggccatgctccagtccggcgcccatggtcatctcggcggccgggacttcctcctctaggccggatccatcttggacagaggcggatccagccatctcggtggcggcggctctagggttggcggcggcggcgatctgcctgcagactcggcggcgctctggtggaatcatttttttcacgaatgaggaacgggaacggggcggtactgtggaatagaagcgaatcgttttttttaaccaatggcaatggtgggtaattttttaccatctccatgaggacatatgactccaggttttggtggagtaccccttgaggagctccagaatattcctagagatggagctgcgatttaagagccagagctactccactactcgtgtttggcaaaaaaaacttggagatggagctattttcttggagaggagtcctgccaaacagcccctaactctccagtcctggcctctcattctccgtctctccctgtctcctagtccactcccgacggcaccactgcgctagcacggcagtcggcagcaacgccatcgctccggcgctcccgtgtggtcacgtcccgcgaggctacgacggtgcagtggcactccgcctctcaccggcgcgccctggcctgggcctgctcgccttccatcgtgactcgcgccgtggcgccgcgtctagccggcgacctcccacccgatgtgcgcgccccgccatggcgccgctggcttcgcgcgctcgcgccctctccgcccctcgccggcgcgccctagccttggcggctgggcctgcccaccttagcgccttcccgtcgcgactcgcgccgccgcgctgtgtcccgcatgaccgtgtccaactggcggccttccgcccgacgcgcgtgcccgccgtggcgccgccagcgcccggcgtcactccctcttcgatgagcagtgagcacttcctcagcccctccccccattctagagttctagtagtagtagacgaccagtactatccccttcaataatcaagttttagatttctagtcgtatgccatatcaatagattaccacaaaattgtgtgcaacaataaaaatcatatgacatttttacatggtttgatggttgtcaggagattgaggcatatggataagaaagcattgcgttacttttccagaagcatgaagcaaaaaaagttgcatcttgtgatctaccaatcccaccagtggatgaagggtcgtctgttcctgctgtagttgatgctccaattgatgaagacacaatttacattgtcatttaggtaagatttaaacttatttgttattttttatttgtattgaaccatttaaagttatataccgtatcgtttaccagattttatgtcgaatcatattgtattgtatttggatttttttttctaggtctaccctagattcaaattctgggtccgccaattttgggatggagggattactgaataacaaactaatctaggattgacttggcgaaatctgttagtcaatgctaatgccactcgatggagcatgcgccaaattattttgcagccatcgtccaggcctccagggcttcaaacattgataacgagatgccaatcacatttaacctgattgatttttctcccgaaaagaagactttgactgaccgtactaatgttgttctcacgatctaaacgcgtggtttctagtactccaaccaattcgttacttctcatttaatgtcgtaagtaaacttttttttatctttatccattaatttcattcgaaaagacctacacttaaatatttttaattttttatcactatttgcataggttttaagatttatttaaatatcaaggttttaaatttcaagcaaaaaatcatgaattttttttaaatattttaaaagtttgataatggtatcatgtatggcttttaaaaaaagctcaacttaaaatacgactcatgtaaagagaaataaagaagagtgatgtgtggtggggattttttttttttttttggggagggtggtgttgttaaaatgagaacatagtagtttagagcgcttaattaagtgataaaatgaaacagttcagaaggagtaaaatagatttagtatttctcatggtgaatctaaagaaacacatgataaactatataagttattgaagcatatgataaatgataaagatataaatgttttgactaagacaaataaggttgtgttcggtagctacgattggatacctttcccctgctgatgaaaaattcgcatccggctgatggtgccaaatctgcgtttacgtgaactatgtggaaacacatgaaggcctgagagatttgcttagctctagtgcaggtcctaaattttgatgagatgcgggcatgccagttagtttgatcctgtaactgacaagatatataaattgatgatcaaatagccgaccagctaacaaactgatgtaatgatgctagcagatatcgataggggtctgagatattgattctgacacttggataaatgacgatataaatataatggaaaaacttgagcaatcaaccaatcaaccaatgataatataagagtaaattttggaaaactacaactctagtgacaaaactatcagtttgctgcaacattagcgacatgtttcagtttgctgtaataatagcgtgggaaattattacaaaactgcaacagttatatgctgctacagttgtcacctagtatatatattgatatgtggagatagattacagggaccccgaatctacatatttatacccatcggtagatattagtccttattggacaagacacaaacattcctatagataaaataaaagatacaagtcatgatcgggctctaaataatctttcctgaaaataaaaggaaataagtaactctacctaattaatagataaactgtcatgtcgcatcgtccttgaactcagtctcttttagataagtttcttttaattgattaattttctgaaccgaatccatcgagaatctaactgttggtgactgatgtttccatcgacctattccagaactctgaagcgaatattgactctaggctgatgataattttcggggcataccaacttttggcgttgacaccctcctagcatgtaaaaacggagcaaccaagggggctgctatataatggaatcctgttgggacgggatgatatctaaccggtatcaggcgatacttgcgaggtatcaggtgatatctacaagatatcagacgatttctatcatgtatcatgtgatacttgcgaagtatcaggtgatacttgccaggtatcatgcgattcttatcatgtagaaggtgatacttgcgaggtatcaggcgatacctaccagatatcaggtgatttctactgggtattagaagccgacgaccactaccgccctccctcccttggctccagccaccaccatcgctccctttcctggctccagccatcgccgtctctccctccccggggtccggccaccgctatcgccgcccctccgtcccctggctccggccaccgctgcccctcctctcttcgtcgatgtctcccctgccgccggcttggccgcgatgcgccgctgcctcgacacgacgcagacgaggtcctcgatgccgcgggagcttaatgcgcagggctcatcgccgatggccgtgtccacatctcgccgagcgggtcctcttccccggccctcgccggcagccacctcctcctcacggctaaggcgcttagctctctctcctctttgataggcaagggggtgaaagggatcccgtcccgtcctgatggaatccctgaaatttttacattttggtcctttttgaaaacttattttacaaatagacccc

SEQ ID NO: 7271 - DNA, 9360 bp, Oryza sativa
atgatcttacctctaaatatttaggctgggacttaaccgatcagagatgggagaaaaatatttgctcccggttagtaacttcaaccgggactaaatatagatctttacttctgggtgttactaccaactgggactaaagtgataatctttagtcccggttagtagtatcaaccgggactaaagatccttggtcccctgacatggctctgacagggtataaatcgggattaaagatcaaaatttttataaccgagactaaaaacaatttttagtcccggtttttactagatctgggactattgtagaaatcagccgaccgagcaaagatcatttctccagtaggatctgagtcattctattcactataattaaattaacaatcataacctacatcgtatatatttaaatgcaacgtgcgtattactaaaatatattttatataaaagtttaaaacaaatcaattaaatatattttcagctttataatattttatatttaattaatcttgcactaatgacttgcgtcatttcatgtgtcctggataagctcagtcatagaactagatcaaacaaagcctaagtagaagatatatgacatcggtatggtgtgaaaagaatatatacgatccttaatttttaaaaattatactaatagagaaaacacataatacatgaaaatagattcatgataaatttaatgatatcattttgacatatcattactttttacgtagggagtggataacttttgagaattgctagtatcacaattagagttgtttttatttttaaaaatgcaagtataatttaactattatataatatatatagttaatttatttttgtttttcattggtgtttcgacgacatgcgcctaattagaaactcaaaattacgtatatttgtacacgtaataaaggcatagttaatatgggcagtttccagttccaagtgagaaagaaaagaaaaaaaaagaaaagaaaaataatgtcagtaattcgcccggtgtgcatacgtacgtacgtacgtttttttaaatacctactaacgtacttatgtgcacgtacggcaatttaattggagataaatttaatcggtccaccatattaaatgaaaatcgatggctagatgtttttttagacattctataattattagaacgccacatggcggtctaggagcgtttttaggggtcctatgtagcggcttaggagggtttgtaggaagtttaatggacttttagtatataataatagaaatagaagatagatagataatagatagatatctcctagtttttcaaggtatctttaaatacggggatccttcatactccaccattttatacgaataaagagaaataacaagtttatatctactaccttgacgtgttcttattctttgatccaaagaaaaatcgcaaaattctaaatgtcaccccaaacttgagatcctccctgtaagattatttgttgttaatacccgtcttctaatttatcttggtttgcgacccaaaccaaggtaataaatattgtttattttgtgacccgaatcaagcataccactaaggtaaattttgctacaggatatttcaaatttgtgcattttactggtagaaaccgtaaaaatgtgtcatggctagaacacccttaaaacctagtaatttgctagagaacactctcgaatcaatcagagagaaactcttcaagatgagaatgcccctagggacaaaagcttgaggctggagagaagatgcaatttaatataagctagcgatttacttggtatgatggcagatttcgagttgcacaattttcaaatttttttttactccaacgctatgtttaaagcatatggcccgggggcattctcatctatttgaataatttctctctacaattgagatgaaagtatcctctagcaaattactaatttcctaggatgccactactacctaaaccctcatacgggacaacttaatggtactggtttatctaaaaccgacacttatgatcccttcccacccctcgaacgtgtctacaattaaaagccaacatctttgatccctcataagtgccggttcattaaaaaaccagcactaataaaaatcaacacctataactctgctataattgtcgattaatagaaaaccggcatcaataattattagtattggtgtttttgaatggcgtgggtgtgagtgcgaccatgagaggagagatcatctttttttgtttaagtcgccgtttccactgagtaccctcctctccccatcattatccactccaagtctcatcacctctccgtctcgaagacctctacggcgtgggttgggagagggggaggaggggcccgccaacgatctctccagcgcaggcggcgtctgcctcttcttcaaccctcatccttgctcgcctcgaccaacacgcctcctcttctttgttgtagccgcgcaccggtcctcttcacccacggcgctcctctccgccgatgcagctgtagccgtcgatggtcctgttcatccatggcgtctcctcctcttcaccactgcagccactgacaacccgcatctcctcctcctctcttggggctggtcagatccatcatgagcacggtggctggaggattcatcgctgcgaccacaggcgacccgctcaacgacggcagcaacggcgacggtggtgttcttctatgtgtgattttgatcttctctctttctgtagactctaggatagcattgaatgttgattttgtttttcaatgttgattttgtgattgtgttaccggggtgatgggatgatggtgatctcagtggtgatcgggagctgctcgaagcatcgacttgaatcgagctagccttttttttttatccatggaacctcaaaggtgccagttctaaaactggcacctttgtttctcctcatcagtgcatcctactaggtatcggctaggaaatccaacacctatacatggcggtttaccagtcggcaccaatttactttttttaaagtgtcttttaatcattacccgttttttgatatctaccaacaaattacataaattttaggtgttctgtaccaaaaaccttggtgctatggttgattttgggttgcagattaaacaatatttaactgcagcccaaagaggagagtaggttgtcatatgggcctgtttgggggagcttctagcagctgcagcttctactagaatctccagttgtcagaagctcccccaaacagtccagctttttacccagattctgagaatctgtagttgtagaatctgaaaaatgaactagaagccagaagctgggttttccagcttctccagattctcaccagctagcttctcagcagctgcttctcaaaatcttaagctccccccaaacaggccctatcttaagcttctcagcattgtagcgtgggtgtggtccagatttgttgagcgagatattttatattttgacactctagaaaatgagttttgataattttatacaatggcccagtcatagactgagatggccctacttgtcatcgtcacaagtgttaattttaatggaagtaacaattagtaacgtattgttattgaatggacaactacgtcacgtcgaaagacgtggttatctcaactgtggttggaaagggaaacgattgtattacttagtgaaaattttttggatccccctattacatgaccctagggggctatttatagccccattacaggttctccctcttagggtttaggttttacaggggaatttacatggttacccttatgatagggacattattaggggtacacagtgtcctttacatgtttgggcccctattggcctaggtagcttggcccattcatcttggtgaagccctccgagagtgcgatggcccgctgggccttctcatgtgtggtttgatgcttggcgaagcctatgtcttcgccccaaagccttcgcacgtaccgctttcgcccgggtgcccatccgacgaggtctcttccagcccatacggttctctcttcgaccttcgccgcttgcctccggtctgagcttgttgcctaagctttttggtttcggtaggtccggccgaaggcccttcgtggtgtacctccaacacgtatagagcgtcgaaacatcaaattttattttgttgcactggtggagaaaccatctttggtcggttgaccaaatttcacaatagtcccggttgtaataaaaaccggactaaaaattatttttagtcccagttcaaaaggttagagctacttttttatctttagtcccggttcaaagaacaacaggagatgttagacccctctattatctttagtcccggttggtgttaccaaccgagactaaagatctatttttagtcccggttggtaataccaaccggcaaaaagatcagcatgcgcggcggagagaatgaggcgtgcgagagatcgaggaggtggaggcgacatcaattaataagttctatctcctcctctctcaccttatctcttcctcctcttcaccccatctcttcctcttcctcctctcctcattctcttcatctcctctcctccccattgcggcggcggctgggtggcggtggatccggaaggggaggcgaccggccaccgccggatccgaagggggaggcggccgggcggcggcctcgcgtgaagggccggcgcggaggccggtgcggcggcacgcgatggaggccggcactgctgcgtggattttttttcttttttccttaatgtatgattcgttctgtgttgaatgtgtgattcgatctgtgttgttgttgtgaatgatttggggatgaactattatgcgaatgatttgggataaactattgcggtgaatgatgtaaatgatttgttgtgaatgtttgatctgatatatttggacaaagaacagtgaaaaagaaagagagaaaagaaaaaaaaaacctccagtcaggactaaactaaagatcaatctttaatcccgggtatttgaaccgggactaaagatagtgatctttagtctcggattcttactgccggttggaaaaccaggactatagagggttaccgaccgggagtaaaaagggtttctccaccagtgttgggctggttttttacgagccagatcggggttgctattgacgtcaggcccatctcagaaacacacaaagcgataatcctttttatttttttcaaatgctctcgcagacagactgggcaatggccggcggcttgtttatgatttttggttcatccgtacgcctcaccattggctgctcccaacctcctcctgcctctcccttcctccatcggccagaggaatccagcgagggcgttgcgggcggcgcggtactggcttcaaatggggatttagggcatccctcgatgatatatatggtcagtgaatcatctctcatgttgcaatttttcccctgccctgtttctacacatgttaagtttgctctagattttggctcagttcgattacagcttgctatttgggattttctctaaccagcaaacaaaataaaactggcatcttgtgtttgaagccatgtgaaaaagagacaaaaaaatctgtatcaaacacgcatcaattagaacatatagacaactaagcttagccggatagagaatttctaatggtgatttttattccaggatatgcttaattgcttaccacttctattacacgataaacccaaattgatagctaaacagatttcactacatgcaaatagttctcgaaggaaaacaaattcctgtgaagctaaaggatatgaaagcctatgccattatgcaccgtagtaacatatggacatcagtaacaatttggtgttggaattaatgaatgggccttagcccactcgaagattaattctttggaaaatcacaaaagcccacctcatgggatggcatgcatgtggagtttagtaccaccttacttattctaggagagggggacctccttaaaagggaggatgtcctcctaaccacttgaagcatgtgtggtggagagaagaggggaaacacacgcgcgcgctcgctcgcctcgcccgggtagggcaggcggcgcgcgtgcacgacgtacgcgtcgaatggtccgaaaaattgactcctcacccttgcgcagatgcagcctccttttgcagttttgttttgctgcaaattcggatttgtttttgttttggaaacgttccgaaaaatccggtgcgtgcaaacggcgtggagtccggataagttacgcgcgacttatccggttcggttacgcgcagtagagatcgtgcgggcgccctgatcaagcgacccttctctatataaaccgacctgccgtcttcacgcaacgattgcgaaatcaatctagggtttgcctcctactctgtactgcgccgtcgctcgtagactactccatcccgctcgccggcgtgcaccggcgatcgggagagcaggtctccggaacctctgcctttgacgtcctgcaccgggagaaggcggcaataaggttttttaggaagcgcttcgcgcgactgctccctgtttgttcgcgacggctcgccttcctcttcgctcgcgtgtttcatgtcttcgtagacacctgcgaaaagtttcgaccaagcaaccggtctttccgtcacctcggtatgtgttcaatatgttgcgcatatttgatctgttcatgttatactgtgtagtttacatgtatagatctaatgatgcgttcattctagttttcatctgtaatatcatgatttatttatggaatagattaaatcattatatgtctataatctcaacaatccaaaaaccttattataggcactgtgattttactatggctggttttgccgatgcactgagaccggataaattcaccggtgtgcattttaagagatggcagatcagggtcactctgtggctgacagctatgaaatgcttctgggtgagtactggcaaacctgaaggagttcttactgctgaacagcagaagcaattcgaggaagccactactctctttgtgggatgcattcttagcgttcttggcgatcgtctggtcgaggtgtatatgcatatgaccgacgctaaggagttgtgggatgcactgaatactaaattcggtgctactgatgctagcaatgatctgtatatcatggagcagtttcatgactacaagatggctgacaaccgttctgtagtcgaacaggctcatgagatagaaaccatggctaaggaactcgaactccttaagtgtgtcttacccgacaaatttgtggccgggtgcattattgcaaaactacctccatcttggagaagtttcggtactgcactcaaacacaagagacaggaatactccgttgaggggttgattgcgtctcttgatgttgaggagaaaactcgggaaaaagatgccgcgtctaagggcgatggtgggcagtccagtgccaatgttgtgcacaaggcccagaacaagagcaaggggaaatacaaagctcagcagaccaccaacttcaagaagcagaagaagaacaacaacaatcctaatcaggatgagaggacttgctttgtgtgtggccaagttggtcatctggctagaaagtgtccacagcgcaaggggatgaaggcacctgcagggcagacttctaagtctgctaatgtgaccattggcaacactggagatggaagcgggtatggtaatttacctactgttttttcagttaatcaatctactaattggtgggttgatactggggccaatgtacatgtttgtgctgacatctcattgttttcttcttatcaggtcgcacggggttccaccgtcctaatggggaatgggtcacatgcttctgttcatggtgttggcacggtagatctgaagtttacttcgggaaagatcgtgcagctgaagaacgtgcagcatgtcccttctatcgacaggaatcttgttagtggctcccgtctgactagagacggatttaagttggtttttgagtctaataaaatagtcgtgtctaaacatggatattttattggtaaaggttatgagtgcggaggcctgttccgcttttccctttctgatttctgcaataagtctgtgaaccatatttatggcactgtggatgatgaggctaatgtttggcattcacgtttatgtcatattaattttggcttgatgtctcggctttccagcatgtgtttaattcctaagttttccattgtcaaaggttctaagtgccatagttgtgtgcaatcgaagcaacctcgcaagcctcacagggctgccgaggagagaaacttggcaccactagaactcctacattcagatctttgtgaaatgaatggggtgttgacgaagggtggaaaacgatatttcatgacattgattgatgatgctactagattttgctatgtgtacttgttgaaaacgaaagacgaggctctagactattttaaaatttataaggcagaagttgaaaatcaacttgacagaaagataaaaaggcttaggtctgatcgtggtggagagtttttctcgaacgagtttgacttattctgtgagaaacatggcatcatacatgagaggacgcctccctattctcccgagtctaatgggattgctgaaaggaagaaccgcacactgactgacttggtgaatgccatgttggacaccgcgggactgcctaaggcatggtggggggaggcattgttgacctcaaatcatgtgttaaacagaattcctaacagaaataaggacaaaacaccatatgagatatggattggtagaaaaccatcactttcttatttgcgcacatgggggtgcttggcgaaagtcaatgtaccaataacgaagaagcgcaaacttgaacctaagactgtggactgtgtttttctgggatatgctcatcatagcattgcctatagatttttaatagttaaatccgaggtaccggacatgcatgttggtacaattatggagtgtcatgatgctaccttctttgagagctttttcccaatgaaggatatacatagtggttcgaaccaaccctctgaaataattcccagttcaatcacaccaccagaacaaactgaacatacacatgaacttgtctctgaggaggatgtcagtgaagctcctcgaaggagtaagagataaaggacggctaagtcttttggtgatgatttcactgtgtacctcgtggatgacactcctaagtcaatttcagaagcatatgcatctcctgatgcagactactggaaggaggctgtccgtagtgaaatggattccattatcgctaacgggacttgggaggtgacagagcgaccctatgggtgtaaacctgtggggtgcaagtgggtgttcaagaag

SEQ ID NO: 7272 - DNA, 15847 bp, Oryza sativa
gtcgcccggtgagtcaagttttttttttattttttttaatttgtggtttgaatgttttgatctgtgaatgaatctatgaatcgatattgtgaatgaatctaggatgttgtgagtgagtatgtgactcgatgttgtcaatgaacctgtgaatcaatattgtgaatatatttgtgatgttgtgaataaatatgtgaatggatattgtgaatgaatttgtggtgaatccgtgaatcgtgctatggagttgtgatgtggatttggggtttgatttgatgatatgcataccactcgattcgggagaaaataaaaaagaaaaaaggaccagctgatggactgccgctaccctctctttagtcccggttggtaagatccctatctttagtcccggttgatgtcatcaaccgggactaaagatcgatctttagtcccggttttttcacccgggactaaagatagcgatctttagtcccggattggtagtcccggtttgaaaaccgggactacagggggttacgaaccgggactaaaaagcacttctccaccagtgatggtttcaccaagcatacataaatccatatactcagccaatgccctatgatagaattgttagagatgccgatcgaacacattacatgtctaacaaactcaacgtacagtataggatagttactcggcacacgtcgtaagtataggatgccggcgatcaccggccgacggccggtggctcgattacgcgcgataatccagctcgtgctgttggttcttgtgatcggcagtggcatcctcgtcgtgccggcggctgggggcacgggaagcagtggccatggtactctcccttcgttatgcaatttttagcatttaaaatatgtctaaaaatataacaattttctagcctacattattttctcaaccaatcatgactctctgccgtttaattttttttacctatattgttttttcgatcaataacaacccttcacaactaatttaatttcacaaacttcttaatacccgtttttaagcataaaactttttatatttcttaatattgtattcaagcctaaaaactttacagaggtagcataccattttctttgcatgttaatgtactccctccgtatcttaatatatgacgccgttaacttttttttatcaacatttgaccattcgccttattcaaattttttgtgtaaatataaaaatatttacgtcatacttaaaaaacatttgatgataaatcaagtcacaataaaataaatgataattacataaatttgttaaattaaaacgaatggtcaaagttagataaaaaatcaatggcatcatacattaaaatacggaggtagtacttttttttggtagcatttgtttggtttggggaccaagtgggatgggttagatctattctaattttttgggatggtatggttctagttgatttatggtatgggatggttatagttttttgtttggtaggaagggatcgaagtgggatgggatggacaactttgcacggaccattagtgtcgtctggctcccaatggctggggtgcagcagcgaacatggggacggtggagctcgtcggcgcgagcggcacacaggtgaaagagtggcggctagagggaggggagtcgacggcgttcgtggaggtggtggccagtcacaaaggcgaggcggcggcgggtcacggaggtggcgtccagtcgcggaggctaggcggcatccggatctaagaggagcagtgaccgctcatggaggagaggcggcggtgggtcgcggacgaatggcggcggtcacggaggtggaggcaggcgcggacgagcggcggtggtcgcggaggtggggcgatcgcggacgaggcggcggcgggtcacagactagcggctgcagtcacggatgtggcagcggtagcacattattcacattaccaattcacagcaatagttacattgacagaacatttacatagacagagagttctaattagtcatataaattgtccacactcacacttggatgcagaataaatattgacatacacataatttttagtcaatacaaattaaatcttcatggcttgcatgagatacaaattaaatctccatgaccaacacacggtgtctccggcacgaggaaagcagggcagcgcgcggtgaaaggcgacggagaactggtggccacggcggcgcacgcctagtgagcaaggctagggatccaatatggctgtggccgaatctggtgcctccgcgccggatttggcctaggtcaagtggccgacacggtaagatatggtcaggagggcagccgtacgtgggcttggcgcggctgaccggcaacaggcacagcaactcccatggccggccagtggtggtagaagggcagctgtgggcatagcgcggcggagggtgcagcacgagcggtgatggaaggaggcctgtcgtgtgcgtggaggccggcgatgagaactggccacccgcaccaacaatatgggttggtaccaatgttatgtcgagcatgagagctattggggtcgattcgtccaagctagctagctagccataccccccttcttctccatggacctcgtccactattatggttgattcccttccggtcatggggagctcttttggtgagacgccagcggtggcggtaatggaagaagatgttccagtgacaaagctccgtgggagttgcgacatggtggctgtgggaggtgacgataaggccgcgttggagactggcgggtctggactggccgacaatggggcactggtacggaggaaccgcattctagcaaaggttgttcagttggtgatgcactggtgtggcgacgataggtgtgggaagggtgttgcaggaaaaagcttagcccaggtttccctgagctgacaacgatgatgtctccgagcgccatgatcaccccttgggtcatcatcgagctgccaccctgccactccttaataggactctctaggtgaaaacctagtccaaatggacggacaatgatggcatctaagatgtcatgacctccctggaggtgttgcctaggaggtctttgttcctcgcctttgtagtcttttctcaacttgtcctatgtggcttattggttgtcgttatctggttggtgcgagggatgagttggtattcttctctcttgctctctccctcatcaaccactctacttagggatgatcgggaactcatctattatttttttggtggaatctatgtcggtggggtgtttgagacccccttgcaggtctagccctgattctaggggtggccggcttggtgcaactgccttatcttggattttgtagggagctcttagcacgcggttgcgatgtgtttgttttgtttcctgattataatcttttaagattgtaattttgtacttatttttatgctacataaatatgaaattttgttctatctagcgtagatcgttccaaaaaagttcaaaaaaaaagagatttgaaatctgggggtgggacaagctactgtagcatagctgaattttgtgcagtaatccttgaatggtgaagcgttcattcaagaacatcaacttctcaatatgtggctaaacctaaattaaggagctcggaactacctggacaagagtcaagaaagacaatgaaattaaagatttatatctcttttatctgttttgaaaagaaaacaaaaagaataactagttaactacattagttttaaaatataatctgtttttgcacgtttttccaaaataaaaatctgaaaaatatacgggaatgtgcgcttctaggcacagtcgcacagattactgtacgtgtggcaccctgccggccggtatcagctgagtaattatggcgtgctcagtgaccctcgagtcacccacgcgcacggcggctcaggggcgaaccctagccgccgccgccgccacccaccctcctcctctctttgcctcgccaccgccggagtttgccgccggtcaaccggtgtcatatccagatttttttgtttcaggatttataaattatctaataaattattaatagaatttaaattaaatgttctttaatttacaagtgaagttaaatgtgggaaataaaatttcctaaatataaagcatggatggatttaatttttattaaattctccatgtttaagtcaactctctgaaattttctcggatttttcagagctcaattcctaaatgatacgaagaacagttcagtaattatttgatcaataatgatctaattataattgttaagagcttttcttgtttaaaaatccttaaattataaattgttgtttaaaaggaattattagaaatgattttaaaagcttaaaagagaagatctaattttaatttgttaaatctcaatataaaatggggccagataaaatttcattaaatactttgcttaattctataattcctagatttttctgggatttatttgagctaaggaagtatttttaataaatggaattgcatttcatgaataatttaaattgaaaaaggttttaaaagtctgttttggctttgggccgaaagccggcccaaaacctctctctttctctctccctccccggcccagtcggcccagtccgcgccgccgctctcttctctctctcagtcgctgacaagtggggcccgtctgtcggggtcgtcgtcctcctcgcgtcggccgccgcccgaaaccctagccgagccgctccgccgccgctttccaatccggtcgcccctttccttctccggccgaattgatagaggggaaacaatcttcgggatctcctctacctttcctcctttggaatcttcgcctatttcggtttggaaactcgtggattcgaggtcgaatcggatcggtctctttcctccgaaccccgatctttccttcgccgtctcagccgccgtgggccttcgccgtcgcctccgagcccctttaaaaggatccccggtgtctcctctacccgccgccaccctcgcctttgtctctcgccgtcggaagcgccctagcgccgtgagaccttgtgccgccgccgtcgccgccgctccagccgtgcgccgccgtcgctccagccgtcgccgtcgctcggggaggtcgtcatcgtggtcgccaagtcgccgccgtcctcgtccgccccttcgccgccgccgaagaccgccggagcaccgccgtcaccgtcgacccgaagaccgccgccgtttcttcctcgtcgccggcgctgtccgttgctcttccgccgcttctttggtcaccggtgagttcgccgcgtcgccctctacccgttggtgccctccgttcgcgtcgccgcgccgtcgttcgccggcgagcatgcaagcccgagccgccgagccgccgccgccggtggtgacgtcatcgctgacgtcatcgtcgccctctcccgtgagccggtcgtggaccgttggatctcggccgtccgttttggatagggttgatctcggccgttcgttcccgtgaactgcctccgtgcgcccggtccaccgcaaaccctagccgctgacgcaataatcctccttttccttttcaaaaataattcattattgcgtcataattcaattaaaattcatataagtgttttaatccgatttaatctttaaaaattcataactaattcattgtaactcagtttaatgtggttcaagttgcaaaagttgtataaaataaagatctacatattaaaattgtccataaattgaattaaatttatttaattctttttaaatgggctttaattatatttaatcttgtaaaattcataataaattcatttgaagtcagaatgaggccgttcaagtctcataattcatctaaaattatgatctacatgtttgtttactttttatgtattgtttatttggtttttattagtcttttttcgttttgcgtgttagcttgtcgtttccgtcgttgcgaaggttcgcgagtgcgccggaagtattcaagaagattaattgaagaccgattattgcaaggcaagtcacacagatcctaaacacaatcctttgagcatgttgatcctatatttaaattctctatttatttcaactgtgcatttattttcgaatgtcaccgggtggtgtgaacttattcctttgttatggccaatttgcattgattactttattccttgataccctgggttattataacttgactagttgggctttatatattggttcagctagatattagatatgattgcttagccatgcttagaaacattagcacactattgggataacttatgactcactattatttaatgatggcttaatgatagttcacgatggtcaatcgtgattggttaaataattacttgccaactaaaatatggtaaaggtgggttgtgagcacatggttttgagagtcgtgctcatgacaattaaggaccggttcgcgagctactattgtgaaacattaaccatgccaaccacaagccagcgtgggcaacggctttaccttttgtataacatggttcattgcggggcaccagactgagaagtggcggagataagcccacgggggtcgctggggagtccatgccttgtttataagggggtgactatgatccgggaatggtgcgctgcggtggattgtgttatgcaaggggtaatgtcacagcccctttccgaggtaccatggtggtaatgaggcacatggtgacatgatgtggggctgtgtcttgtgggtacagtggtacacctctggccagagtaaaactattcgaatagccgtgcctgcggttatgggcgggttgagcaatgttttttgtgattagtctcacacctctcacaataattatagatgttatacctggtaataatttgcttagctcctggtttggagattagatctgtacagccgggtatggttgttcaggatggttgggcctgtacagcatgggtgtgctgttcagtgttgattaaaatttctgattaattactctactgttttagtactcttaactccttgctaaatgctgctttcgcaaatgagcctatattatgccatcctttggtatccttgtgcacttgcatatttgctgtgtggcttgctgagtatgtcatatgctcaccttgcaataatcaatcaacctcagttgaagaaaaaggatccagaaggcgaagacgtttggcttataccccagttgagctgcctgtgggagtggagccggagcttcgctagattttattttccgctgcagttttcttcatggtgaggactaagtgcctcttaagtaagtatatatcgttttagttaatttgatgaatctgtatattaaattgtcagtttgtgtacctcggctgattcctggacgaggattttatgcacaaataagttcggaaattactagtgaatttccgggcgtgacaaccgggcggggagccgagatggcggtggcggggccataccgcggcgacgcgccgtctccggcgcgagggaggcggggcaaagcgcggcgaggaaggtggggcagagccgggcggagtgtggcgcgccggtgggcgagggaggccggggatccggcaccgcggtggccggatctggccgcacggcgcagggctgcggctgcagtggcgcgagggctgcgcggcggtggacggggcggtggcgcgagggccgcgcggcggcggaggaggcggcgttgcgagggccacgcggcggcagaggcggcggcacgagggccacgcggcagcggaggcggcgtcagcgcgagggccacgcggcggcggcggcggcggtgacagcgccggctccagtgcaagaacgagaatgacgccgatgccgatgcctcgcggggttgtgacgacgccggtgacgtcctgctcgccgctccggcagaggcagcgcagggaacgcccgcttggcggtgtgtccttgcctctctccggcctgttgtgtgcgggaaggagccgtggaatggtggactgggctagctggttgccgaggagatgacagggtggttcggcaacgactgttgtgtggggcggtggtggcaatggatgaaatcgctggcaaaagccttgcttagcccttggctggcgtgacgacgacgatgtctttggcgtcgttcccttgttagaggcgtcgttatggcgtctttctccgtcgccatcaatctccaggtgaaaactgtgttccggtttccgaacaggcggtggcggcgtttcacgtcgtatccttcatgggggcatcgtcttggagaacactacccttgcatcgattgttgttggtgtactcctgcgtcagctcgaagcactagataccttggtttggcgaggccttctccttggctcctttcttgtattggtggcatccagcttctttgtttgtctctgtcaggtggagtcggagctgctacgtcgttggggtgcgacgatgcttggcaacgataacatttgcagtttctctctaggaatgttggtgttgccagtacaagttttggcgtctcaggggctttggctgatgtccaaagtgtgagctcggtgttgttttgctcgtttggtggtgcctccaatgatattacgatcaccgtgaagtcgaagctgcttggtcgttggacggcaagctcggcaacgatgacatgcgctttgtgatgtcaaagtcgtgtgccacttcttcagcatctcgatgtcgatgttcgtctttggattccgccgtggtagtttggctagaagttgtgtagtgctccgtgtgctgtgtggtttgtaccggccacggttgagggacttggcgagtttctactcgccaagtggttgtatttttctttttctgtaaccctgtctgggtttttactcctgcttaattgaaatataattggcagttctcttgccggtttagtttaaaaaaaaaaattatggcgtgctcaactcttcacgtacatgttctgccgattacagcagaacagcagccagcaggtgttctcctggtctgatctccagcagtagtagtaagagagtatagcaaactgcaaacacactgataatcaataggcgatgatcgatcgactgatcgagcgctggccgtgcgtgcgatgacagtagtgcggttctgctccccgcgtctccttctgctgtcgctacttgttgtaactactgtcataaagaccaacaaatagacacagtccaattttgaaatgttaaattgaattaaatatccaataattaattcgttagatctcactagccggaaacgttcaagtcgcgcgtttcgcataatctccagcgcgtttacaccttggtatctatactacttaagaaaaacagtgacggtgacaatgaatctatcaccccacatagcctcattggaaattttcaaaattatcctttgacttccaaatattaaggtgaatgttccctatagtaaaacgaggatggataatacatctcatagaaaacatattttttatttgtttcaaacaatatctatatctatactatctatattattttaaaagaaggtaggtgttgtagcagtcaatctgccaccccacctacccacattgtaaattttgcaaattactctttgaacctcttaatatcaagatgaatgtttcctatagcaaaacaaggataaatgtgtacaacatttcatgaaaatatatttttattaatttcagacaatattataatttatttttcttctatccgtggcggacccaagattggttcaaggcccgagccagcccatatggagatttaggccttatttgttgtttacatggtgaaaaaattatcatcttaatggaccttcacacctagaccttggatcacggcccaggtggcccaaggcctaggtccatcccagtcttcttccggttccaatagcaacaagcttcactatatacaaaatacaagtcacaagttgctggttggcatctataaggatctcatcggtgtctattctaaaacctcatcactgttgactaactgttactggttggaaaatccgatctttatgtgggtttttcaaccattgcctattatactttagtggcataaatcataatctcccccccccccctaaatatgtacaaaccctagcctatgtctagtttgaagatatagtcatacagacataatccatatgtaggagtaattatctagagcccgtcaccgataataactattggtggcgggcttatgtttaggtccgattgagattatctttgtaatctttgttggcccttaaacataagcatttaattttcagtgatatgtgggccgtctatctaaaactcgtagtaactgcatgacaatagcgttccaccgtggtagactcgtcccgtgcatgtttggacgggagcggccggccggcggcgacgccgtgcaagactcggcagtaacaagtatgctctgctgacgaatgtagtccaccaaatcttagtcgtccactgcacgccatggtttcacgaggcatgcataaatctatccaccgatcagccaatggctgaatacattacatgtctaacaagctcaacaatcagtaagcatttataaagatagtttttctagactgaattatactttattccatcttttattactaaaatttcactgtggattatcctttagttaatatttttattttagagtaagtaaggttatctttgcactttgcaccatattaaatcacttctctatatctatgctctcatctagcaaagaatagcctaaggagtaagattacggtgtataggtgccaacgtgttcaagatctttgatgtgtgttgttgcaagaactcaacaagtgtatgtctagtgctcctgtatccaatgtgcccaaacaagagcggtttttacatatttatacgcgagtatataagagaaaattccttcggtgcccctagccctacaaaggatcttgagtggctggccagtgggccagcccttggccttttggcaacttcacaggtggtaggaaggagacacccattaaggaagcagtgctgatttccgagggagcccgctattacccgggtaaagacatgctctgggtaatagcagactcttcgtctggtcatcatcaacagtgtcagaggtagttgggacgcatggtgcgcatttattccaacccactagcgtctgattcctgacttgagccgctgggggcatattgagactttattcgcccccggcagcgcggcaagctccagaagcctccggactccgaagtctctagccacctccggagtacctttgccgggctccagaagccctccgggttccaaagctcgagatgcctttcgaagccccgtaacccttggatactacggcctcccggatcacccctggaaccctcctggcggtctccgagccttgccaggctccggagctcttggcctccgcgggagctgtttctcctctccgggacccctccgtagcctccggagccgggggctaaagtggcatcgacccacggtcatctccccggggaggatgattctccggagtgctgtagcccttcggaggctgacccctcaatccggagccattccccaacaatgtgcttaaggaaagtttttcggatggtagtctagagtaaaacaaagaaaaaacataattcaaactgaaaagattagcttaaaatgtttgtttgaagcgaaactctgataataaaatgtgacattatattaaaggcaattcaattttctaaaagtaaaaaccggctatatttctcgaaataaatgcagggtcgtggagccacgaggacacccttcctcgtccccgataagacgacgaagagacacgattgtggtactcctactcgcctccgtgagttctatatatatatatgctgctcgcctgaacatctggcttgttagtttgtaaaccatcagtaatatatatagcagcagatagttataccatcaccagctcggcacacgtcgtacaggatgccggcgatcaccggccgacggccggtggctcgattacgcgcgataatccagctcgtgctgctggttcttgtgatcggcagtggcatcctcgtcgtgccggcggctgggagcaccggcaaaaccggcggcacgggaagcagtggcaatggtacgtacagtacttgctacatcttaaaatataaaaacatttagcattcaaaacttatattaaaatatgacaacttttcgatctatgttgttttctcaaccgatcaaaacactccctcaattattttctttacctatatcgtttccttaatcactaacaacccttcgtcattaatttaagagcaaatttcactttgggccaccttttgttaccgatatttcactttggaccaccatttaagtaatattttcactttggactagataaacctgcctttgtttcactttggaccacccgactctcttctcaagcatatgaaccatctcgattacatcgtctctctactcgttaatgaactaccacagctatatgtaagactatttcttcgacatattacaagttggatgtagattgataaaaaagtaagggtggtccaaagtgaaataaagataaaaatacccggtctaaagtgaaaacattagtcctaaggtggtccaaagcgaaacatcagtaataaaaggtagcccaaagtaaaattaactcttaatttaatttcacatatatactctttttagggagaatttgaaccatgctacacaaattttgcatgccaccctgacccatatgtcattgactcatatgggtcttacatatcattgagatatgggtggcatatctcaaattttgcaaatatagggtggcatggttccaacaaaacccatattgaagcctaaaacttcttatatttcttaatacctaataccttattcaagcataaaaacttcttatattttagtttagaacagaggtagtgtaccattttctttacctgttagccatgtatactttatttaatttggtttctcctagtttatatatggcttgcttactttttttttttttgtgtgtgcaggtcgaccaactggtacgggtggtccgtctaccgcatcaccgtacaggacatatggcagacgggttagtgcggttagtggtttcagcgtaggctagccatgacaggtctcggagggcaatggccgcaggcggcggtgacgaatgctcgtgtcttaattagcacagaagggcacacgagagcagcaggcgcgtatgtcgcatgtctggttcattcgttatatgaaaactatctgaattcaccgtcgaaaattgtgccgtcatatataccgatacgtagctcagtttgttgactagtttctgtaataagatgaatttactattcacggtgtgtagaactgtagattaactatatatatgtgactgcaggctgaaatttattttgatttcagccgaatttctcaccggacgatgctaccatgggttggaaatttcggactgaaatttccgaaatttcggtcatttcggaccactctgatatgatattatttcggccaaaatttttaatatttgttaaaatttaacaaaattttattcaaaatttcaaaaatttcaagctgaaattttggtatttcggtgatgtccaatcaaatcggctaaaccaataggtttaaccctgctaccttgtgctcattccgagcagcctcctgttcgctacacgcacttcatctgttgttttgtcatgttaatgggttgaaaatccattaagctgttttgtcatgtttaacaaaagcccagaacactgttatgttttcctaccacttgtgttttatcaatgaggacataaaattcagagggcaaaatgacgacataattttgcaaatctgaactagaaagaacccaaaacttctgaattcacgagtacaaattatactaccaatacaacagaaacttggataatatggcttgacaggggtctgcgtgctgctccaattgatccccgcaacaccgatcagccgtatcatctcccaacgatcttcttcagccatcagtgtcatgttgttcagagcataattaagtaatggtgaactcttactcagccactatgcattcttgtagacaataattagcagctcaatgcgtgaaaacaatgttatgaataattgtcaaagataagtgtttgttaaaaatacggttatgtgtttctaaacagtgaacaacgtggtggctagcattgtgaggccggtcagaccgggtggctgccaccagtcagaccggtggtgttggtgcgatctgaccgagtagcccgatggtcagaccagtagattccaagagggagtaggttttcggttgttttcatggaatttctataaagatttcttcatgtttatgacttctagatggtttctattcgtatgtgatactattctatgctaatgtgagtcaatttggtatgaacttgtacttggacatggaatttctttgttattcatgtataggtgttgcttgaggctacgggagtatagccgatgatagatcgggactagattttggagaagttgagatccagacggtcaaggatatcacatgggatgctcatgctagagagcaatgcacacggaggtaaatgtttccatatatatgtcatacacgtgtgcattgtgcgcttatggaaagaggagttaaatttggaaagattggagtgtggatgttgttttcctgatttggtaggtttcctatatgattgggagtcctagttatagttggattcttggccaggggcatctacattgtggatataaatagaagatgggttgatgctagaagatattaactctttgggagaaaaaaattagggtttgcttcgaggtttcaattctagttcgtgaattgagagatgggtactttagatgcaccttgtaaacacatattgatgcaataaagttgatttatcttcaaaagcatcttcggtgtgtttttctctggaccccgacagtctaaccgacggcataggagtggtcagaccggtggcggtgataatatgggctggtagcaacgttgtgtcgagcatgcgtgttagtggggccggttcatccaaactagctagctagccataccccacttcttctacagggagctctctactactattgttgattccttcacggtcatggggagctctttcggtgagacggtagtggtgggggttggggaataagacgttccaatgacaaagctatgtgggagttgcggatggtgggctatgggaggtcacgatgatggccatgttggagaccggtgggtttggactggacgacagtgtggcaccattgtggcagaaccgcagtctagcaaaggttgttcggttggtggagaaccgaggtggcgaagataggtgcgggaagggtgctgcaggaaaaagcttagctcagggtttccctgagctggcaacaatgacatctttgagcgccatgatcgccccttggggcgttgttgagctaccaccctcccactccttggcaggactctccaggtgaaaatctagtccagatggatagtcaacggtggtgcctaaggtgtcatgacctccccgaagacgttgcctaggaggtctttcactactacaaaaaagacaacaggtgaaacttgggaacctcacaaaggtaccggttttcccaacaggtacctttgagattccacgaaaaaaaaagttggctcgatgcatcagctcgattcgagccaagaagctcccttcaccccgaccaatgaaagaacattcaagaacacaaagaacactaagtcactaatcacatactaattccttcttggaatcgaatcaaccacactttacccccccaaaattaaccacaatcatcatcattgaatcacaaaaggaataatagaatcacaacaacaacaacatctaaaaa

SEQ ID NO: 7273 - DNA, 9873 bp, Oryza sativa
gcacaaatcacaatgccaaaagtccatcacatagtccatcacatattccacacatcaaacaatgccaaaagtccatcacatattccacacatcaaacaatgccaaaagtccatcacatatcccacacatcaaacaatgccaaaagtccatcctatattccacacatgaaacaatgtcaaaagtccatcacatagtcctcacatagtccatcacattttatatcacatagtgcaccacatatgtcatactaccaaccaatagattaacttcatacaaatcacttcttccgttggcgccgaattgcttgcgagcccggagtgtacctacatttgaaaatccaatgtttaaaacattttaaaaacaaaataagggaaatcaaataacatttgagaatggtaagctcattttacctctttttcgctgcccgagtggatcgcaagttgtattgcgtgggttgcgtcccttgaggcgcgtcgggaagctgcgacatgtctatatgcgacatgtctatctcctcggcgtctggtgcgacgtagtcctcatcctcctcgtcctcatcgtcatcgtcgtcgctaggtggagccggcgccttcccctttctcctcccttgcttaatgcgtgacgaggacgagccaccaactccttcacgctcttctatcctgatggagtgtcgagcggtacttggacgcgcggatagaggtagtggtggtggtagtctccgcggttggtacacgtcgtccaatccaaccgacctgcaacctaatcttgctgcaagtttctggcacctttgacgaactttctgcatttcaaaaaaaaacaagaagtttgttaggcataactcaagtaatgcaaagtgctaaataaattttacctctaaaacattgcggagtgtgttctccgtgtcctcaccacccctcggagcttggagggcatgccccatttcattcacactcctgaggagctctctcgactgaaagcgtgagaagatatatgttagggtctagggtgcaaatggaaataactttgacaaatgcaagaaaacttacgcctctgtctctaagtggggcgtgctccatttgatatccaactctagtctggacatcatagggattccgcccctcatcggagtcgcggtcatcctctatgtcggcttccgttcaagtagggcggaggaacagtctatatgtcctatgcagccaacgaaggtactctgagaaaatatgattttggtgtatagtctcgatgtacctgtcattccttccggctgtcctccattcatcaatgtatctattatgctctagcccccagtctttcaccttctttgttctcaccctgtcatacctagacaagtagaaggtgatgaaacaatagtgagcatcgacaagggttaaatggtacaaaattgaacattgacaatgaaagcaaacaaagataagaaatatttacttgggtaattcaactccagttgagatgtcctctaccggccaatcttgtttcttcccgaactgtcgcatgacacggtgcggaaggtggtactcaactgcccagaaacaaatcaatgggcactggtacatgaaatagtcagagtttcgattgcacatcgagttcagggtcaggcttgaagcctcatttgtgtggtatggtaaccactcaatctgcaaaagttgaagagatgtcgttggttagtatctcaattaaagaagtaaatgtctaactagaagtgatattggaagtacttacatgttgaggctgtaagcagtccatctcattgacataatgcttatatgccacatcccggtgagcatgtgcagtggcagtactctcaaaaaggtaggccactgtcttctccatatctggctcattgtagggccaaggagtgaagctttgcctccacttaggccttccaaccggtagtcttaaccacatccacagctgaatcaatagcacacaaccactcatgttggatgatggtgcctgacgacaacaggcctcacagagctctctatatgtccacgccaacactgttgagccccaacggaaacggcctagatcaccaaggttggcgaccaaaggaatccatatcgccgaagcaatgtcacccccagcatcaggaaacagaacccctcccaacaagtgcaagatgtatgcacgggcataacactcaacacgccatggctcagcgtcgtcgtcaagatgtgagaagttctgactcagccaagacaggggtattccattctgcttcttcttccccccttgcccctgctcaatgttcagtggaatgccaaacagctgctccacttgtgcacgccatccaggagtctctgtcctgcccgtcacggcatgcccccgtaatgggagggccaagatcatagccacatcctgtagagtgatggtcatctcaccactggggaggtggaagctgtgtgtctcaggcctccatctgtccacaagtgctgtcaacgcaggagcgttgaacactggcattcctctgctcacgaccaaggccaccccgagcaacccggccgcccttaggtacgggatgtacctatcgtcgaacactggaggggcatgagctctgactcagagcggttgaagtacctgcattagcaattgtaaatcaattagttaatataatgtcaaatacacgctaccgatacatatgcacaagtgaatcaatgccgattcataccctccccgcctcgatcgcagcctcgcgatgacgggcctcatagtacgcctccaaggctgggtaagtcggcggttgtccctcctcggccatcctacatgaaaaagtaataaattcaccgttagttaccaatgtgacatacattaaaagaaaatgaatgcgagaacatgagtaggaaaacaaaatatttacctccctaacacttatattttttttggacttcttcttttttggacgcttaggacacttagttttcttgtgaccctcctggtgacacaacgagcatctattttgcaccggcgcagcatcaagttgaacgcatgaaggtggtttccttccagaaccacccagacccgagtccatttcattcttgaatcgtttcgatctcctcttccctcttgttttaatcttcaaatttgggtcagcaacaaattcttcaccatcgtacggtggccactgtgtggggtcgaggtatggctcaaagcgacttgcccatgtgttcacaacgtgtaacgccccgattttcgttcgggattaaaaatcattaaataatgcattttctagaaattaaataaaatttaaatcaatttaatcaagtgaaaatatggaggaaattaaattttcctttaaaaattattggccgggaatattttgtaatattctttgcgccctaacatactctccagaattttccgtgagttttcggagctcaagaagtatttttaaagtcacaaagatcatttaactcaatttaaataaaaaaagaaaacaaataaaatcccctcccctcccttttgggcttggcccaagccttcccctcctctcccgtgggccgcgcgcctcctccctctctcggccggcccgcgccttgtgaaagtctactttacgtcccctggtttccctcctctctctccatccggccgacaggtgggaccgtgggccccacccgtcagctcctcctcctacctctcgccggccaaccccaactgccattgccggccacgtcgccgcaaaatccggcgcccacccgcaccagagctcgcatccaacgacgtgggcacgatcacctccacgtcttccaccatttcccccactcgtcccacaaaaaccagtgctggccgagccgccaccaccccacgtcggcgccccactttccccgcaacgccggcccactccccctcgaaatccgccgcttcccggccctctcctcgtccccttgagctataaaatcaatccccgtggcctcctcttcctttttccccattttcccgagtccccccgccctctaccgtgctctccacaccgatccccatcgccgccgctcgccggcgatctccagccgcgcgccaccgctgctccacccaccggcgcgccaatccgccaccaccgtcggcttcgcgtcgccgtgccgcagcccggcctctactccatttcccctctccgcctccggaacaccgccgcctcgtgcaccacctctctccccctccgccgccgacttcagccgcccaccatcgtcgctctcgtcgtcgccgcacctcgccattcgcaccatcggcatcgccgtgccgagctccaccccggcatccactccgttctcccttccacccccgcagcgccatttccaccgtcgacccgagctttaccaccgcctaccgcctatggctgcctctagccgccatcctcaaccacctcaagccgcgccactgcctctgttagatccaccaccgcgagggcaagcccggccgcccatccctttttcccttccaccaccagaaccacctccccaccacgccaccctaccggccacctttttccgcctccggtcgccattcgccatcaccccggctgccgccgcgacgcgccagccgcatcgcctccctcgccgcgtcacgctcttccccggccgccgctcgaccgacaccttccaccgccgggagcccctccgtgttgtcgacccgaggagcaccgccgcctccctccgccggctgctctcgccgtcgccgtgcccctcgatgagctccgccacctccctctccctctctgcctccgcttcctcttgccgcttcccacgctgcgcgccgccgccctctgtggtcgatcgggccagccccggctgtgcccgtgctcggccatcgctctcctcagccgcccgatcggcttggccgacctgggccatccaacccgtggaccggcggtggaccgtccttgtggtcccggtccacggtggaccgcctcctcgtctcgctgacgtgtggggcccgcctatcggcgccggcctcacttgatgacgtcagcggcagcctttttcctttgtaaaaatatttaataattgcgcaataattcgtaataattctagaaattcatataaatggctcaaaacttctaaaattcatatctaattcattcgaactccgaattgagccattcaacttgcaaaattcatctaaaattgagctctacatgtttgtttactttttatgtactgtttccttggtttttattaaagtttttcctcgttttgcgtgccagcgtgtagaatccgtcgtttcggaagtccgcggtcgcgaggaaaagagtctggaagattgtttcgaagaagcaaggcaagtcacacattccccttgtgcattttgatcctaatttacaaatgttttatcgtttgcaaataaaattgcatgtcttgctaattacatgggatccgggtattacctatctgctcgcttgtgctatgtttacttgatatctgttctttgtcaaccttgggtaataaatcgactagctcatgttacttatgtgacctagctagaactttatgcttagccatgcttaattaccactagctcagttgatgggataattacagtattagacctttttagtatcagaatgagctgcgtgctcaagacatctggccatgtttcatggtcgtaattatccaactaaaatgcgactgaatggtgggttgtgggtgcatggttttgatggtcgcgcccatggcagttaaggaccggttcgcgggaaaccctggaagaattcctcgtactttccacaagccagcgtgggcaacggctgggcttgtagtgtagctttcctctagctgacgcatccaggcaagggtgggcgtgatgtagcggggcgggccctgcgacggcctctgtcgcttccggattcacctaggcacgagaggggactgcccgttgcccgctggggacaggggtgaaacctgaggtgtggtgtgcttggctagagggggttatgcgaagggtcctgtcacggcctctttccggtatgtcgtggtggcatgtcggcgcacggtaacgtgtcgtgaggctgtgtcttgtgggtacagttgtacacctctgatcagagtaaaactattcgaatagccgtacccgcggttatgggcggttcaccagattcaccgtgattagtcccaccctaataaatcgacccaatgcactgtagttcaggtgggttggttgagcctgttcaacgtggtgtagcgttgatcagtggatatttaatgctactttaattactcaatagttttactgctttgctcaataaaatgttttacaaccgcctttatgcaaatagccacaaaccgtccttgtatccccttgcacgtctgcatcattggtgtggcttgctgagtatggtggttgtactcagccttgctattatttccccttttcagaagtgtagtgcttctgagctgaagacgaagttagaagaccaaaactcagaccccagttgagttttgcctgtggagtggagctgaagccccgctaggatcgtctttttccgctgctgctgcgtttgtttcggtataaggactaagtgcctcttctgtaagtattttacgctttatttacgtttggaactatatattacttgtcgttttgtgtaccctggctggtcctggacagggatttaatacacaaaatagtctggaaatttgggctaaatttttgggcgtgacacaacggctcttgaagagaactgatatggcattcggttgggagattcctcatcaattgtatgaatcagataaacgtgtataagatgtgagcaaggcatatggtagagcaatggcctttggcaagaacatgagttcccctcaccttcaactttgaaggctcttgcgctgaatctaacaccaccacgcgttataccacccctctctgtgacctcgtatgtctttttctgcttatcgaaacaccttgcagtgtgtttgttcgccttacttttttgcaccttcatcttactatcaaccttggtggaccaacgctgccctaactggacttgcttcaaagcttcatcatgtttgttcacaaagtagtcattgcacttcatgaacgtaaatgatactatggccatcactggaagcttatgaacaccaactagcacgctattgaactgttcggccatgttggttgtcatgtaaccccaccggcggccatttctatcgtatgcacgagaccacttatctttatccaacaacttatcttcaaaccatttacgaggaccttcgggaatacgctgccttagtgcctcaacatccctctcaaatatccacttctcgtcaatctgacatattcttaggagctcttttgtctgatgcttgtccgcaccggccttgtggaaattagcactgaagtccctcatgcaccaccggtggtgaaccggtggcaatcctggaacaggagtcgtcatggcattcattataccagcatgtcgatctgagataatacaaacctccctatgcggcccaaccacaacccgtcggacaagatcgataaaccagcaccagtctcgtgaattctctttctccaccaaggcaaaagctaaaggtacaagttggtcctccgcatcagctgataatgcagtcatcaaggcaccaccgtatttcccagttaggaaggttgcatctatagctagtattggcctacaatgcttaaaaacctcaatgaaggaccaaagcaccagaatgcacgcataaaaattttcttggtcactccatcaatgttgacaaccctatcaggatgagtatcgatgtggtagaccatactgggattcctctgcttaatggcttgcagcaaagtgggcaaacggacatacgcttcaccccattcaccgtaaatgagcttcatagcctcctctcgtgccctccaagccttgccatacttcaccctatactggaaaacctcaaatatatacaaagctaacacagaagcagagagtgtaggttgcagttttatggcattgcataacctatttgctatgaactttgatgtcagctgccggtggctccctgaaccttcggcagtagcacaactatgttccttacctacccgtgatatcctccacgtgccactagacctcttagttgcatggaccttctatttgcaccgtgggttttcacatttaacagtgtacctcctatttgcggcagaattgacaacacggtatggacgatggtgcacgatggcgtactcctggagccatagcttcattgcgaccatggatgggaactctaaaccctttctgagaccatccacctgaaatggttctgacaactgatctaggttgatgccgccatctagtagtgcaccatgggcatgtgttaggtccctaaactcaggaatgtccggcttcctcccaaacaccttctcaaacgcacaacattcctctaatgctaacttggcattattagtaagtggaggaaatggacggtcatcatcagagtcttcagcaaattcaacatcatattgctcaacacttgcctcctcgtcaacatcatctctattgacttctactgagacagaatcgtgaccaccacttaattcgacatcaaagtaatcatctggattcacatattggcctgctacttctgtcgggtattcagggttgactccatacgacgaccaatgaacactcgccgacaaatgttcacttagatcaagcccctctggtactaactcccttttcatctccctcgctgcatccacatcatcagtaccgcaatgtctctttgatggtcctgcctcccataaattatttccaagcaaaggtctcttcttctctccttccccctccaagtcttctcgtaccaactcagtcttacttgcaccccctccacgacgagaataatatgtcacaaaattcttctcaacgtaatgataagaaggagatttgtttagatccaaattttctacggtacgaactaactttgatgcaaacacctctagagatctaaactgagactcttttaccaaatcaaagtaaacttcccattccaactgacctatcacatttaatatatacttatgcccttgaccaatatcgtatctcccataaaaacgaatctccacattatcctcggtccatccaagaacttctttcactcgtgaccttagttcatctagagttgggtaggtgggaaacaaaatggtcttcaatgacatatcctcaaactcaacatgtgcaccaacataaggttccaccactctatcaccgtagtaaacacgaataagtctatccatctacaccaaaacatcaaatgtaactttgcaacgaaaattaaatcttcattcctaaacgtagtccaaaccgacatattataaccaatgcataacttaaattgtcctaaagctactactccaaaaaaatatttaatccacctacaactatcaacaagtttactagtgcattacacatcgaaatattacaaatactccgtcatacaacccaacctagttctagttaactataatcaatttatataatgcaaccaaaattttcaccttcatataattaatggttaaaagtttaacctatagactatagcatcaagtccatcaaattaaaattactttcatgcctcaaccataatttttcatccatccatccaaccaaaccatccaaaaattaacattaccacatatatggttaaaaaaatcgtgacaccaatgagtacattgcaaacatgtagcactacaacaagccaatcctaagaacaaatgctaaaaatcacaaatttgggtaaaaaaggggttctagggttacccaccgatctacaaattcaaccaataaaaacgaaaaaaaagaggggtgaatgaaggagtctactttctcttcgatttccaaaaaaaaatcccgcgaaaaacgagttcaaatggagtgaa

SEQ ID NO: 7274 - DNA, 37589 bp, Oryza sativa
  unsure (1)..(37589): unsure at all n locations
cacggcggccgtgccgcagcatcgccaggacggagaagagtcgtgtcgcgtcgagtcgccggactctagtggtgtctgagctattgggcgtggcggcggcggccgcggggcgagcgggcgagcactggctggcagtcgactacggcctagagccagcggggggagtgggcgagcacgggccggcggccgacgatggtgtgtggccagcgtggggccggcgggaggtgggcgacaaccactagagagaagaaggagaggagagaggctgacgggtgggatccacattgctttccacggtggcacaatacggtggcacgccacgtaggtgaaagtggcaaatagttaagaaattacctctctccagtgataaattattaagtgcaaatctaagaggagcattttgataattggcaaatcttaaagtgacaaatagttaaattccctgccaccggtgattcctctccacttcactgttcctctcctcagctcgtccctttttcctgctgctgttggtgttgccctgctcatactatggatagagtttcctttctgcgctgtggatttaacattttttttttttgggaaagttcaccagttcttctcaagacgtgaaatctccttctctttttttttttgtggggttctgatttttttttttttgatcgtggttctctctcccttttttttttccaggtatcttgagcggagggtgcacgcaaatgagaaaacgggaattcgaaagatcgttttttttttccagcggctaacatatgtgaccgaagcaacaaaaactaattttaagataagggtttaatttgcattgctattcttacctatacaaaacctaaaaccagatgacaaaactgagcaaaaagttataaaattagttacagtttacaagccgaagctaaaacaaatatgaaaacgctgcaagagggctcggtcgatcgatcttgcatatgtactacacgtcgatagacaccagataaatcatttcttgcctccttcccggtgatgcatctcttctccggtgccgagacccagcattgtttacagattacaatcaggaaattaaactggttgtggtgtgttccgcagcaggttcatgttcagagctttgagcgaccttgcagattaacctggacccaaattaattaagaaccggtcatacatagggatacaggtaactaacccacgaatctacttataaatcaacataaatggattattttgatcaataaatagtttcgcgtgttaatcacttactcccttaatcataacatgactgaaaataaaacaattaaacggtacattgtacatacactcattgtgacatattgcaagcgaacctgctggccttaccttgagaagaacgagcaggggggtgttaaggatcaggaaacgagtccacaggtgaatgctgttgatcttgaccaggattacggcttggaggccctggaccaactggcaaccaaacaagatcagaaccaatcacacatgaatatgcaaataattaaacacatcatgtacacacacgaattgtggcacagatgtatgcaatcgcgaattaattaattacccagaggctgatgaggagggtgtttaggatcaggaaatgagtcaacaggtgagtcatgaggaccaaactgcggagcaactggcagccaaacaagaaccgatcgatatatcacacatgagagaaaataaacagtgttgtaacagatactagcatagacaagcgtatatatgttacctcgatgactaggaggagggtttttaggatcaggtattgggtcacgagggccatgtcggcttggatcatcatcggatggcgtaactggcagccaaagcggaaccaaattatgcagtgcatcattagtattcattccgtcttaaaatatactcccctgttcctaaatatttgatgccattaacttttttaaacatatttaaccgttcatcttattcaaaaaaatttaaataattattaattcttttcctatcatttgatttattgttaaatatatacttttatgtatacatatagttttacatattttacaaaaagtttttaaataatacgaaatgttaaacatgttttaaaaaatcaacggcgcgtcaaatatttaggaacggagagagtactagcgtattaaagccgttacctgcaggaggaggctttgactcgctgctgggtggtaggggacggaccacggcgtggatggtcagttctatgcttaaccctggagaggctggaggcgcgacggccgccgccgtaggggtgacggccggaggatcgccggcaggagcggccgccggcggagtggccgccacggcgtcgctgatgacgacgggtgccatcttactctgcattttcttttggttggctgtactgtagtctgtactggagcacacgcgagataactgatcagttgcttataaggctatttatacatgcgttaataactctcatatatatatctccatcggatcagtttcccatgacaccgtcacaccatggaacctagacgagtggcgtgcgtttacaccaggaatgtgatgtggcatagacttcaagctcagagtcagaaagtactccctggagaaaacaaatgtggcatagacttccaattttcaaagttcagagtcagaaactcggtggtgaaaagatatggtttgtcgggggaggtgctgtcctgcggtcaactatcaagtggtttgctcgtgcgtcagcctaaaactcaataaattcagatttcatggcgtcattcaatctcacaaattagccccactagttacgcggtggatcacgagcgttcacatctatattttcagattattctttattttagagaaagaaatgcttgcatatacacaatacgcataactcttatccacgataccctaccaataccggtttagtaaaaaccggcactaataggggtttttttttttttgtcccatggacttgtgcacgcactggcaagagaaaaaagggtattgataatatcacatcattatatatcgctggattgctagtcgaaccgtcactaaatacttctattctagtttttttttaaaaaaaactaacatagtaaaataactattcgtgttggtttttaggaataactgataaaaaaacgagccgagtgacaacggggctaagccgagccgagtgagggaaaaaatcttgaagtgtcaacccatcgctctctccttctctccctcttctcactagtaagtagtagtcccctcatcctctcctccgtgagcagcggccccctccctctctccttatgctgcattggcacccccccctctctccttggatctaccaccacagctgcagatcgatgcctctcccaggtatcttttttttttggtttgtagacgtgaattagtgccggttaaggatttcctttttttgttggtgaacacgaattactaccgattctaggaaccaacactattgggggatggccccgggcatcctccggagcccatagtgagtgacctcactccacctagggagccccaacctacgcgtcggtgacattgggctagctccagcccgaaaggacgaaccaatgtctcctcaagatgataagctaggcaccctccgaaaacccaaaggcttcgaataactatcaatgcttaacaagacaaggagcattcaatacttccacctaccaaccacctagttctaggacttcgagtggttgggttgcaatcaaggacctggaaatcttaggcccatccttgccaagatctgctaggatgctaggatccgcaaagctctattgacccaccaacataatgggccaccaagggcggccccctcaggaattagccccctgccccgaggagggggccacttgtcaatcgcccactagccaaggctacccggagccgtactaagaaccagctttgtaattccccatgtcataaaccctgttatataaacaagtaaccatgcctttgagcggcaggttgttcaataagtctatttcgctcatctcatacacacaagtctatttcgctcaactcatacacagagaactattggatttcgttccaacagcctccccccaacccaaccactccccctcccccacccccagcacccccgcggtccacaatgctactccctccatcctaatatatagggcgtacctgccctgaacgcagagaccaaggatgcgtacccgttttgctcgtccaacgtgcaacgcttcgcttcacgcgcagccctcgaccttcacgcgcagttgtgctgggagagagagagaagcctttttaactaaccaaactgataagcaaatattgcatgcgtgtaaacgggagtgtgagtcttgaatgcttgtatgcatatgtatgggaacgaggaaaactttaatgcttgcatgcgtttaaacggctgccgaggaggtgccatacgtcctatattttaggatggagggagtagtgttgtagttccgattagggaaatgatacttatgagggtttctatggttttctaaacattccgaacttgagaccgccacatcatcctcctatgtcaccatggggaggagaatgcatggaagggtgggagggagagaatccagttgggcagtggcttccatgcaagagagataatagagggagaggagccgcggcagaaaagagggagtaacacgggagagggagagaatggagtggaggagaccatatgggggatttggctcgtgcaattgattggccagcttcaaccgatttcactattggtcaggtagaggtagtatcactgtcaatttttaacgtgaaccagcaacaaaattatttttgatggtgattataaataaactggcagtgacgaaaggagttggactgatggctctttactagcgaatgcaatttgcatttgcaaaccgcattgtattagttgcacacttgcacttccagacaaattaaatcacattaggaagcggtcaatcactgcctccagacccagatcgatcacacaatctttgaagttgtgttttatttattcattgctcagaaaggatgaagccgtgtgtccatatttggtttactagcagcctagcaggactgcacgaggtcaagttgtttgctcttggcttggtcaaaataacccagtggatagacttctcactctgtattgaaccgtgaagcttgtaaaagaaagagacaggttcagaataatgaaatcagtacgtagtttcattgtgataatgaccagaaaaaggctattttctatatggccagcgtggatggacgactcaattttgcgttgtctcttttcagttacacggaagacaacacatctgtaatacacatcattacacatggactgatggacacaacatttacttagctgcgagggcacctcttaacatacacacacacacacaaaaacatttattaagaagaaattgtaaatgtgttgggattaaatacaagacctcgggttaaaatcatacacctcttgctactattctatcaagtcacacgctaaataaatgtgacttctagcaaatcactaacatcactaatattggtggctgcaggacttaaacattaatgaccacattacatgactgaagcttttgcatcaattccaacaaaatgtccaaaacttatattgttcaaccaaaatcagtttagtttgcaatatgtatttttttactatttattaattgcattagtagaaaatttatttattattacattatcaatactagtgttagaagacatacatgaacatacaattggaaataatataatttgatcctaggtagtagttgctaactacttcctaaaagaaaaaataataataatttgcggactgcatagtctgacttctccattgttcatggtagcaactggcaactattcaagttgcaaagagaacatatctagtcagaacacccccttagtccccaactacgtaaataactcaattgcaaggcttacttggcaactattgccacttcatattatacaagcttcaacgactacgagccccaagtaacttgtttttgaaagaaaacctccaagtaatttaagcagtacagaaataaataataaatggtaggtaaaatagtccatgggttgaatggaagccaacagacctgaggtgaactacaaaagcgtgtattcatggatcatccaagtccccacagtgtcatggattactagaaacctgatgcaatacagagtatttatgcatcacagtgcagctattgcaaagcaagtttttatctccatagaaacttagccacagagaagcaatggcctgtttgggtgtcctgtcttcaggcattgtatggctttctctgttcaccatctttgtcagtataccattagctaccagtgatgatcatgaaaatgatcgacaaactctcctttgcttcaagtcccagctctcaggtccaacaggagtactagattcatggagcaatgcatccttggagttctgcagttggcatggtgttacttgcagtacacaatctccccgtcgtgtcgcttcaatagacttggcatcagaaggcatctctggcttcatatcaccctgcattgccaacctcaccttccttacaaggttgcaactatcaaacaatagcttccatggcagcataccatctgagctcggcctactcagccaactcaacaccctcaacctcagcacgaacgctctagaaggtaacattccttctgaactttcttcgtgctcccaacttgaaatcctagatttgtcaaacaatttcatccaaggtgaaataccagctagcctaagtcaatgcaatcatcttaaagatattgacctcagcaagaacaagctcaaggggatgatcccttctgattttgggaacttgccaaagatgcaaataattgttctcgccagcaataggctcaccggcgacataccaccatctttaggaagtggccattcactcacatatgttgatcttgggagcaatgatctcacagggagcatcccagagtccttggtgaacagttcatctcttcaagtacttgtcctcacaagcaatacccttagtggagaactccctaaggctttgttcaactcctcatctcttattgctatttacctcgacgagaatagttttgttggttctataccacctgctactgccatttctctccctttaaaatatctttacttaggcggtaacaaactatcaggaacaataccttcctccttaggaaatctttcctccttacttgatctgagccttacacggaacaatttagtcgggaacgtcccagatagtttaggtcttattccaaaactagatctgctgaacttgaatgcaaacaacttaattgggcatgttccatcatctatcttcaacatgtcatccctgacaattctaaccatggcaaacaactcactcataggggaattaccatcaaacttaggttacacactcccaaacattgaaacattagttctgtccaataataggttcaaaggattcatcccacctactcttctgaatgcttccgacctgagtttgctttacatgcgcaataatagtcttactgggctcattccattctttggatcattgaaaaatttgaaggaacttatgctgtcatacaacaagctggaagcagctgactggagctttatttcttcactatcaaattgctccaaattgactaaactattgatagatgggaacaatctcaaaggcaaactgccccactccattggcaatctttccagtagtctcaagtggttgtggataagagacaacaaaatttctgggaatataccaccagagataggcaatctaaagagcttagaaatgttgtacatggattacaatcttttgacgggtgatatacccccaacgattggaaatttgcacaacttggttgttctagccattgcccaaaacaaattatcaggtcaaatccctgatacgattggcaaccttgttaagctaactgacctgaagttggatcggaataactttagtggaggaatacctgtgactctagagcattgtactcaactggaaatactcaaccttgcccataattcactagatgggagaataccaaaccagatcttcaaaatttcctccttttcccaggagttggacctgtcacacaactacttatatggaggaataccagaggaagttggcaatctcattaatctgaaaaaacttagcatctcagacaacaggttgtccggcaacattccatccactctcggccagtgtgttgttctggagtctcttgagatgcaaagcaacttgtttgcaggaagcataccaaattcttttgagaacttggtaggcatccagaagttagatatttcacggaacaacatgtctggaaaaataccagattttcttggaaacttcagtttactatatgatctcaatttatcattcaacaattttgatggagaagttccagcaaacggtatttttcgtaatgctagtgtggtatcaatggaaggtaataatggcttgtgtgcaagaacattaatagaaggtatacctctttgctcaacacaagttcacaggaaaagaagacacaagtctctggttctagtcctagtgatagtaataccaattatttctattgctatcatttgtttaagctttgctgtatttctttggaggaagagaatacaggtgaagccaaatttgccacagtgtaatgagcataagttgaagaatataacatatgaggacattgccaaggcgacgaatatgttttctccagataacttaattggctcaggatcatttgcaatggtttataagggtaatctagagcttcaggaagacgaagttgctatcaagatttttaaccttggtacatatggagcacataagagcttcattgcagagtgtgaaacactaagaaatgtccgccatcgaaatcttgtgaaaatagtgactttatgttcttcagtggatgccactggggcagacttcaaagccctggtgttccaatacatgcgaaatgggaacctagacacatggctacatccaaaggctcatgaacttagtcaaagaaaggctctaaatatttgccaaagagttaatatagccttggatgtggcgtttgcattagattatcttcataaccagtgtgcaactccactaatacattgtgacttaaagccaagcaatattcttttggacctcgacatggttgcatatgtcagtgactttggcctagcaagatttatatgcaatagattgactgccaatcaagatacctcgacaagtttgccttgcctaaaaggatcaatcggatacattccgccaggtagagatgagcttctaaactttttggcttaatttgttctttattatatacttgtatgaaagcagagcctagcatctagttttataacgtctgtaaatctgatgcagagtatggcatgagcaaggatatctcaaccaagggtgatgtctacagttttggaatacttttgttagaaattattactgggagaagcccaactgatgaaatatttaatggaagcacaactctgcatgaatttgttgacagagcatttcccaacaatatcagcaaggtaattgatccaacaatgctacaagatgacctggaagcaactgatgtaatggagaattgtatcattccgttgatcaaaataggcctatcttgttctatgccactgccaaaagaacgaccggaaatgggacaagtttctaccatgattcttgaaatcaagaacgcagcctcacacaggcatgcttgattaagctaagacctggcaggtcctgtttcatgtatagacgaagagtgatttcatagtccttgaagaggtacaggaggtaacatattttctaatgtaaaatttggtacctctcggtaccgtactactaaatattttggtacctcttggtgcctctcaaggactataaaatttctcgtagaacaatgcaccaatataacatcacgtggatatttctttatgaatgcagaatggttagcgacattattggaagatttggtggtagcacgggcatccctactctttgaatgttgaaaccttttatggtttgttctgtgcgacttattccttcatcgtctaatctctatgaaaaaaaaactaggccgttttcgtgaactgatgagaggaattgggagaaaaaagttaagacattgcaacagaggagagaagagtggacgtacagtagcagagaagagaagtgaagattaggaaggcaccagagacaacaagcatccaggtgtgccacaaatagttgcctgtaaatcagagctcaaggacattagggaaaaaattggacagattagagagagcatacagtatatgccaaatatatagacaaaggcgcaatgcatgaatatataaaagcatttataatcaagatttacaaatccgatcccaatagaagtgtggatgcctcgccgcgaaatccgcggtgtcgaccatggcctagtgggcacctgtgcaggaggagaatgcagcaaggaacagtttggtcaggtagttccatggcagggagaatacatggattgagattgggggctcaccgttgtccctgttcgcaattcaccatcgccggctcaccatagcgagctgcagagaaaggggggtaaatccggggggcgaggccccagggggagagggtagccagccgcgggcgtcggcggaagtggagcggaatgcggaagccggaagagctgccggcggcggaggattcatcagccgccgcggtcgtcttcttcttccgtccgctagcctagccatcctgtacggaggggcggcgatgtacgggacgagggagcagcgttggagtagagaaacaggacaaaacggacaatacgacattcctccatccttaagggccctttgaatcgcatggtagaaaaaacagagaaataggaaaaacacatgattctaacagaaattgaagtgtaaaacagagtattgcaagacacagtgaaaatccaggaatggtcgtttgattgaagcgcaggaaaaacgcagaaatcggatgagagagatagactcaaaagaaattttccaaaaggttggagctcttgccaaatttcctccaaaatccacatgcaatgtgccattccataggaatttcataggatttgaaaaacttcaatcttttgaatcaaagggccaaataggaaaatttcctataggatttgaatcctatgaaattcctacataaatcctttgattcaaaggagccctaaaactttgaccatgacagaatacgcaaagctccttaaaacttgtttgcaaggccgatgttatcaaatacatgttatcgactctaatattgaagaggaaaattagaaagtggatttttgacttgacataatttgatctcagaaaatgaatcatctaaggcagtcaaggggcaagctatagccaattttattgttgagcatcgtaatgactaaatcggcttggttgatatagttccttggacattgtttttctatggatcggtttgcactcatggttatggtatcggtttggtaatcatatcgcctagggaggcaagttttgagtttgcctatactattaaaccttatgtaaataataatcaggcttagtatgaatcagttctcaaaatattacaattgttgaaagaggttgaagccgatactgttaaaatcatgggcgattctttgttggtcattagccaattagccggagagtatgagtgcaagaatgacacgttgatgatctacaataagaagtgccgggaattgatggatagttttcggttggtgacaatgaagcatgtttctcgagagcaaaatgctaaagctaatgatttggctcaggaggcatcaggatacaagccgatgacgaaaaatattgagatagaagtcgttacaattgcagccgatgattggaggtataatgtatttcattatttgaagaatccttctcaatctgcttcaaggaaattactgtcaaagtgaggttgttgaaaggctttgccgtggcaagtctcattcgttgggacgtaggctcatgtgttgggaaagtagcggagtacgggtaaagtgtacatccactgcagtgtgagtaaaccaaatctattcgaatagccgtgctcgcggatattgaaccccgagacatgtattacacttggctagactctaaattcttagggcctgtttgggggagctttagattctgagaagcagctgtttggtagccagcttctgagaatctggaaaagctctaaaatccagcttctccagcttctggcttcttagttcatttttcagaatcagtaactacatattctcagaagctgtggactgtttggggcagcttctagcagaagcagcttttgggaaaagctgcagatgggacaagctcccccaaacagggccttaaactaaatgggtgggatgttgcatgatgattttatactagtggatcaacttctcgagaggcgagaaggggtagaccccagaaaaccatgacgaccagtggtaggaagctatccttgggaacacaatggaaggtggacataaccgtcgttgtttaatgaacaatggagttaaagcttgatcagtttatgctaggtcttaggtttgtgcactgatatttgaaaactcagctttacgcaaagtaaccatagccactccttgtattatcctgtacattacggcattttgtgtggtggcttgctgagtacttttgtactcattgttactctatatatcttttagcagagtgttgaagagaagcccttgttagtacgcttgcgtacctaacaagataatcggagtgcggttccattttaggtctcgttccccagtcgactgcttgtagcatgtcaaccgggcccttgtatattattttgtcttccgctgttgttctctgatagatgttggcctgcctggccctaatgtaagcatttaactctcttagcctgaattcattcgtgatatattatgattcggttatgtatgtgtgtactaactactgatttagggattggtactgaagaacacataagatttctgattttcaaaatcgggggtcgacaaagggggatgaaggggaagaaagggggaggtggaggagatcgagaaaatgagaggagaggaggaggagaagaggaggggataaggacgaggcagcgcgcgcggctcgaggcagggattttcgtgatttttttaactttggtcctggttggtataaacaaccgggactaaagataaaaatgtgcatgtgtgttttcaaatcggtaataaatatatttttagtcccagtttttactcaaatcgggactaatgtgatttttgagtgacccaacaaagatcatttctccagtagtgaaataagggcatgtacaacggtctttattagtggtctctctattgccatgcaagtaaatttaatggcatggaagaaagagaaatgagtatggttgttatgcatgacaacggctcagaatcgactcttaacatttattagagcaaattttctaagaaaaagtattttaatacattaatgattagatatcatattatcttaaactgttttcgtacactagtctctagataacgtagtgatcatatccgactctatctttgtacatgccctaagccctcctctatcagaattctggatccgccacatagaagaatggaaggtgatgacacgccatcgatctctcttctataccaaatagaaagggagaaaggtatggtagagtacaaaatgcaggcattagcgaccatttggtgctgatgttttatttcctgggctaaacgccattagcgttaagcttgtcactaacactaaggcctagttctttttctcaactccaaatttcaactttcttgtttttttgttagtacacttttcaaactattaaatgatatgtttttataaaaaaaagtttctatatagaagttgttttaaaaaatcaaataaatctattttttcaatttttttttaataattagtacttaattaattatgtgctaataaattttctcgtttcacatgcactgaaaaatatcaccaagtttgggcgcagctgcccccgttaggaattccccagctagattcatgttggcctctccaacacccaagtcacaagtaattaataacattactgtccacatatatataaatcggaccaagtttacatatatggcatataaatcacgggagtttcctcatcttggacgaagtggataggccggcgcttccatatccctcttccacggtttctaccagacgcgacgtgggaagtggaaggtcaccttttgtcttcatcagtgacggagctagaaaatcttcacatcaagtgctgaactgataggagtttaaatatttccataaattacatggtatttttaagattataacgagcaattaaggattatggaaccaggcataaggtcagtggcggatccatagtgtaagcattgatttcagctgacaccaataacttctcgctaatctctttgctaatacactctagaaacaagaattatatgtattgacatcactatatttgagtagtgacctcaatgactctattttctggatccgccgctgcataaggctgaaggcctactgccccataattgtttccgcccctggtcgacgacgccggctacgtctttattctctgtcccaaccgcgcagaggcggggttgggattgtcatgggggacctgggggacctgggggaggatgtcgaggatcaggagggttgtgaatcgggtcaatagtaggcgtgtgtggaatacctgatgcagcaccaaggaaggataaataaattcactattaaatgggaaatcaaacaaatgaagaagaaatatatggagccatatatacgtgggaagacaatgatgtactagcattcgaaggaggaatagaaaaattcagttacatttacgtacaagctgcaggagtaataatgacatgtaatccttccgtactcgtaaagaaagttgtttaggataatgtttaagtcaaactttaggattataaattataaatagtacttgttgagtttgaaaatgtaaaaaatacttcctccatctatttttgatagtcatatttcatcttgatacacagactaaggataagtaattctacttatcatctatttaaacatgctactagtcattactcataaacaagtgattcattaatatttacatttctcgatgcgcatagagccaatcttgtgtggaagaatggagagtcacgcattaaatccgagaaagccattaagataataggttgtttaattgaaatatgcctatcgaaaataaatttttcagatttagaaatatgactatcaaaagtagatggagggagtatatgaatatatttgtcttgaaaaatactttcataaaagtatacatatatcactttttaataaatatttttatagaaacaagaagtcaaagttatgttttggagaccgtgtcgttgtccaaaacgatatacgctacagttgcaaaattctagtaattaatacgtatatcaaaagtcataaatctcacttaagaaataattaatgaaaagttcatgtaggttccagctatcctaccccgtggagcacgatcactgtcatgggatggtgcagccggaggaggaggaggattgttgatggcagcggcggcaggacagctgacggcggcaactggaggctgagctgccgatggagagccgcaatcactagcagcggctggatgctcagtgtcccgacgagcaggcggcggatcgccgccggcgccgcagccgttaataagtgacattacggtctgttgctctgggtgagtgacggctgatgagtggctagctgagttatagatggaactttgccgtatcagacgagtcagttgtcaacgcggctagacaagtctcctgtagaaaccacacgcgttcagatcgtgaaaataacatcatgtaacattggccggacaaatgttatagttggccgggccaatgcagtgcatggtggagattggagaatggtgacatctcgttatcaatgtctgaactcacgggtattgaattgtcaaatttgtctgaactcactaccattgaatacatttcgtcacatacttttgattacacttggtttttcagaaaaaaatatatttaaatatttaaaagatgtcatattagtaaagtgtattgcgtcctaagagcacccgcaatggtaaagtaaggtgctatctataaaacatgtgcatctcagcaatatactagattaatagtaaaccacctcaatagtaagtctacatgggtatctatagctctctcatgtattgcctcgtttttctctattgactatctctaagttagtagatagctttgctctctctctcttcatttaagatcttccatgtagaaaaatatgctgacatggatctcttgcagagagcctatagatattgtgggtaccctaagcataaaaataaattttccatgcaccgtagtataatcatttcaatttggaaaaaagtttaaattacgctctaaataattgcagcagtatgaattatatcccctaaactacaaaaccatacatattacatcccaaactttttaaaccggacgaataaccccctaaatcaatccggagtggttttgctcctacctaacacacaaatggcaatccagacagcttaataataataatcatctatttagaaacgaggggagtagtacaagtagccaaagtttgaattggcttatgaaagttattttaaaacataaaaggagtacattctaattctgtcggctcccaattattttttaagaagaaattgtaagcgtgctggggattaaacaatgaacacaggaccttggggttgaaaccacacatcccttgctattgcactatccagtgcatatcacagtgtatctgtataatgaatcttcaatggatggcatgtgtgaaagggaatatcgactcttgttaaccttccaggcaattgaattggtgggagaagacgacgacttgtacagctgatcaaaagcatttactccaactgctttctaaataattcacgcaactgataaaagcatctccagttccagcttgaataaaaactagatcagctttagagcttagaacagcaatggcctatttgagggttgtctctattggttgcctttatctatttgatttcttatgcttcctaccaatagccatgagtgaccaaactgagacagatcgacacgctctcctttgcttcaagtcgcagctctcaggtccaactgtagttctagcctcatggagcaacgcatccttggagcattgcaactggcatggagtcacatgcagcatgagagttcctcgccgtgttatcgccattgatctcccatccgaaggcatcataggcccaatatcaccttgtattgccaacatcacctctcttacaaggctgcaactatcaaacaatagtttccatggtggcataccgtctgagctcggcctcctgaaccaactcagaaaccttaacctcagcaggaattccctagaaggtaacataccatcagaactctcttcatgttcacaacttcagatcctagatctgcagagcaattccctgcaaggagagattccaccaagtctaagtcaatgtgttcatcttgaaagaattttccttgccaacaacaagctccaagggagaatcccctctgcttttggggaccttcctaaactgcgtgtacttttcctggctaacaacagactttcaggtgacataccaccctctttgggtagcagccttacgctcacatatgtctgacggagctcgtggctcctcaccgggagaccgcacaggcccccctttgctagttcggccgggggcttagggtgaaatctcaagctctctcggtatgtggaaagatcgcgagccaggaagaaacgcgagacacgggcgatgtatacaggttcgggccgctgggaagcgtaataccctactcctgtgttttggtggatctgtgtatgaaccagctacaaaagtctcaaacagccccccctccagccctccaaaatcctccttttatatctcaaggggataccacatgcacctctccctttccaaactggactgttcttctcttcataaatggacggagatcggtacggttgctgtccgagtgcccttctgacgggacggcccatacctacccccacttccgccggaaacaggtgcgacgtgggattatggctgtctgtggatgacgcgaccagtgtcagaccggtcacagatcagtcatctttgtccaccacgcgtcagcttagcaacgtgcatgttcgcccttcttcatgtaacattttgcctgtaatggttgggatgaagcctggtatatatctgaccgggggtaacgtgccatctctaagaggcaacacgctagctccggctagagacgagtgcctagaggctctcgtcttgacgggatggggcgaggcgtgcgtcagaccgccagtcgccacctaacccgtgatctgaccggtctgtgactggtcacagaccggataaaggaacgcgctgcactgcgctgcatgcagcgtgacacgcttgaccagaccgcaataaatgcggttagatgagccctgccgtgttcacctaacccatatatgtgacgcaaaaacccacaaggggtcggggcgcctcggccctcggggccgggacaggagtcacccgacccccctcggggaaatcaggaggagggcggacacctcaccctcgggcccgacgtccccgagggtgccaggccacgtgggcgattatgtctgcctcaagcctctggtctcgatactcccggtcccatatcaccgacaatgtcaatcttgggaacaatgctctcaccggaggggtaccaaagcccatgttaaatagttcatctttgcaacaactcattctcaatagcaatagtctcagtggagaactcccaaaggctctactcaacacgttgtcacttatcagcatttacctcaaccagaacaatttttccggttctataccacctgttaaaaccgtgtctccacaagttcaatatcttgatttaggagaaaactgtctcacaggaacaataccttcctctgttgggaacctttcctccctactttatcttcgtctttcacagaattgtttagatgggagcataccagagagcttaggacatattccaacactagaagaattgaacttgaatttaaacaacttttctggagcagttccaccatctctcttcaatatgtcatccctgacatctctggtggcggcaaataactcactcaccggaagattacctctagacatcggctatacactcccaaacattgaaggcttaattctttcagcaaataagtttaagggctcaatcccaacttcccttctcaatttaacccatctacaaatgctatacctagctgacaacaagttaactgggatcatgccatcctttggatcactgacaaacttggaggaccttgacgtggcatacaacatgctagaagcaggcgactggggctttatctcgtcactttcaaattgcacaagattgactaagctgatgttggatgggaacaatcttcaaggaaatctgccaagttctgtaggcaatctgtctagtgatctccaaagattgtggctaacaaataataaaatttccggacctataccacaagagataggcaatcttaagagcctcactgaattgtacatggattacaatcaattgtcagaaaaaatacctctaacaatcggaaatttgcgcaaattaggcaaactgtcctttgctcgaaacagactctctggtcaaatcccagatgacattgggaaacttgttcagctgaataatctaaatttggattggaacaacttgagtggaagcatacctgtgagtatagggtattgtactcaactcgaaatactcaaccttgctcacaattcactagatggaacaataccagagacgatctttaaaatttcttcactttcaatagtgttagacttgtcatacaattacttgtccggaagcatatcagatgaagtaggcaaccttgtcagtctgaataagctcatcatttcatacaacagattgtctggagatatcccatccactcttagtcaatgcgtggttctagagtatcttgagatgcaaagcaatttctttgtaggaagcattccgcaaacatttgtgaacatggtaggcatcaaggtgatggatatatctcataacaatttatcaggagaaattccacagtttctaacgttgttacattctttgcaagttctcaacttatcattcaataattttgatggagcagtgccaaccagtggtatttttgccaatgctagtgtggtatcaattgaaggaaatgattatctgtgcacaaaaactccaatgagaggtgtgcctctttgttcaaaatcggttgacaagaaaaggaaccataggtcattggttctagtcctaacgacagtaataccaattgttgctatcactttcactttgttatgccttgcaaaatatatttggacgaagagaatgcaagcagagccacatgtacaacagctgaatgagcacaggaacataacgtatgaagatgttctaaaggccacaaatagattctcttcaactaacttacttggctcaggatcatttggaacagtttataagggcaatctgcatcttcctttcaaagaaaaggacaatctgcatcttcaggaagaacatatcgccatcaagatttttaaccttgatatccatggatctaataagagctttgttgccgagtgtgaaaccctacaaaatgtccgccaccgaaatctcgtgaaaattattactctatgctcttctgtggattcaactggggcagacttcaaggctatagtgttcccatattttccaaatgggaacctagatatgtggttacatccaaaatcccatgaacatattagtcaaacaaaggtgctgactttaagacaaagaattaatatagccttggatgtagcacttgctttggattatcttcataaccagtgtgaattgccattagtacattgtgatttgaagccaagcaatattctgttggatagtgacatggttgcacacgtcagtgactttggcttagcaagatttgtatacactagatcaaacgcacatcaatatacatcaacaagcttggcttgtctaaaaggatctattggatatattccaccaggtgagataagctaatttttaagttgataattctgtttaatgatacacgtggtgtctggtttctaattttatgacttctgtaaatctaaatgcagagtatggcatgagcaaagatatctcaaccaagggtgatgtctacagcttcggaatccttctcttagaaatggtaacaggtagtagtcctattgatgaaaaatttaatggtggcactaccctgcatgaatttgttgatgcagcattgtccaatagcattcacgaggttgttgatcccacaatgctacaagatgatgtcagtgtagccgatgtaatggagaggtgtgtcattccattggttaaaataggcctctcatgttcaatggcattgcctagagagcggccagaaatggggcaagtttctaacatgattcttcgaatcaagcatgcagcctcaaacatgagcgtcaaatgaggcaaattaagatttggcaatttcatgtatggaagaataatgtaatgtaacatatttgtagcttttgttttgttttctaatccaatgtagttagtgttcaaatgaggcaaattaagatttggcaatttcatgtatggaagaataatataatgtaacatatttgtagcttttgtgttgttttctaatccaatcaatgtagttagtggtgttagcattcgccacattcctcttaattcttcaaattgaatatttctaccagcacagttcaagccaccagagctcagtcgatttgcagaactagcatcagaccaaaccaagtggatttggtgtcagttagtaccaaatcaggcgtgaatccaatccagggcaaaattcgcccaatcaagagcagggtggagaggggatgcacacagattgatctcccgcagcctaatccagcccaaaatcccacaataaaccaatcagagagacgggtgaatgagcacgtacctcctagccgcggaagccctagttgccgcgacggcccgcttccttcccaatcccaagcgccgcccgccttctgccgccgcttggacctcggcaaccccagcactcggctggcactgcgccggtaaccggtcgccgcgctttcaccatgggcggcgattcgccgacgagccatggcgattgccgttgtcgccggcggggtgcgcgggtgggtggatgggcggaccacaggagtaaatcaggaaataagttcacggagatgcgagattttctaagttcccttaaccgcaaaaccagaaatcttcgcccctcaactttacaaaaccgtctaatttggtcccaaggcagtacacatggctagttttgatgatgtggcatcctagtcagcaaaaatatttaaataaatatgtggggcccacatgtcagtgagagaaaatgatgtgggcccaacaactctcttttttttttttctttttctcttctcttctcaacttctcagctctcacgtgcaggcgggaagatggcggccgacggcggagcgggcgcggttgccggcgcagcgggcgctgcggcgcgcggggaagaagcgggaaagggggagaggaggcggccggctcgaccgcccgcgacggagggagcggcancnggcgngngctctctccccatccggagccacggcgggttagcaagcgaacggcgtactcgctatcgccagccacgccgcctccacggcgccgcgcacctcctcggcgcgacaccggcagaggatgcagaggagagcggccggggtggacgcgtgcgccgatgggagcgccgggagagggctcgacgacgagcaagcggatgggcaggccgtcgatgctcgctgccgcttcgcctgcctccggaacgcgccgcggaacccgccacggaacgcgcgtctgtccagccgacgcatcgcctccggcgtccgctccttcggcggcaccgtccccagctgcctcgtctgcctccggccgccgccgttgtcgtaatgaaacacccattaattagtttgcacgctgcatgcagctagctagccaaccggattcatggggttgtccaccatgccctgcccgaccatgggctggtccaacacgggaggaggccgtgcttctccagctgcccacgcagcccgacgccgctgaacatcagcagctgcaggccgctcagcatcagcagctgcaggctccccagcgtcccggtgtggtcgcgtgcgccgatgggagcaccgggagagggctcggcggcgagcgggagaatgggcagggaaggttcgagctacggcctgcaggtggctgcggccgccgcccgctgcaggctccgctctccgccgctccgcgtgcctgctcgcccgccgtcgccgctagtagccgcgctcgcccgtcgctgcctgccgcctgcttcgctctccaacgctccatctacctgcttgtccaccgtcggcactcgcagccacgcttgcccgccgctgctcgtcttgcctgcttcgcagccgccgactccgctctccgccgccgcggcgactgctgcagctctcccctctgcggcaagaaaaggaaaagagaagaagaaaggcagcgtttggctaatgggatggggaaatcatttcccacccatcaaaaggcatctttaaattctaaccattcattctctctctttcatttaatcctaacccttcattcatttcccaatctcagtcccaccctccatttcccattatccaaacacacccaaagagaaaggaagaggatgatgctgacaagtgggcccttactatttccttctcacttacacgtgggtcccacattattatttttattttttttgctgactaggatgccacatcagcgaaactggacgtctatactgcctagggactgtttttgaacggttttacataattgaggggtacacatttctggttttgtggttaagggactttaaaaaaatctcgatgttaagttgagggacctcgggtgaacttattccgagtaaatcaccatctttctgcagccaagggcccatttgccgtaaggcctagaaagccacgtcgtttgtggtggaatgggctggaacggcatcaacaactgtaggctatcggtaacgaatccataataaaaattattatagattgatattctaatgatataaattagctagacttatataatctgccctaggtactaggtacagtgaatcaggaaagtgtacataggtacaccactgaaggctactacatatggcggttgacggagagatttcatcacatagcatttattacgatgcgaagaagggaaagataacctaaagggagcggatgcacaaatgatcagcattcgtttgatctccgtattatcttacagagagcataatatcgcaagtatggttgtaatgttaactatagaataattacatgaaactaatacaaataactcaaacaaatattttactatatcatagcgaattcattccaatagttgtgatctaaattattgtttagcctaagccaaaggtggctacgacaaaagatagtaaaagaaaaacatttgcaaaaaggagtaaaggacatgagtgcgcaatatggctcccaagctagcctgccgaaaggggccaccgtagaaaaactggtcaccaacaatagatgtgaaggtgtagatattctcattggtggagaagccaatcaaatcattctctgccgaccaagctcgtccttgcccatcaatgaactgaaggtttttcgtggatactgccatattgccaccgtcaactgccatgtaaccattgcccataggaggtggaagaggtgttggttgaaaagttacattagtaactacaatgcctccaaaccacatattgatggcagagtaagatagacttttgaagaatgacaaagggatgcgcccgacgagttcaggatgcttgttattaaacccatagtgcaccaaccaatcccctgatgccatatcctgcacatcattatcaaagagaaaatagattaaacttttttttcttgttctcgcgtaggagtatcatctactgataaacaggattaatttatggattgatgaaaaccaaccttgaatactttaagtgtgatgtattgcttggctccatttggttgtgagataccagggattgggtcgccaggacgtatgtatgcgcccctctcgggtcgaaaaccagggcagtcttcgtccatatgggagggatctgttaacggagagctaagatccgacgtcttttttaaagagataaatgattatttttagtagcagcaagagtatcactaaacagaatacaaaaggtcgaatattatggatgtgtaaataaaaccacctaccttgcaatagaggtcaaaaacagggcgttcatcacctggtttgacctacgaggatagttaaacgatcaactagaaactgatgctatgatctttaagagaaaaatagggacaagaactaagaaaccttccctccaaccaatctgaaatacttctaaactggatgctggggcatcaccattatcagttatgatccaaactgaaccataactgaccaattggcctggggttaacgagaagccataaacatccatcgttgctataaatccatagcgcacttcatatgtgtttgttatgtacccagtcctctgggaaataaacaacaagttagttacataaataagtaaaaataacaagaaaattatttttcctctaaacttttccctatccctttcatgcttttgagttttgtcatctctcttgtatgccctggagttctcattttgaaccactctatccattcagttagttgaaaagcttcttataaaataattactaaggcgaaagcttcagtcatagttaattgaatgagagtcgttttacaaatcgaagataaaaattttaaaagaatcgcaatcaaatttaatgaaatttcaaagagcaaaaattcaacaaataataatttgcttttcctatgtttcctctacttagaaaccagaaatttctacttttaaaacaacttcaaccaaaattttaatatatctccatagcgagagatggtcaaataccatttaaaattttatcaattttaaaaataatttcaaaattaaaatttgcagtaatataattatctcctttgtttttaatctaaaattgtttttgccttaagaagtatacctttcaagttagcctctatgtaaggaggtagtcattaaaaaaatctaacgacaactaatggaatggggacagagtagatcaaaacgaaaactcataggtataggcatataaaggagatgataaaacttaggggtatggacagaacagcgcaaagatttcagggcacacaaagaattttctcaaatataacaccgtatggcaggcaatattaattcttgtatgtcaatctatttactagtataacactagaaagagatgactaaaatgaaccaccatatacgctctatcataactacttaaaaaattcgcaactttctgatcgtcacatccatatgtccgtgtcatgcgagcgtcttcccctgtcttcctagcgcagtcagtttccgtggcacatacaccacgcaacaggccgcaagcgatcaagcccataagctgtccgtctgcatcatcctcaaatcttaggttcctccatctcatgcgacgccctatcctattcagtctcatgttcttatcctcgcgacgcacaacatctaaccgaagatccttcaagaagggttctgctgcgtgtatcaatcttcattgcggttatcaaccaagtatgaaaatggaacagctggtaagaaacatgttccgcaagacgtcgtggaaatatgctcaggaaagcaggacatcaacgaacataatttaataaattttaaaaattatctttaaccatatagcaacacacgggccattttcctagtgagcataaatattactacattaatataaaaatagatacacgtagctaattataatgggatcagattataacgggtttgatcaattaatgcaattatatccaaactacaattatgtctatagcaaaacgtgatatgtatgtccaatgcaataatactatttgcaaaaataaatattagtcttgatccatgcaaacgggttcgtttcaagtaaagaactgacctcattacccttctcatgaatgatgtagtatccgttaacgagctctttgcagaccgctgttcctcccattgcaccaacacatttgccctgatgaaccaatcccaagagtatatatgatttgtagatagaaatataaacagatcgatactgcttgcaagccgcttccattgccaaatgcagaggaaagaagcaggaagcaggtcagaagaacgccgacgaagagaactatggccatctcggtggtcaataataataggtggtcgtagtatgattcgaggctttcgatctgtatatataggtgcaacaagcaccggtgttgtgaggaataattgtcgtgtatcttttttacatggaaggtgttttaagaaagaatatgtatctttccttcgaaagaaaagttgttcacgaaagaaaacaaactgtccttaattgactaatatatttatatatgtgtgtatattttttagataatggaaaaaattccagcatttgctttaaagaatatatgtgggtatatagactatagcaaggaaaattatagaagttcggggagctgttactcccttcctatccctttcatggctctaacatgcctcttataaaccaggccaactagctaagtggctgacaatgggaacattttttttaaaaaaaaattaagccaataagaatttttaaaaatttaaatttaaaattaatttaaggatatttttaacgtattttttttcaaaatatgtatatataatttttacttatgaattttggagaaaacatattttttaaagcgtgaagtaaataatccagtgaataagcgaaagggcttataacctagtggttacaagagcctcagtagcacctaagatcctgtgttcgactccccatgggagcgaattttctaggatttaggcgttgtacccgtcgacagcgaggcgtctgtggtaacttcgtcaacgctgtcgtttgtggtaacttcgtcaatctcaaggatttgtcggcccagtgttcgaagatgcatatagagatagggtttgtgtgcgcgcgtttataggagtgagtgcgcttgcgttgttagtatctgtgttgtactgtgtaattctaaaaaaataatctagtgaataagctaaaaagaaggcatttgtaagttgtgacgatgcaaaggaagggagataacgtagaagagagggatgcatgcatgcattgacatccattgatcctgcactatcttatggtcagcttaatatggaatatcttaagtattaagtacaattgtaatgtttaacagtgttacggataagacatatctcctttacgtggatttatagtgtacggagatactacatatctaatattatacggaaaagtatattcaaatatggaaataaaacgagtcaaaaaggaaactactttcatgggaatagaagacttaaaagtctgactcggaaaaggcaaggtcttctcggcctaaaagtctgactcggaaaaggaaaggtctcctcagcccatatcctaatatggttctttaagttctacttggagaagaagacgcccgaccatataaatataccacctcctaggaggagagagcatcgaatcacaaccttaactagacccacattaagatacagccaggaggaagacaagccctaatcattgacatctactcatctagacatactcgacgtatcctagttggcgggttagaatagctaacttgctcccactgtaatcaatatgatactctccacacacacacatactcacatacatatatatattattgtgaaggaaaagaaagattaatgcatcataagtgcggcgcccgatcgccacgtggacattccagatcaatccaaagggatcagacggccacagcaaggaaagtccccactggccattccaaccaagaggtggcggcacatgaagcctgatggtcgccgacgacgaccatccaacacgagagtgggatgcggcgaaggaagctagggagggagaaggagtgcttaccgagcgcatgcgaggtagataggacgaagggagcacgctgatggcgaaggccctcgggttggcgacaatggtagcggtacggttctagtctgcgagcgaggagtagtagttgggtgcctcttcatgctgggcacaagaagaggggttaggggatcttagggtgggtagaaactgcggagaaggacgaccgggggccggtaccgagggcggtgctcaccttgctcaaagaggatggagtttcgattgtatttggcgaaggcaaagaggcaccgaggtacgtggagagctttcgaagccagcggagcaggcagagcagcctgacatggctctaatcgctagcggtagatggctggaggcggcaatcgacagtggtaactcgggctcatggagaaagaggcattctggtggcctctgacttcaaagcaggggacaccagcctacggcgtggcacggctagtcacagctgcaagaggcagctggatgcggcgaagctcacatgacgtggtgaggagaaggttataggcacggggagctcgagcgcgagtaggaaaatgagagagggaggtggaagggccttgatgtggcctagagggggagaggatgaataggttgtcacgcccagaaatttaacccaaatttccagactattttgcgtattaaatccctgtccaggaccagccagggtacacaaaacgacaagtaatatacagttccaaacgtaaataaagcgtaaaatacttacagaagaggcacttagtcctcacaccgaaacaaaagcagcagcagcggaaaaaggcgatcctagcggggcttcagctccactccacaggcaaaactcaactggggtctgagccttggtcctctaattccatcttcagctcagaagcactacacttctaaaaagggggaataatagcaaggctgagtacaaccaccgtgctcagcaagccacaccaacgatgccgacgtgcaaggggatacaaggaggggtttgtggctatttgcagaaaggcagttgtaaaacactttattgagcaaaacagtaaaacggttgggtaattaaagtaatattgaatctccactgatcaacgctacaccacgttgaacaggcccaaccaacccatctgaaccacagtgtattgggtcgatttattaagatgggactaatcacggtgaatctgatcgatcgcccataaccgcgggcacggctattcgaatagttttactctggccagaggtgcacaactgtacccacaagacacaacccaccgacatgtcaccgcgtcatcatgtgcccatgaagcacacgtcaccatgtcgagtgattgtgacgagatccttcgcataaccctcccctaaccatccacaccacgctaaggtttcacccccacccctcaaaaggcagtgggcggtcccctcttgcgccgcggtgaatccggcagctggacaaccggacaccccggccgacccaactccatcacgcccaccctcgccaccggtgcctaggaaagggtcgagctatacttcagatcaagcagttacccactcccgcttgtggcaagcgctgtaagtcttacagggtttcccgtgaaccggtccttaattgccatgggtgcgactcacaaaaccatgcacccacagcccaccattcagttgcattttagttggataattacgaccatgaaacatggccagatgtcacgagcacgcagctcaacaagatactaggatgtctaatactgcaattatcccatcgactgagctagtggtaattaagcatggctaagcatatagttctagctaggtcacataagtaacacgagctagtcaatttatcacccaaggttgacaaaggatagatatcaagtaaacatggcacaagcgagcagataggtaaaccctgaccccgtgtaattagcaaaacatgcatatttatttgtaaacggtaaaacatttataaattgggatcaacatgctcaaggggaatgtgtgacttgccttgcttcttcacttggattttctgaactcttttcctcgcgaccgcggacttccgaaacgacggaaactacacgctggcacgcaaaacgaggaaaaactctaataaaaaccaagaaaacagtacataaaaagtaaacaaacatgtagagcttaattttagatgaattttgcaagttgaatggctcaattcggagttcgaatgaattagatatgaattttagaagttttgagccatttaaatgaatttctagaattaaactcgatttattgcgcaattattatttatttttccaaaggaaaagagggttgctgacgtcatcaacggggaggggcggcgccggcaagcgggccccaccggtcagcggcacaagggcgccggtccaccgtggaccgggaccaccgaggcggttcaccgccggtccacgggaaccgacggcccggatcggcccaaagccgatcggacggccacgaggcggcgcggctgggcacggtcacggctcaaagccggccagccgagtgatggcgcacggcagcgcggccaccggcgacgacggccgacgacggcgcggggagcggcagcgcatgcgggcggtggcggcgcacgctagggagcggcggcgcggcgcggtaaggtgaggaggcagccggctgcccggcacagccggcagcggcgcggagcgcggcggcggcgacccggtcggacggccaccggcgacggcggcgcgtcgcgagcaggcacaggaggtggccgacgaaggggaggaaggggagagggaggggagtgctcaccgagcggcacgacggcaaacgggcggccgacggcaaggaacggcggcggcgaggctcctcgggaagacagcgcgacggagctccggcaacgggcgtcgctcaggaaggggcggacgggctcggcctcggtctgaggaaaatcaaggaggggctagggaggtgagaactggtgcgaggtaagcggaaacgactgccgacctcgacaatacgaggaggagctcaccggcgacgaggaaggtggagctcgggcggatttccggcgaagagggccagtggccgaggatctccccgtccctgcggagccgagggaggcgacgacgcgggttggcgaggaccgaagcggcgttgcgacgcggctggaggtggccatggtgagggagagaggtggtgcgcgtggcggcggcgttccggaggcgaaatgggaaaatggagtagggaccggggtggagctcggcggggcgatgccggcggtggcggcggcacggcgcggtggtggctggagcggcgaggagcggcggctggagctcgtcggtgagcggcggcgatgggagcagcgaggggagctcgggagagcgcgcgggagggggcggcgagttggggaaatggatgaggggaggccggggtacacttttataggccccggagggggagatcgtggccgagtggggcggcaacggccggcgaagtggcgaggcatcgtgggatcgtggggggcaatactggcgccggtttttggggaaaaacgggggaggaggtggaggagaggtgtggcttccggtcccacgcgagagagggctcgaggaggccgggaatggcggtgacgtgggcggttttcggcggccatggcggcaacggcagctgccgacctgaggttggggatgacaggtggggtccacgggtcccacctgtcggagagagagggagggagaggccggctggggaggcaaaacagacttgagggagagagagagccgagcgggccgagggagggggccggcccgagagggagagaaagggggcgcgcgggccgcgggagagaaaggaggggttgggccgaaaggggcccaaagagaggaaggaggattttaattgttttctttttattttaattgatacaatgatctttgtgctattaaaactatttctcgagctccgaaaatttgcggaaaaatccggagagtattttagggcacaaagaatattacaaaatattcttggccaatgatttttaattccctcaataattcacttgattaagttgatttaacttttatttaatttctagaaaatgcattattaattgatttttaaacccgaacgaaaatcggggcgttacataggtgttcctaaaaatattataacttcatagcatattagaataaacaaaaatttcggttcaaatcagaactttcggtatgggatcagaagttctggtctcaaccaaaatgttcgatggataaaacataatctatgaaattgtagctcaaatagacaatatgtatatgaaacaaaaggtgacaaacaagatatctaaataagatatatggctaccaactagatcaaataagaatacaaatagaccgtgcaaaaataagcttaagcataatattagtaaaggcaagaaagggcaaaccaaaagagaagacatgtgatttatttcctgatgttcggatctactgttcctacgtttttgttgagggccataaaggctaggtctctttcaaattttacactcctagacttcacttttgatttcttccattgcaaaggtggaatcgaaaccttcacaatctttttgtggtacaccacaaccttgggtgctcaccggtgacacctagccatctaggaggccttagtctccaaaagtaatgaattcaacaattattttttggggacgaatctagagttatttagatttatcgaatattttactaggggtcatgcatggtgatgtaaattttatatatgcatacatgactatctgagaagttcaaacagaggcaatcaagtaaacacgttaggtgaagaaagtaaagctaacaacatggtcacaactcaacctcgccaggaaacgagctcaatcggccggcaacaaatacaaacctatgaaaacagaactacaacgataataatgtttgattttaaaaattctaatgataataaagagtaggggtgacaggtgggctgtaaaggaatagtgtggcataagttgaggtgacttctaaaaactttaaaaacgaactccaatgatgattaggttcgattttttaaattccaatgaaaatgaagatatggaccatgggcggcggtggttgacgcaacttataaaaactataaaaacgtaaaccctaacgagaatcaggttcaatttattctaatgataataaagaggagagacgacaagctgattgtaaagtagtagggcagtgtcgattgacggaatctccagaaactataagacgaaacaagagagaggaaatgtttgatttttaaggtcacaagaacaataaatagaaatggtggcgagccagacaagcagtggagtagcaatggttggtgtgacttcttaaaaactacaaaattataaacataattatgataaggtccaattttttgaatgatgtgacaacgagttgactatttaatacattttaaagaaaatgatgtctaaatagatagataattttgtatcaggtgatataattacgcgggccaccatacttttttccagggcctgcaaggtttacagtgtaaatggcataaatcacgggagctccttcttggatgaagcagatagaccacgaccggagcttccatcctcttctaccggacgagtatgagaaggatcgtccttagagctggtgactttgtcatgtacgtcgccggcgatgccttcattctctgtcacagcggcgtggagattgtgcgagggcgggcctgggggctcaatgggtttctcaggaccttcgtgaatgggctctccagaaggggaaaccccgtgttgaccatccgatgcaactgcaacaccaaggattcactgattaaacatgaaatcaacaaaagaagtaaaaatatatatatatacggacgctcatgtgggatatcatattagagctccaaaggggacatataagtatttgtcgctttttaagatgcgataattaaggatttgtcactcactgtccatagcatgtgggtccagtggtaaatcctttttcaccacttgtaagggttgtcagtatcccgattcgtatcgtagtatcttacgatacaacgattctaccaagccgaaacgataccgattccacctagtatcctaatttttatagtatcgcgatcctactattcattactacacgatcctaagaaatcttagatggtatcctaattctacgatccctacgatactacaaaatattatttaaaataacatggtttgaaaataatgtaaataaatatactcaaatttgtataaaaatcagttaaatatatcaaaaccaacgtggtttctcttgataaatatctctatttgcatgacatatatcattacgacattttttatatagattggctatatataactaatataaatattaattaaacttaaaaaaaatctcataatatcccgatactacgatacgatactactttgagtaaaacgatactacctggtatcccgatcctaacaaccttgcttgtaaaaagagtggcaaatagttaattatttcctccaaaggtgaagagaaaaaaaatccagttacagtactgaacatccagaaggagtacctacataatctctccattccaaaatataaagtaactttaaaatgatgttaagtcaaatatttttgactttaactattaataacaaaaatataaaaaagatcaatcatgtgagaatgatgttactagaattatcactaaacaaacaacataaatatgttactctatttatttaaaataatatatttttataaatattatcggtcaaagtagtatatcggagacagtgataagtccaaaaatatttgtactctaggacgaaggcactaactatataaatttactagaccgcaccatgatgccacgggaaggtggcatgcaaaattgtattatatgacttctcgtgatgacttcttcttatagttatatagacactaagagtgacatcgatcatatatttataaatatatataccccatccatctcaaaatatatattagcattgattttttataacgttgaaccattcaccctattaaaaaaatataagtataatttattttgttataacttatattttcaaaaagtttggtgtgatggcatgaaatgaggctacagcggcgtgactttttcgaaaacatcacagagtttcactacatatatgcatagatgcatagtttgaggaaaacttcagtgctacaaagaaataaacataaaactattatacagagaaaattatatatgcactcttccttttttttaaacatctcttgtgtacgtaagtacatacgtacatagagaggtattatagttcgtttttagatagtatatatctaatctaatggtttaatggttgaaagtaatggatgtactgatttaagtgtaaattgatggccatatatttttttcttaatttttttctaattcattagatctatcatgtgacatcttaagtgtgctggtaaaagtgtagaaatgtattactgatactgaccatctgtttgtagtcgactattgtttgttgtggtaattaggtgacatgctctactttacctactatttgttgatagttcctcacttagtatagtttgttaactttggtgcttgatgatataagtgctcgttggatttcagctaattattaggtgtggcttgccaaatgctggatagaacttacatacttttggattagtggtaacatacgattgatatattaggctaattcttattgacacggactattatatagtactacatattaaacgttttagtaaataagcaattagttctaaagtagtattcgattggctgctccttattggttgtaagcacataccccagtgatcgacccattgatctagaaattattacaaaagaaatatctttttataatagtatcttaatacaatccatccactactggagaagtgctcatctctcccggttcgcaaccccctttactcccgggtagcgaaccgggagggagaatccagaactaaagatgggtatatttagtcccggttgataacaacaaccgggagtaaaaaagaggggttgttgttatcaaccgggactaaagagagggtagcgggcaatcaagatggtccccttttcttttattttcttttttattttctcccgaatcgagtggcatgcacatccccaaatccccaaatcaaataacatcccaactccacatcacaaatctaaaagttactcatacacacaaat

SEQ ID NO: 7275 - DNA, 44441 bp, Oryza sativa
ccggagattggcgcgctctcgagcctgagcattagccttgacctcagctcgaacaggttcaccggcgagctgccggatgagatgtccagcttgacgcagctgcagtcgctcgacctctccagcaatggcttgtatggcagcatctcagtgttgagtgggctcaccagcttgacatctctcaacatttcgtacaacaatttctccggcgcgatcccggtgacaccgttcttcaagacattgtcatcgagctcctacatcaacaatcccaacctctgcgagtcctacgacgggcacacttgtgcatcagacatggttcgcaggacggcactgaagaccgtcaagaccgtgatccttgtctgtgctgttctgggctcaatcactctgttgcttgttgtggtctggatcctgatcaacagaagcagaacactcgcgggcaagaaggcgatgagcatgtcggttgcgggtggcgatgacttctcgcacccgtggacgttcacgccgttccagaagctgaacttctgcgtcgataacatcttggagtgcctgagagatgagaatgtgatcggcaaaggttgctcaggtgttgtgtacagagctgagatgccgaatggggagatcatcgccgtgaagaagctgtggaagacatcgaaggaggagccaatcgacgcgttcgctgctgagattcagatattggggcacatcaggcaccggaacatcgtcaagctgcttggttactgctcaaacaagtatgttaagctcttgctctacaactacatccccaatggcaatctgcaacagctcctgaaggataacaggagcctggactgggatacccggtacaagatcgccgtcggcgcagcacaagggctggcctatctgcaccatgattgcgtcccggcgatactccaccgcgatgtcaagtgcaataatatactgcttgatacgaagtatgaggcatacttggctgactttgggctggccaagctgatgaactcccccaactatcatcatgctatgtcacgcatcgccggttcttatggatacattgctccaggcaagtgattcctacttcaagtatttatctgcatgctattttttcttcaaaatctagaaatatagtagtagtagaatgtagtgtacaagaccagcaacagttaatgccataggttaatgactctttgggtaatgctgttatctaagaaagaatctttgacctgcagttgcttctagtaatcttaaccttgctctgattccatgaccatgaccatgaccatgactagttgattgcttgtagcttaagcaggtgaaaccgatcagtctggctatctattaactgccattgcacaagtttctgaaatcacaagcatcaatgtccattgaagcttgttgacttatatactgtttgttgaaatgcctggcccaagattatgttgatatgcttaaaacatccaagaaatttatcctgacatacatttcctcattttcagagtatggctacaccacgaagatcaccgagaagagcgacgtgtacagctacggggtggtgctcctggagatcctgagcgggcggagcgcggtggaggcggtggtgggcgactccctccacatcgtggagtgggcgaagaagaagatggggagctacgagccagcggtgaacatcctggacccgaagctgcgcggcatgccggaccagctggtccaggagatgctgcagacgctggggatcgccatcttctgcgtgaacccggcgcccgcggagcggcccaccatgaaggaggtggtggccttcctcaaggaggtgaagtgctctcccgaggagtgggggaagatctcccagcagccgctcatcaagcccgggagccagcaaggttgacatgaacatcaagaacatggaacatgaacattgctgctggtgtagcagttgattcagtggctcagcaaggggttcaaggagtaggattttgataagatgcagcctagcttagcttgggttaggggggtggaaaaaaaatttcttgtacagctccaaatggcgttgcgttgcagctcattttggtgaactttgaatggggaaaaattccgcggttattttgtttgctcctgcaatacatcacaaaatctcaaatctatcttgggtatgatgaatatgatgcgaagaattaacatcagaatctgatcgcttcagctgaacagttgcctacagagtacaatacagattgctgtgagcctgtgactgtgagaagaacagttgcaacagtagctggaaggcggatagaggtggaaagtagagagagtacagacaaggcccatcgcccatgcatgacccggtgctccctcgacgccggcatctacggatcgagccggaagcggagacgcgtcaaacactcgccgttggctgggctgggcccctctcgtcgagcgcggttggtggcttggcatggccatactgctgtcattcgaccagtcactcgccgaattgctaggcgctgtagcggccgaagaggcgcgtgttgcatctgatctgcgggtggcggcggccacggtaagctggagttgcgtgggttggttacttggtaggttgttgactaatgggccgtatgggcctaaggccaactgtgttatgggctgtaccaagggacttgaatgggaaaagtataccggaggtccctgaacttgtcaccgagattaaaaaacgtccttgaaacgcaataccagacaccggcggtccccccaactatacaaaaccggtcacccaacgtccctcggtggttttgaccccggttttgatctacgtggcggctgagtcagcgtgggacccacgtgggccccacatgtcaggtgtccacaagaccaagtcaaattagccacgtagacgccacgtcagccaaaaccgttgtccgaaccgccgagggacctgatctgcactagttttgacagttgagggacccgttgtatctggttttgcggttaaaggatgaaaatcggatttgttgacaagttaagataccttagatgaatttattccatttacagcaccgctgacggcccctgtcgatattgagagcggccacgggctgggaagtaaggcggcaacaaatttgcattcaagcaacagttgactagtggagcaactatttttttccacgcacacacacatacttccccatccaaaagaaaacttaattacccagacgagttcaggaacagatatctatctctaattcatatataataaatataataaggtgattaaagtattaaaaaaatacatcaacagaaaaaatatacagtattacatgtgagctcgtaaaagaatgattaaccaatctttttatcatgtttgtagatggctttataatatattttcatacataatttatagattggttatatagtatcgaatgttaacgtttttggtttttatagcacttaaaggtactggttcactttaatagcacctaaagtttagcccatttcaatttttaacactttcctcaaatctcgattgtttttcatccgccttaaaaactacaatgatgcatttcgtttttaacctctctaatgacttatatcttttaaatagcatattattcttaaaaataatatgttatttaaaaacgagatcaatgttgaatatatataaaatattttattaatttaaaagtaatttataagcaacttagctatgtaatggaagtaactctctatagcatgaaaagtaattacgttataactgagttgaaataagaaattatgttgagtaaattcacaagcaaagtgtagagaagattttcaagtaaatatatttatgaaattaaattcaataaagcctaaaagtaattacataaatcataaaagtaacttagcataaaatagaagtaaattattacaacattagaattaaattcgttgtagggagaaaaatatggtctatctaaaaattaaatttaaagtccataaattatagaattgactaaaaacaataataaaaataatcaacacagagcattatgaatgtataaaaagtaatttagttaaatctaaaagcaatttatatatatgataaaagtaacttacgtatataataaaaacaatttacaaatataaatatttttttcatcgtaatataatcatgtaagatcttgttgtaaagattttaattgcaatgaacacgatggtgtaatcggattgtagatcggataagtaattcgagagaaaactttataaggggaaaaagacatgcatgtgtgcgtagtatacttctccactgctcgcacgatcgaacagctatgacacaacgtgcgcgatcgaatgaatctaagcagtgtcacgcgataagacaataacgagaggtttcgccaattagtttttgcgtaatatgattgatacacagactagagatcgatagaggagagaaaccaccgcttgtaaaaatcaagacccgtttaaaaaatggtataattcatagagcactgctgcacgtactaaatttttcttactttactaacaatcgtcaaattgtttgatttaggtagatagaagttaaaaaaacaaatctagatacactcatagcataaacatcagtgttattagcatacaagaatctagtaagaaaaagttagtccttatagccttttcctagttcaaaataacaccaatctataaagcagaacagcgtgtttcggagagaaaacaacacatggtttgtaaattatacgctcgtctgtaggggtgaaaacagggtaggtatttcccgcccacacgtccggccacattatttcgtgacaaattcgggtacgggacttttcacggatatcgggtccaaatacgggtccttttttatggatacgagatcgggttcggtaacatagtatctgacgaatacggattattcggtaaaaaattctggtatttcccggatattacccatattatgtttttgtgaagcacctttttgtactatgtattggttctactatgatgtattataccatgtttatttcctaaggtcctaatggcctaatataatcgtattacggatatatggaattgttaaatggttattgtctactccttccatcccaaaatataagcaattttatcaatgaatctggataaccatatgtccagatttatagacgaaagttgttatattttaggacggagatagtacgtgatatataagattgttggttcgacttgatatccgaataaatatccgtaaccgatagtgtacgtatccgttttggtacttattcgttccgtatttttgtcggacattatctgagtttgaatccgtattcgacactatccgtttccgacccgattccgattataaaatatggattaggatataggaggagtgagatctgaccgaacccgacccattttcaccccctactcgtctgagtcgtctcatcttgaaatctctaaaacgactccggcaaacaaacgagagcggaacacgaaataactgcaccccgcctccgcaccgcaccgcacccgaacccgtcccccgaaccatgcaatgcatgcgcccggttagccggaaaaaaaaaaaaaagaaaagaaacaaccggagtcctagtgtctcactgatacctgggccccacctgcctccgtacgcggtcgtaccggactaccgactctgacactgagccgtgggcccacctaccactccgccgccgatatatataaaccggcggcgagggctctgcaatccccagaaaaatccccacccggggtgaaaaaaaaaataaaggaaaaaaaaaacggagagaagagcgtcgtaacggaagaagtcggcgacgcgtcggcccaaaccctagacccgccgccaccgccgatccgcggttccttcgcaatggcgatccccacgccttcgccatcggtcgtagatcagccgtcccctcccgcgcctgcttccgccgccgcggcggcgtctcagccgctagccggcgatccggctcccgaggcggcggcggcggcggagggggcggggggtgatcagacggccccggcggccgccgccgccaccggcgcgtcgctgtacgtgggagacctggaggcgagcgtcggggaggaccagctcgtggcgctcttctcccaggtggcgcccgtcgcgtccgcctatgtgtgccgcgacatcgccggcggcagaaagtccttgggatacggctacgtcaacttcatgtcgcgtgaagacggttagttttttcctcctcttccttttacttctcattttgtcgggtgatcggcttcgattcgatcgtgggttcagaattctgatggtctgggtgtagtgatcggccttaacttgaagatttatttttcctgatgataaaagctttcggttaatttacgtgatcacttcgtatgggcacgggtcgatcaactgttcattatggaggtttatcgctttgtttagcttacggaggcctatctctttggttattattactagtttgtgtgtagtcgatctgctatatattgtacctattaattatctgtgtgcgagatgctgtaaattttgtttgtttaaattagttcgtttggagtagcatatacttattactgttgttatgataatattgtaagtttaattaatctgttatatttattttaattttttaatggggtgatcacttttgagtgtagggctgttggcaacgatgtattatatagtggagtacaatggttccatgttaattgtgagcattggattttttttttatgaaactatgtgttgtgataccttaatttgaatagaagggaaattctattttgtttagttttatactatgcatctttgtttgttttcgttgtattttgtatttcgagagtttgacacccgctaatatcaacttattaatttattatcaactctttaatttagtttgattgattgcagctacccgtgccatggaaaatctaaacttcaccgttgtcaatgggaagccaatcagagtcatgttttcgaatagggatccaactctgcgaaaaagtggacttgccaatgtgtttataaaaaatcttgaaccgaatattgacaacaagagtttgtatgaaatgttttcgtcttttggcacaatcctctccagtaaggttgccacagatttcaatggaaagtctaagggttatggatttatacaatttgagagcgagtcgtctgctaaggatgctatcaatggcctaaatggcatgttggctaatggacaaaaaatatttgttggattgttcatccgccggcaggagagagaacacactggagacgctaacaactttactaatgtatatgtgaaaaatttaccaaaacattttagtgataacgatttgctaaatgagttttcatcatttggtgcaattactagtgctattgtcatgagagatgcaaatggattgtcgagatgctttgggtttgtaaactttgagaaatcagaatgtgctagaaatgcagttaaaaatctcaatgggaagtccattggtgatatggtgttatatgttgcaagggctcagaaaaaatcagaaagacaagctgagttaaaagcgaaatttgagcatgacaaaaatcagaaatttgagaagcttcaaacagtcaatctatacttgaagaatttggatgatgacatcaatgatgagcatcttaggaagttgtttgaatgttttggtgaggtagcatcatgcaaggtatgttctctatttgttttactttgtttgatgttatgcttactgttagtgagttgtcatttgttttacgcttccatatataatgccaagttacaattgttgtaggtcatgcttgattcgcatggaaggagcaagggttgtggatttgtatcttttgcaactgttgaagacgctaacaatgctgtatgttaaaaaatgattcttttgtgctatcctcatactcccaattccatagttctaaatatttttcagtattatgcaattaatatttttaaaaatattatagattttaaaaatgaacgggaaaatggttgggaaaaagccattatatgttgccgtagctcaacggaaggaggagagaaaggcatttttagcggtatgtactaactctattacatttgaatttgatttttagggtaggttttgtacatcttgttatcttttcttgtgagttttgtaattcatgaaaaaaaaaactgaaagtacattttgtttcttaacattgacacttgatactaagtgtgctatgctaacattgaacttttccatgttacaaaggtcgtttgttaagcttgatattcatatcttctttgtttgccaggcacattttgctcgtgttagagccctagcaacaatggcacctacattagggccaaacattgctccccatcagttcaattttggccatggtgtgcctgccttgttcccaccaccaccacctgcaggctttgggttccaaccaaattttgttccaaacatgatgatgccatataacatgcaaaggcagcctggccagaggagtggtcctccgcatggaggaatgcctagacatctgcataatcctcaccaggtattcctgttggctaaatcattgtcatattttttttcttttttaacacaatagatccagcatctaattgtatccaattatcatatctacttatttttgctaatgttgtcaattactcgcaacttcagctactcccccgtttaaaattacttatcattctaggtgtctcttagtcaaacatgtttattttttaccattaatttttaaaaaacagtgtactttgacaagtaaattatatattatgaaggtattgaatctaaatccatgaatatcatgatgtcaaactacatgagtttagaaaaaatgattgtcaaaaactaaaatgtttgacttagaataagtctagaaagagaagtactaatttaaaatggagggagcaattaataattaactaggattcacttcacttaacatcgttgcttgttactttgtagatgtttcaccaaaatgccaaccagggcttcagacacatgccaaatcgtaggaatggtgtggccaacccagcaatgttgcatcagcaccatcgcttctctagcccaatgcagccaatgcaacaagctgtcaagcatgtggtgcccgtgggggaattgcaagctccaagcaataaccttcagacttccttggcttctgcgaacccggaacaacaacgagaggtatggatgtttatgctctgctttccgtacatgcttgaacaatttcacagattataaactatatactggtcatcaacatgtggaacagcattgcgaaataattcttatggtcaaacttcaatttttgaaaaacttatctaagtcaaatcagccatgttgtgaaacattgaatagatctggagcacgttttgttttacgttttgatgcatgttctcttacgcaattattgttacaaaagcatatgtagcgaatccgtttttcagtttagtcttttattgatgtatacagttagaaatccttgctatgaggatttttttctcaccttaaaattatactaaatttcacttctcgactatgtacagaccaagcttgattcttgccaatgtaggctatacaattattgataatgtggcaatttctagactacaatgattccttttacatcccagaactaacgtggtggtttaaagagagcattcaattagtataaaccatgacttgttatgaggttaacaaaagttttggtacacgacaaatcactattttgaattgttattaccttgctctgatttctattatagtcatgaaattcttgctctctgtaaaatccttctgagttgagatggttggacatagcatttttgttctcttattgacagttagactacaacttcaccaatgtttaatttttcccatttctgatgtacagattcttggcgacatgttgttcccgctcgtcgaacagctggtgaacgagaaagcttataaggtgactgggatgctgcttgagctggacaagactgaagttctgaacctcgtagagtctccagatactctccgggacaaggttgctgaggccatgaaggtgctggagttggaggctaccgccaccgccgccgccgccgccgccgcttcaggctccggcgacggcgacgccgccgcgccgtcctcctccagcgccgcctgagcggtgttggtggccggatgaattatcataataagatgaacttttgaagtcgtgtgttttggacttgggaactgtttagatgactgttcagtttatgactttagcagcttgcgtttgcagattatttggagtattggttatggttgtgtactctttatgtttattttttttctttttcatgtgatggtacactgtgtgtggatggttaattaggattttttgttgaaatggatccttatttcagactcaaaagttcggttcttttaaatgttttgctagttgttatttctcaaatatggtaatttgtgatgaaacataggtaattaggtactagtactgttttgtatgcaaaaccctgaaacttatgtgggttcctgtggaattcatgtctcctctttcgtttggtggagatgtaaatgctgtccccagatcaccataagtaatattggtccaataattttggtcttaattgctctagctggaatgttacaactttgagcaacaagaggaaaaaaacaagagaacttctatacacaaggaaaaggacgaacacacacacacctctcccacagcaaaatcgcaggaaaaggaacgaaacagcacaacaaactcacccttttacagcaaaatcgcaaccaatctgaaagtgaaattgcatctttttgcttgacccggagaagtgaaattgcccctcttttttgtgcttactcatccctgtgatctggtgctcaggctcaggctctcgctgcttgcccaaccgtcctgcacctgcatggagtactgcaggttccagaggacgtcctcaatggagggccggctgcttgtgtcactggcaatgcaattgagtgctatctcggccaccgtgctcagcgactcgacggcgaacgttccgcggatcgtcgggtccgccatgtctttcaataaatctgggtcttcagctatagcttcacttatctggttttgaggagtagtaaaaaggttaggtatttgctggtgtgaggtgtttttcactctgatgtgaaaccattctcaatttacctgagttttcagggagtccaggtcttttggggactctgttggcttgcctgtgattacttccagaagaattaggccgaactggtaaatgtcatccttgtccccttgttctgtgcttggcacgctacgagaagaaacaatcataatcattttagttcacaagttgagaaaattaatcagattgtcattcattctgaaaggtaggtcaggtggcatctctgagtttcaacaaccaatcatttaggttcagaaaaactgtcaactgttatagtttagcaagtgggagtgttattttccatctaaaaggacaccgtacctgccgagatcattgtcttcagatgtggcaaagggggattctgagaatatctgaaagataaacatggttacaacttagctatcaggttagcaagttaggagcttccccaataatttaaaattcgaacttaccttgccattcttgctagttgatatcaacgggaggttaaagttgctgattttggaagtgagtgtcttgtccagaagaatattttcgatgcttagatcattgtgtacaatgcccggagcagtcacatcatgcaaaaactggatccctctggcgacaccaatggcagcagaaacacgttggggccattttagcatctcacgcttcctccactctgcaccagccagtaaaaggataaattcacatacttgaagatatctagttatagtgcggtatatatgcatgatgtcataaaatataattaccggttagatgacttcttagggatccatttgttacgcattcagaaaggaggcataatgaactagcaatattaggattctcttgatcttcaacaatgcagtgaccgatgatgctaaccaaatggcggtgtcgaagtttagaaataatttccatgtattgggtcaggctctgaggggaatacttgggtttcagcttcaggcatctcagtgacactctagaaccatcttgaagctgaccgttgtaatgctatcagcaaaaaaggacaataagccacacatgaaaaataaaattttctagcagaaaacttgtactgaaaatatggccaaaggtcaatagatgacaaaaattggagtggcaaagcacttaagaacaaataaacagaacaggcataaatagctaaagttgtgtaaaccagttgaaaaggaagcttgaaggtaatgtgagccggtccatgtgttttttcctctttctttcttttgcaaaaatagcgcatgtataacgtacaataagccaataccttcaacatatactagaagcaaaatgatacttgatgcaagtgcacttatatatttttttttgtaaatattggtgaagaaaataatattattgatcctaagtacaatgcctcaaattaacatactttcaaatacttatcttaattaggacgttaaaagtaatcaagggcatcaaggttcttagttgcaggttaagtccaataaaaatgtattcttttatatatatttttacgagagtattcttttatattcacccagagccttttattcatcaaatttataaagtgtgacagaaaaaaatacaaaagatattgtagtccaaagtgtactctagtccattatgacttgagatgcagaggtctgcaatggattatttggaaagatggagatggatttctaaaatttacatttgagtttgctagcaggtacacatgctcaaaatatactccacacgaaaataaaggaagaaaaatgtgcatggcacatagcaatcttcttttgaaaattgaaatgcatattattcttcaaatggttaatatgagtggagtatcatttgtatgtgcatttattgctttgatttttcgcttgaagctcaaaatgacttcacttctgcataccttaacaacaggagaactcttgatcaagttggatgaaccaaagttgttggttgcttcttggagctcctcaagtgtatacacacggtaggctggtacttctagtgtattcacccttgcagcttgtgatgcatgccctatgacaatggacatcatgttacccaaccaaaaaagaataaaaatgatcatcctgcaaattgtttagtggtcactaaagccattgatcctagttgttttttcccccctttttctagtttgatgattgactttgctgcttttactttctcaaagtcttctttgaagcaaggaataaagatccagcccatgcttcagaactcatagtctaagcaagatccacactagctagctcacgcaaagcttcctaattatacttcacatttcactaaagtgagtagcctttattcacaccagaaacaatgcaatacaaaactaatcgtaattgcttctaattagtactagcacttcacttctttgtgttgcccctttctctatcactaatcatatatacctttcaatgaagcccatgcataatcttgtgtccccttttcataattaattcaactaagactaagtgcattgtaccaaattgaagtgcagaaaaacaaaataaaaacaaattaagcaaagcaaatgcatttctcctcttactcttttcagcaggagtaacaatcctctgtgtcaccttggccggcgccttgccgccgtccgccgccgccttcttcttcgccgccggcgtcgacgccagcggcgacttgggcaagacgctcacctccggattctgcctcctcgccctcctcagcacggccatcatcaccagcgcgatcagcgccgcgccggccacgacgccgccgacgatgccaagggccatccccacctggccgcccttcccgcccgacccctgctcgccgccggtcccctgcgccggcggcagcacggcggccagcgcgccggggttgcagtacgtgctcggccgctgcgacctggcgtcgcggaagcagttgcccgcgtcgagcaccgtgcgcgccgacgagttgccgcgcatgcacgccgggcgcgccccggcgagcaggttgtccgagacgtcgacgaacgccagcgcgtcggcgcacgccgtgctcgccggcagctgcccggcgagctggttgcgcgacaggtcgatgtgccgcagcgccgggagcgcgaagatggaggaagggatccacccctgcaggcggttgccggacacgtccaagaactggagctggcccagcgagctcatcgccgccggaatcctgccggtgaagttgttgtcggcgaggaccagccgcaccaccgcgttccccacctccgggaacgccgggccgagcctgttgtgtccgaggtcgagctcgtcgaggaacgcgagcccggagaggttgggcacggcgccattgagcctgttccgcgacagcacgaggctctgcagcgagtacatccgcgagaagtgctcggggacggcgccgtagaggcagttgccggtgaggttgagcacccgcagcgcctggaggcggtggagcttggcgcccgggagctcgccccagacgccgagcgacgcgagcgtgaggcgcgacagcgccgggagccgggtgagcgtggtgaagagcgcgtcggcggagaagttggccggcagcgcggcgccgggcgcgcggccgccgagcacggagagctcggtgacctgcccgcccgcgcacgccacggtgagcgacggcgttggcggcagcgcgcacgcgtcgggtgcccccgccagcgcgtcgagcgccggggggaaacccagcaggcggcgcacccagagcagcgtcttcgcctgcgacgacaccagcggctgcgcggccaccagcgtggagacgtcgacgcagaggacgacgacgacgaggacgaacaccacaccgacgcgctcgccgcgcgacgaacgggaagccatttccgccgcgacgtcggcgattaactcagcaatcgaaagcttgcagctccgttcagcaatggcgaatcaagggagagcgtgcgcttagttggccattggtgggaggaggaagaaaggcgagaggcaagtggtggccatggccatggacgacgcgcgagcgagtgcttgccagccaaactagtactactactactactccactgccgactctgctagcgtagcacacactgtgcgtcactgtcccctcccgcgatctggaccagatattgccatgacacgtaggccccaccccaggtgggccggccatgtcagtgtccccgtactggtcaatggaggctggtttcgctgacgggtggggccggaggtccgacgtgtccgggttctgcacgccaggtgtgactgaaaactgggtgggtgtggggccagggcagggcgcgcaggccggagttaactgccctggagcgcagtagggggtggttggggtcggagaggtggtgcactctgcactggtgcatggcatgtgcgaggcgtgcgtgagcgtcgtggtgcgacggcgacgtatgcggttaagcggtgcgcgccagggcccaggtgcatcgcggaacccttttttttttctatttttaaatttttaattttaaaaataaacctacgccaatttggccaatgttagcaagaaaaattgatttctttcgcttcacaatactaaataattcgcttagcagtcagcacacaaatatttaattccatttgttcagtttgttttcctcttctttgtaagggttatttacaagatctgaatgttttcctcttctttgtaagagttatttacaagatctgaactttttaaccacgctagcccacactaatctaccgcatcggttcagctgacacgtcaccatgcttgacgtggcaggacaaggatatcacattaagagtgttgctatacgtccgactccctcgtccgacccccatctgacccaaccttaactgccaatcggtccgctccacgcagaccaacatatctctatgtgggctagtgcaattagcagttaagtgttggtcggacatgagttgtacgtaccggtcgtatgtatagcgattttcatcacattaaatacaggtgatgtttactgtgctaaatggattggcgtgctcagaagatttaaatttagaaaataagtttttagaatggtttgttttaaataaaaaataaaaaggttttaaaaaataaaagaaaattgttgcggaagatcacgtctactaatgccctctccaccttccttagattaatattttcttctctttcgcttttcttagccaacaaacaaaatcctacctccgtaacaaatacccaatatacacagatatcaagtcgagtcgcgaattgagcgtagcttagctggttaggtttcttctggtggagctagcccacacgtcgatagcgatatgtcggcctattcttgcaaagatgtttatagggatagagtgtgcgcgtgtacgtttataggggttagtaaaaaaaatatcaaagtcgagttagacaactatagggtgtgcgtgtgtgcgtccataggggtgagtaaaataagatatcaattcaagtacgtgtgattataggggtgagtaaaaaaaatatcaaatcgagtgtgtgcgtttatgaggatgagtcaaataaaacaaaatatcaagtcgagtcagacaaatacatgtcgttctaacgacgtccatcgcaagtattataatctctcatattttactacggtgatagtaatattttgtttgtcacttgtcccgtatctaatctggttcaatccgcgtgaattttttccacacgtcgaatgggatgttttttattttttctaacagtagtcaattggacgaaactgaaaaaatgggccaggttccccgatcgtggcatgatggagaaggacgctagtaataagtcatcggcttggagtgtacctaacttggatgctacgagtcaatcgagtggctttgggctttcaactttgaacaccatcatgtactacgtttcccacgaaaaaagttaggcgagtgcgcccgtcgttgcacgccgcatgcgcaatgctggggtcgtcaaaccagttgcgccgcttccgtcattttttcaggccttgggcttgttactgtccacgttcatttttactttctttctctcgaaataacttcaattttcacatacctcatacataaacagtcccatcttttcgcttatgcttatacttattagttaaaatttaaattttcaaccttaaatttaaagctgattttgagtttttttatcgaattttttttcaacatttgctttttaagtcgctaagaacatgcatataaaagttttattcacaaattacttctcgtttgcaaatatgccatttttcttattccacaaataagccaaacaatagggccgaaaatataccaatacaacacaaaacaaaaaaaaatatctactttataaaatctcaatgtaattatttttcactttatctacttccaatatatccatcccctattttcacaaattctaatgcaatgattactaaaagtaaatttattttgggataaataggaaaggcaaagataaactcattagagcacccgcaatagtaaagtaaggtgttctttataaaacatgtacatctcagcaataggctagattaatagtaaaccacctcaatagtatgtttacatgggtatctataactctctcatgcattgcctcgtttttctctatagactatccctaagttagtgatagctttgctctctctcttcatttaatatcttccatgtaggaaaatatactgacatggatctcttatagagagcctatagataaccattgtgggtgcccttatgagatggaggtctcattgtcttgaaagcgagtcatcctccttccattctcttccgtccgtactatccacatgagtaactaccggatcaaatgttttatctccgaaacgtatcctatgcataccagcattctcatgtacacaccgtgcacgctaacttaaaaatatcatatttttttaagaaaagattgtatatattttttgtaatattatatttatgcgtaaagtctcatctccaatcaccttgtagcacattcttaaatttgtggatctggttagttacagtatggacatgctacttaatctaagcacactcttttgaggtcagatgtagcacttgctaaaccggatcaatcaggttaattaagcagcaacatgacacattccgtttggctgtaaagagtgaaagacaagtgaattgaaagttgagtggatttggtgagatgccatcccaagcatgtgtcggttacgcatcgatcgggggatatatggaggaaaatcattagagaaacggacggattaggcttgatccgtttggctgtatctcttgtggaatgctagctagtggtatatactgccaagtgaccaatggtattaatttgtgtacataatttggtgtgaatattacggcctctggtttgaactattacgcaaccctctcgctacacgaaatagtccaaaaaaatcccgtaattttacaaaagtggagacacaagatatgagggtgtggcatcatttctcattcatccattgcattctctagtgtacaatcctcctccctactcctctatttatagacattccctcttccaccttccatgtttaatgttgggcccaattagtgggtaaccgggctgggccttcgtgggccggcggtttcctaacatgaactattcatatgcatcacccactgatttttttttccttggaaatgaagatgcacagttttattttaccaggacaaagttgtacaattccagccttgcttgttaaccaatttgtattgaatttgttctgcattaaattagcgggcaagcgtaaaaatgctctttctgaagtgtacttcacaatttcattgttggagcttcttttaagggaatggaatcaaattcattatggtactttgtgactacagttgaaattacatgtgaaagtagtcgttaccaaatgtactttgactaattactaaaagaactattgaaattaagattgagcggctgcaaacataccaatgaacatgcccctgcagtttcaggccgtactggttgcaattttaaaatgctcgatcgctgtgcgttgaagaatcaaagagtatcagaaacaaccaatccctatttaataccatcattatttattttttgaactaacactagtactcctgattgtttaatactgtacgcctgcacggtgtttggacccgtgaatctctgccttaaaaaacttctgaacccaagcataaagaacagctgactctgcctcaaccattactgctaatcagcttgataaatgcgctacaggaactttgtggtatggtgttttggactgttggtgtgtagtaatatgatcgagtctgtttggttgccattgccaatttgccatgaaggagctgattgactacacgaccatgaatgatgatgggttgtttcgttcgtgtacagcgctagcaacatatcagccgctaataacactattttcaggcaagttaagtatcaaaaggtgtggctaactggtcatgcatgtaaaacttttatccgttagggtttaaaaccgatgtctataactattacacaaatacaaataggctctcaaatttagtaaaactattgatttccccatagtcgtctctctagggatgtgtgacccgtgcgatcacaaatagccttagaattcttatggcctttaacataggctgtgtatgcaggggcggaggtagagtatgggacgggggtgtccaggaacccgatcaataaagttttttaagctaaacctcacatcttttcatcatgtgtgcacgcccatctcaatacaaaattaggcacctgcattagcttaaacttgatctaaagtagagtaaattaagcaaatggccaccctcctctatttcgtttagctccatccttgtatgtatgatcgaaattactatttagcatagttgtgttactagcgtgtactaaatttgttttagttttcataaacgtgcatatgtatgttccgttaataaaatcaagggttaattttctgttcaacaaacagtgtcatatctaataacaacaaaaaaaaaacacaaagtcaacgcattgtttttcagtattcatccgcaccatccatcattaaaatccattcatactaatggacccacgtgtcatactcctacacctctatcggtccatacccaattctccactcgagagtgcctgaggttcttatgggttgcttatgatttattataactcgtaacgtaacggtttactagcgattaaaaaaataatccatgggtaaaacttttacatatgtccttagcgacttaaaaaccaaaactgaaaaaaaaatcaattgacttagcgattttaaaagtcaaaactgaaaaaaaatactatgttgaacaaacatgaaaatcaattttaaaatttaaattttatctttgactccgagatcggggagatcgaccatcactcatggaatcgtggtccggctcaatcatcaaggcccaaaagctggagcatcttttggtgcgtgtgtcggtgctgacgtggaccgttcccttcttcggatactcgtgccgtggggcccgcatccacagtgacacggaaacatccctgactttgtgaagtttacagttatgccacttgacatgtgggccccactttggtatggcccacatatcagtggcacaactgcaaaatgcataaagtcaggggatcctcgttccagtgacacgcgcatgcatctgtagatcgatcgagatgagcatcatcaatcgtcgtggtcatggctttagctggtagggcgactggaaattcggggggatcatgtattcatgtggatgtgtacactttcttctcgtctcatgggttcaaggcttcaagtaatggtgatgttgatgtggcatgtgagtcatcctatcacatttgcttgctactatgataatgctggttttttttttttttgtctctatgatgcctatctgtacactgagctgtggtttacccatgggtaatttggactgatatctgtacattacgagtggtactaggctatgctagagaggtaacggagtactccctttatccgaatatataagtacacctaatacagaatgtgaattcatagtctaaaatatatcacatcatgtgctagatgtatttatattgagatggagggagcacgtggttcttaggtttacctgactcagattggtcggtcatctgcaactgagcaaaggccctgtttaattccaaaaaaaaaaaaatcacattgtcctatcgaatattcggacacatgcatggaatattaaatgtagaaaaaaatcaattacacagattgcatgtaaattacgagacgaatcttttaagcctaactataccatgatttgacaatgtggtgctacaataaatattttctaatgacagattaattaggcttaataaattcgtctcgcagtttccagacggttttgttattagactccgtttaatacattaacttcaaatgtatgtccgtatatttgatgtgacaactaaacctaaaaatattccccaactaaacaaggccaaattaccatggcaatgtgcatgctagtgattctcaggatccaggtgaagaatagttaaaggacagacttgaggataaccgggcaatgtggcatgtcattttccaggcttgaagcgatcggcaaaagctcccaggccagtgccatcaattggttcccccatcatgcagtgcagtactaatacgtctgccttcatgcactgcgcctgcaacatcagcatggtgggctccaagcactgacggatgcacaatctgcagctatgctgttctgcactagtgcagctgtgcagaagcagggacaaagacaaactatgaacaaaccaacggatgaatgaacaaatcacaaatgaacatactactaatctcgtttcagaaataaatgaacaaacactcttcaaggaaagataataatgaacaaataaatagagggggaaagaacaaaaagaagcagtgaagaacaccagaattccagagaaaagggtgcaggaacctaacccgttcctttcccttaatggctttttgccactgtctgaagtgatgttcttgctcctgcacctaacttgtttgttttcttgctcaacgttgcgttgttgcatctgttttttgcgcgaccaccaattatgagcaatgtcattttgtgcagcagcgaaggtacatactcccctgtctttgcctgtcttgcgcaattgtcagaatcttatacaacctgtattagtagcttctatagcggtacgcttaaaacacgtcactagtgccagctccacgctttatttagattattgagtgaattattaccgtaaattatctgcttgacagaattaacgaaagggcatgtagcctagtggttacagtgacctgagtagtacccaaggtcctgagttcaaatctcctatggagccaatttcagattgggttgtttgtggggctaagtttcctatttcaatggccgtatatatccggttggatatagaggccgggtaaaaaatatccttctctataaaaaaaataaactcaataaataacttaaaacaagcggtctaaacaatgcggtagaagaatttttttttgaagtgaattgcatcatggaccaagtattattgtctaatttctatcttggaccaggccatatgcaatattttcactttaggcaagggtttgttaccatctagttgcacattgggccaccattctgtcagtctatctgtttccatctgctagccgactgccaccactactgcactacgcaagcggcaagccgttgcttcttcgggcattcaccaactccggcaatgcatccgagagagagagagctaggaaggaggtacggtcgagtgcgaggctgcgagcacgtgcatcgggccagttcgcgtagagatagcttcagccttcagctgagctcgagttactcggccagagcaggcgaagaacggctggagctcatgtgccgaccaactctaatcttctgttgatcaattttgaggaagccacccatgctcgatggtagctcgattatacaaactgaaaggaaggggatgagtggacagaggccagcaacaatcgtgcggaagccctcacggcaccttggcatcctcacagtggtggcgcacacaccaacagtggcagcaggctgctggagttggagatggtggactggggtggtccaaagtgaaaaaaatggtaaagtcatatggtctaaagtgaaatctttgtattaggggtggtctaagctgaaactctggtaaatttatatggcctaatatgcaattcactcttttttttagagaatatatattccgatgcatagagcaaataatcaggtgaataatctaaaaggagcgggtattgagaaaggaaaaagatgacagcaaacaacgttttttcctatttagaaaccggcacgcccttttgcaaacgaagctcattctgtgtaaacacctttgaagtagtactaaattttcgtgtaggcacttcgttcccacgacagttcaagaagaaaaaaaaagagagagaagatagtatagttttagggcccttttaatcgtaggaatggaaaaacaaaggaataggaaaaaaatagaattttggtaagaattcataagtaaaacagaagattgcaaaatgcatggaaagcacaggaataactgtttgactaaaccgtggaaaaaacacaaaaatcataaatcatattagaaagatcgactcaaaaggaaattttttcaaagaggttaaagttattgttaagtttcctccaaaatctctacaagattatccattccataggatttttcaaaggataggatatgattcaatcatttttcaagtatcttcataggaatttttctacaatattaaaatcttctaaaattcgtatgttttcctgcaaatcaaaagggtccttggcacgttgttatgacaagaaacaaggataagctgtttcttgtactatttctagatatagccggtcctatttctgtgattggaatgatctcacaagtcgcaggtctattctgtagtaggtgcagtgatgttgcaactactactaattgcgatgtagatgggcgtctagccagcatcttttgttgttggaacgcattaatcacttcagaatggtaaatgaaaatgccaacaattacagataaaaactggatgcggcagataaaggaacaaatcgagtcaagcttgcaaagttgcaaaccaagatcccaggcaaaaataaatgttgcttataacctacagtttaaccaaaactgtgcatgtgctctggattctatgacagatccaataatacaagcagacccatgtgcgcatggaacgtgcgcacacatggatagaattcattccctgattgcaatttacatatatgcaatcaactcgataacacacgcaatggaagattataccatgctctgacacacggtcagtataatacgagaaaacttcagacaccagcagggaatttctgcccagaagtaggagtatatcacacaaataaagaattcaattatattcagatgcatgactggacaattcagaattgcaaacttaacaaagggataataaagcaaacatccaccctgcaaaccatactacacacttaaagacctctttatggttttgataataaggcaagctccagcgatatatgaacaaatgaggggaaaaaacaagcaccacacactctacttcatatccagcgataaaaagatttgaatctgaagtcggtttggttgttctagatttcttgggctatgccaagatccattggcatttcactgtccccctacaagtacaaatgaactgattagcaagacaagaaatataatgagattttccagaaaatgtattgtttatctcaattgctgttacatcattgccacccttaccatattctccttatcttcatttgtcacctccttcaccacatcaactgaaatataaattcaccacaccaacgattgacaacaattcagtaattgtggagttataacaggtgtgatatactgataattacaatatctgaaatacatgatggcacttaccaggttcttgctctgtaccaactggcaaagcctcgctgcctccattgcaatcttccttctgccccttgacctgcttcttggctttcttaccagtattcttggtgatggcttcttttgcaggattccggttgtaggagcctctaacctttgcatcaggcttcttctgaatgttgtcttttttagctgcttccttactttgagctgcatcagaattcagcgatcttggcttcagattaccctttggtgacacattggtggcactatgagcagccttgtcagactttttcggctgttctgaagagttcacagtgatctttagcttctcaagatcctccacgatattgtaaacctgaagaatatccttcactggttcctccaactctgttgcaaggccatgccggacaacataagcctttagctcatctctcatacgatccagaggctgtggaaaagcacacttattataatatgatgatcaatgaaagaaactgaactgctcataaatgatcacttgatgctcacctcgcattctgattcaagtgcaagcttaaagaagcccaacgatatagagtgcttggaagcagcctctgcaagcctgatttgtgtcatccaatatgaggttgaggacagagtgctgaacttgcgccttgctgtggacatggaaacttctgatatcggggtatcaaacttcccttgactatcggacctccttgaacgaaccaatgacacaggagtgatagttcctgtaggagttggcctggggctaacacctggcttggtctgtattgagtgcctccgtggaggtttggctgaattatccttcaccgatgaaagatcaagaccacaaacgctcttgctgacatccaaagatggttttggtctgcaaggaataaaactacaaatggtatcaaagacagagctagtatccagcaaattttatagttggcatctaagtaagaggcattaagttgctagtctattttgcttgacatagcaccaaaccatgagatgcttagtttctaagtaatacacatgtgtatgctggcctattgttttcccataagcttgcagaaatattgagataatgcagccttgtgatagctaaacctcttaacctctggaacaaactagttaggactaccaaatcttatctgagatgtaaacacaaagatgatatgacctaacgaccagtattatagaacttaagaaatgaagagcagaccctgcattcaagtcaagatggtttttgtttactttgttttgaattcaaaaatattatgcccatgtccttatgaatacgctgagttttgatgtacttaggagtatttcattatttggactaatcatactccatagatggttcaacaagaagtaatacagaaactctattggttaacctttctaaatcagcttgtttacatgcactttcaatatagagcatcggtctaccagcctcttaacaaacaaaacttgcattacactatggcaagtgggttgacaagtccttagaaagtttttgtgacatttgttcttgttttgcatgttttacttctttgacagtgagtgcaactcacaaatcagatttatgtagtatccaatattgatattagtagtaaagtccttgcttgatattactaaaagtaaagaaccggagtgagctggttggtgcacaacctctgtagatggcaccaacttctttttttttcacatggcaactgatttgcaggtctgcagcatgaacagtatgacataaagtcctataagattcatgtacacagtacactccattcgatactttgttgttcttgcaataaatatgtttcgtttaccaaactattttcagatcaatcagccacttgacaacgtaaatacccatctaattgctagctgtacacgtctgtgctacatattctggaaacaaataaatcatttgcacaacacgttgatgtaggaaacaaagatttcaacgctaatccggagcagcaaaattcagtttcgcagcagatgtggtttaaattagatgagaacttctcgtgataaacgccggcatctaacatgtccttgtaactaaataagcgaaggcaaatcactgaaaattccaaccgacaaaagtatattccacaaaccaacatgccagatttcactcgcatatagaaattgcagcttcgaataggagagacagacctcctcgccacggagccgctcgtcggaggagcatcggcggcgcccttcccccggctcgccgaccggagcgggtacctcagcttcgacgccctcgccgcggaacctgcacgaccaaaaccggcacatcacacccaccgaccaaaccacacgcatctcccgcctaaaccccaatcaatcaaacaaacagaaaaaaaaaaatccaatacccgccgactgatcgccggaagccgtcgccatgagcccgatcgaacccaacgaatcagccgccgccttctcaacctcccaactcctcctcaaccttctcaaaccccaaattcgaaaactgccggcgccgatcgatgcggacgagacgggaaacgagttctgcgttttggaatggctagtgctacacgttgtatataaataaaactcccacgcggggctgggaaaccctacacgcgaggaggagatgtgtctcgccgacgtgcgggcccgggggtggtgccgttggtccgtgggcccacgtgtcagtgagatggggtaggggagggtcgcgtggcgtggggtttgaggggagcgccggagcggggggaggggcccacgggaagggcgtttgaatcgcgtggcgggcgggaaggaggcgtgcgctcggcggaatcgggaaattttcgaacgagggggggaggcgtggggtgcgtgggggcgtaaatggcgttgttaaggggccgtgggcctgtttggttagctgttacccggggcccatgtgctctacctagtaatggaagttacagttgtgtatgtggtatacaacggaattctgctgggacagaacgaaaaccgttaggtatgagatcatgatatttttgagatatcaggcgatacttgcaaggtatcaaatgatttctatcacatatcaggtgatacctgttaggtattaggcgattcatatcacgtattagatgatacttgcgaggtattaggagccgggcaccaaagcatcatcaccggtggtcccaccgtccacgctacatcggagctcgtcgttggcggccgccacgtcggagctcgtcgatgccggctgcgtcctccgtcatccacgccccacgccagagagagccccttccccttctccggcgatgtgctccctgatggcgaggtgaggcgaaatagagaggcgatgtgctcctctctctctctctctccttcctccgccagcaagcccccttctttcttcgttgccacatgccgccgttgcgctgctctgctgccacgcttaagtgctatgggacgaggagcaagacgattccgtcgtgggcactgtgaacggtattccctcatttagcatttccttttaattttgttactgatttttaggatggagtcattggctccatatccatcattgcaaactatacaacttttgaactatacaagatcactcgtataattaaaaaatggagtttgggctcattctctataggaggaatcttgtataaatgaaaaattgtctggtttacaatgatggatatggcgatgacttatattaatactcaagcaacggagatggcgagctcggtgactagcggagcaaaattggcgcgcccatcgacggagcgcgtaccagacagagcaagtgaggcggcgattgcctgacgagtcagtggcggagccacgttcaactcaggtggtgcacaggaacaccacccccctcccctccaaaattcttatgcaagaacactaaaatgtgcagtgatgcattgattttttttttaggctttcaatggtagtgcaccacctctgtttggacgctagctccgcccctgtgacgagctcatacgctggcacacgccaagagcgagttgccgccatagatgatggcgaatcgggacggcggagcccgaacagccggcggcaggccgtcgcaagctcgagcggctggcaaccttggttgcttctgcttcttgcttgtttgaattggattgcttcttactcatgtcctccatagttcttgctctgcttgtgttcgtgaaaaggttctttctcgatagcatctgcttgattgcctcgatgttatcccaaggaaaacgtaaatgaggttggagtaaattgaatttttcctgtgtgttttcccatgaaatcagcagcaaaggaatcttttcttcaaatttcgtacgagtggtttgcgtgatccgaatgataggaaagaaaaaaaaaatctctgtgaacagtattttcctaaaattcctatgaaaaacatgtaatccgaagttgatatagctttagactagcatgtggttgaagcgcaaaccatatcttacctgctgcactgaaaatgttagtatttcctttgttttttaatatacgtcgttgactttttacattatatctgaacgttcattttattaaaaatatttacttattttttcttttgttgtggattgatttattactatagtaacattaagcattatttgaaatttttaagatttgcacaaaagttataacgaaagtcaacaatatcgtatattaaaaaacaaagggagtaataaacaagttcttcacagttgtgctgttgtttcagtagggaaaataaacctactgcatggtgacaagtgcaaggagttaatttaccaccaatttttttgacttcaacacgggaaacccactgcattccacgggtaaaagaaccctgtgcagatctcacctggaccagactcagacgggtcaaggagacgactgtctaccggtgaagtcaaaaggaactgattagttgtattgaagcctactgatgggctactcggttgcttcttgcttcatcacaaagcaaaatcatatccctgccctaatttaatggcagcatgatcgcagctaatctggagcacgtagtaataataataatacttagtgcgcagcgttttgacaatttggcatcttcgatcagatccaacactattaattattaattaatgtctgtaattggagaatggaagaacgatgatacttcctggaaacaatatgttaacactctgtgccacatggacgtcatactcatacctgtaggaacttgtgttaagatgtaaacgcagataattacagaactagggattgaaggtattataggccagcatttgttaggaattaccagctcatctagcggagaattctcgtacgaaggaatactcatgcattgcttgaagaaaccacactcggtcatgtcatattttgaacatccacggagccaaaaggatactcccctccctaaataagtctatttttatatatgaatatatccgtattcacgtataaaagtagacttaattatttaagtaacaaagaaaatatcaacacttattttaagtatttagcttggacaaaccatatcaaaatcctaaaacaagtaatctaaataagtagaccaattgtcgcaagagggaataatggacatttgattattaagattattttcgcggatcatctatttaattatagagataaattaaatatgttaagaaaaaaattaaagaagatagcttaaaataacacagccaaacaatatgcagtagataaacgtatattgagaaaacatatcttctgaaaattagagcatataattcgtttgaataagctaaaaagaacatggcaaaatcgaaagtgactgtgggcagcaaatatgcagctttacagcttcacagcaaagtgggtgtgtttagttcacgtcaaaattgaaagtttgattggaattagaacgatgtgacggaaaagttaaaagtttgtgtgtagaaaagttttgatgtgatagaaaagttaaaagtttgttgaaaaagttgggaactaaatcagacccaagcgtcgatcaatttccaagtaacaaatttttttgaaccttgaaaacagagacaccttataattatccaggaagtgtgtaaattaaataatatgcagtcaaatactcgaatgcagtttcatgtgggtcattgtcagtcagcacgagtatttgccaggtaagtatatatggttcggataccacacgaataagatattaattcccggtgcattcgtcctaccattttttttttaagaaaaaatcatgaactttgatttgatccatgtgtattcagagtaaacgttagagacatgatgtgcgatttttgaatgtttgacttcgcggcttgcatgaattgttttgtaccttttgtgttgaagttatttgccgaggattcatttggaaatttcctacacatctattaacgcggttaattgatttttcagacagcagagaatatacgtgcacaccgctgagcctttttcttttttcccgtttgcttattacagattgatctaccttcttcttgcaaaaacatcattgtgctgccagtagatacaaaaccacggtgacggtgcacagcaactaacaaatacttattatttttaagaaaataaaattctacatgtacctaaaatcttcctccaactatttacaaaatttcaaattcatgtacattataaaaaagcagggaaaaaaagaaagaactaatatatacttccatactctttaaactctatgtttttgtttattcttttaactgcttgaacataatgactttgaattagaattcttttttcaaatccttggaagatgtatgcatacaccgcactcgcatgctcgcgagtatgcccttttaactagggatgaaactggttcggatagtttccgtccgtccggaccatttttcggattcggatagtttcggtcggaactatccagaaattcttggattcggaaacgaattcggatttttttttctcggaaacgaaaacgaatacagtaagggtactatccgtcggaatcggaaaacggtcggaaactatccggattttttttcggatatccacagacattgataaaattttagaaaaaatacgtatatatacataactttttcatacggaatcagatgaagacaaactttatatcaacattgtagagcttgatgagatctacaacttttttattgactattttattatttgagatcatttaagggtctaaatatttattataatataccatattaatttttacaaaatctcagatctacaattcaaacgacatctgatggagatgtgttctatatcaaagttgtagagctcaacaggatctaccactttttagtttataacatttatatttgaaagcatttaaagcataaaacaaatattgcaagtttcgaaaatgtgaagtaaaataaataacatctccaatttatacaatggcaagtaagttatacatctaataaaaggtcttgagaatagaaaatgataatcatatttgcatatggatctcttagagaaacaaccatgaaaattgattttcacatacggttgtgagaccatctacaaaattgacgatataaatgttggagatgttgaactaaaataataagtgatatctcttccttgattaagaaactcaatttgaggggctttttatataccggtaaatattcgctaccgtattcgatccgtctcgtattcgctccgtatctgtattcgataatattcgatttcatttccgtatccgagttttcgattccgattccgattccgaaaaaaaatatgaaaaaaaaaatatgataaagctagtttccgtccgtttccgatccgttttcatccctacttttaacacacggtcaatacaccacatacaatataattgtgagtttacgcttttaaaatatgtgtatacacatagggaggacagataaatcactgcaccagaacgtaggtaccgagatttttactctaatgtttggagtttggaccaacacaacaaccctgtgcttctcaatatgaagtcgaatctaataaagcgctatgctacgcttcactttagcgaggataaaaaaaataggagagctgaaaaactaataaaaatactagaaaacaatataccgtttcaacagaataactgacgcttaaatactaagatatattttctataagatatcatatgatagtttctacgagatatcatgtatgatacccttggtaccaaatctaatacttacggtaccatgctgacaccatcatgatacatagataccagagtctgagacaatacctatctactaatacggtatcataggtactggatttggtacctaatatattgtgctgatataagcacaaataaactaatattttgttggaatggtatagtgctccgtaataaccctcgtatataatggtatatatgtaaaagaaaataaagaaaacatataatggcgggaaacatatctaatgtacccctcccgtttgctcctataaaatccccccacccccaggtcttaacggctaataaactctctctttcttcccttcctccaactcccaaccagtcaaccaccagaagcgagagaaagaaaaccgaaatcacgcgaaccgccgccgcgtgacgcgatggagccctcggcggccgtcgcgtcgaggccaccgagcttcaccgcgcagacgaatgccctcctccgcaagaatctcatcttccaggttcggatccccctttttccatccagccatttctttcctcttcgccttaactgctatgatctgtttggtactcggatgagtcttctttgttgttctgatgatatgccttagggaaaagaggaaactgcaagatggtcagtacaaaatttcacttgttgtttttttttcaaaaaaaaggaacagcaaaatttcggcataatttgctagttttcgttgttcttgaagtgtaggcgtcaacttgttctggtgaagtcgtgggcttgagttatgtttattcagaatattctcttgtcgtcgttgttgactttttggcatggccgtcgtcccttgatttatattgatgtcaaaatggaaagaatttgggaccaatacgcatccatcagcataggtgaatttccttgatcgtttgaattatagatgtttggaacgcgaagaggcgcactgaaatcccttttgtttttgtgcttcatatttcacttcgatggctgtttctgtagattattagtgtcaactgtcaagcgtcttttacatttcacacgattgcaattcgttttttattaattgcacaaactggtcgttgagtcaagctaattaagaagtggcatccatgtttgatcgtttcttgcagaaacgaaacaggaaaggaaccattcggctaatcatagttccgatatacctctgcctcttgctcaccattcttcagagagtcatcaacagcgttcttgacaagcccaagttcagatgtggttgcaagtgtgttgatgtcaccggcacaggctcttgccaaaatgtgtgtggaattcagtactctacactggatcaggctggcagttgccccataccgaaccccccggaatggcctgctctcttgcagttaccgcgccctgagtatcgcgccatgcaggaatcctccttgtatgcaggtttcccagatgtatcatgcagaaaatcacaatcttgcgcagctactatacccttcacaggagcaaatgagaccctatctaacagtaagtaatctgtagttctgtaccatctacttctttaaacctgcctcaaaatccacttaggacccctttagaaaaatgcttagggcttgttggatgaagaagtgaggcatgattctcttattatttttttgttttcagtaatgatgaaataatgattatatgacttatctgagagaaggaaaatctgttaagctgtagtgtgttcaccatattccataatccactaatttttgcccatttgtttggcagttgtcatgcaaaatttgttcacaagctcaccgctttcaaatctttctgataatgcgagcatatccagtcttctccttgtaagttgaaataaccatattattacttgtatggctacttttttttaagggtgaacatcaaagaacttactctattatcatgtaacttccaggggacagatgtaccgggtacttatacaggcttcattgaacccgcttttgtctcagatcgacccatatatgttcttagacctcaatgcaaagccagtgattcagttacagtccccattacgtttggtgatattaatattcggaaaggtaaaattcttattatgtatcgcttctactgtttctgagtagattaatctgaaataacaatgttggcaaactgatgaggttgtcagattattaacctgataccatgacagacttgtgattgtcattgtttgccataagaaccatcaacctctgtgcactccttcaatgacattctgcatattaccgtttatgtgcctcttgttttgttgaatgtttttggttgaaaatgacttaatatctgaacttcaaattctgttttagcagagatgttatgtattcaaggtttacccttgtggaggaatagttcagcaataataaatgaggaaaccttcaacggctacaggaaagggaaaagtcaggaagggataaatgagattccaatgggtatgcaggcatttcttacctatgccattagtttattattgcatcatatgctggcattaaaggtgcaaataactctaattacttctgttattacagcctatgatttccaagactcaaacgagaagcatttcagcgtgttagctttatataactcaacttatcagaatgtgtcttatgttccaatgccatttggacttctgcatatctcgcgctccttgaacgcggtgggtctcacttcataaaattgaccttttattagggacaaccatagactagtggtagatcatagttgagataatgggttcaagttaccactcttcttgaaatcaaatatatctgtttaatttgtaaagtggatctctcattcttatttttcttgtctgccaacccactaaaaagtttgaaacatttttatatttcattctgcaatcatttatggttcataacaaattgacaagaagatccaaggaaacatgacatctgatgtgaaccagaatattcataatactagaaaactgtaggctgtaataatccaggagggtttaaaacttatgagcacgcataatcatgtgttttcggcttgttctctagtaagtatagtagcacattatgaatttattagggacaatacctttcttgtcctttttacactatagttttgaaattttctactctgtttagaatattgaaggatcaaaactgatcccattatcattatagtcatatcatacttctgaaaaatatctctaacttggcaatactattatgcaaagcagtcaggaagctatacaactcagttctaccaataacatatgtttctgggcatctgtgtaggtctcaaatgcatatctccagtttcttcgaggatcaggtgtaaaaatgttgcttgcattcacaaaagaaatgcctaagcaagagactcgtttgagatttgatttttcttctgttatcggccctctcttttttgaatgggttgttgccttgcttttcccggtaagtggcaacaaattgatagtggtcttcccttttgatatagtagctatgaatttgacttgttaactagtccctctcagggtttcttaatagttaatagtaagtaaaatattgatcctcatattagatatattgaagtggagaaaagtagagaactgttagaacaaatcatgatcagttttataattcatgatgaaaatttgagatttaatgcaggttatgttgacataccttgtatatgagaagcaacataagctccgaacaatgatgaaaatgcatggacttggggatggcccttactggattatctactatgcatatttccttattttgtccatggtgtatttggttctatttgtcgtttttggatccgttataggtaggaagctattcccaacggttattttcaacaatcattacttgatttgacccattttatctaactcagttgtaatttgcaggtctaaactttttcaagataaatgactacagtatccaatttgttttcttttttagtttcatgaacctgcagattgtactagccttcctaactgcaaccttcttttctaaagtcaacactgctcaaggtacaacaaacctataccatttatctccatatccgtgacctattctgtactgcaaaatatatgatgtttcttgtttcttatgttctttccaccagcaattgcatacctgtacatatttggatcggggttgattgcaggatctcttattcgcaattttattgaaggtggcaagttcccaagtaagtttagcaaatattaccaaatggatgtttttaacaatcacattaccttcatttgaatattatatcacagttttcactatgccatagcaaggcagcaacagtttttaaacataagtaaactagccatatgggatgcctttcctgctgctagcaatttattttgataaatggggctgaaataattgcacaaaattttcctgttgtgttactgcagagcactggattacagttctcgagataatacctgcattttctttgtatcgaggactatatgagcttggccaatatgctattagggcttctgaagctggaagtcatggcatgagatggagtgatctaaatgaccatgcaaatggaatgagagatgcgctgattattattattctagaatggttggttttgcttcctgttgcgtactatttggaccattctgcttcagttggacacaaatctagtttcctttccctaataaaaaatctgctgaagaagaacccaacttggagaagggtatctattaacgaagtagttaacgacgctgttcatgtagaaatggtgaagcaagatattattaaagaagtaagtttcttatagttcttatattgcactcatcagtctttcagacagttcaatctcccacctcaatgcatttttttttgaggggaaacactactagacttacccagtagttataaattttataaataaaaaagtccatatttacatgaaacagaaaagaggaaaaggaaaagaaacacacagcaaagttcaataaggtctgtaaatgcattgcaattttttacattgcaatttcaggattacctataaggctgcaatatttttcaacaaactactctacataattatgtatatcatccagtactaatttactatattcatttcttgggaatcacataaatctgcatatcagatgttacctactacttgatatctagtggttgctaattttttatgattggattacagagggaaactgttgatcaagtactacaacaacagagtagcggctatgcagttgtctgtgatgatctcaagaaagtatatcatggaaaggatggtaatcctgataagtttgctgttcggggtctatcacttgctttgccttatggagagtgcctgggcattcttggtcctaatggagctggcaagagctctttcattagcatggtttgtaatttgatccctcacacgacatacttgatccaaacaattgcctagtcattttctctttcttctgcttaaacacataaattataattgtaggatttcttgtccatgacgattattttttctttatagtattctcttttatctgttaatgttttatatatttctgtagaattaattatgctttattgaccatatttctagaaccactgaatgtcctttttaaaatcccgaaatttatagcttttgcgctttagttttctaaatcctattcggtgttctgtaataatctctgtttccttccaactgttgccttacagatgattgggcttacaaggccaacatccggaaatgcattcgtacgggagttcagcatacagactgacatggaaaagatatataacagcatgggggtttgtccacagaatgagtaggatatgcaacctactattgcagatctgttgtgtgcattagcacttgttcatgtaaaaacaccttcgaattatcaccttttgtttttgctatgttgaatgcagtatgctctgggaaatgctgaccggcagagaacatctccagttttatgggcggctgaagagcctcaatggctctgatttggacactgtaagttatatcaagtataccaggtcccttatttcttcttctgatagcataatttttaaggtgaagctagcatatcttaatatcaatgtactgtctttcaatacttatgcccgtagatgtgctttattatatggatttttatactccaaagaaaccttataggatttgaattaagaacaaatgagtggatgctcgaaagcactgaaccatgtattaagaatggaagagtgtttgaagcataaagtgtcaagtgcatgggttttcatggagcaaaatacttctctgaactgaaaaaatggatataatctagatagtcttccctgattttctccatcatccttttttcattttcatttgtcttgaaatattttcagtatgtgttttttgacacagtacttctaaatttactagtataatatactgaataggacgctttcctactatttctatttagaagcctttcagagttatttactgaaatgaaaatgatttgcaggctgttaacgaatctttaagaagtgtaaatttacttcatggtggtgctcctgataagcaagtcaggaagtacagtggtggcatgaagaggcgtctcagtgtagccatctcgctgattggagatgctaaagtacacctttctagctacagcgcttaccaacatcttcttgcgttgtgactcatcgataattccctgcttatgcacattcataaaatggcctcaggttgtctacatggatgagcccagtacaggattagacccggcttcgaggaagagtctatgggacgctgtgaagcaagcgaagcgagacagagcgatcgttcttactagtaatgttcaaactacataccaattttgaatatgatacactacctaccttgtgtttggacataatttctcttccatgattgaattaacacgcttccttttgttcctgtgacacatcttttgcagcccattccatggaagaagctgaagttctctgtgacaggttgtgcatcatggtagatggcagcctccagtgcattgggacacccaaagaggtttaatcatctcacaaacctacttcataatccaataaaaataactattggaagcattgttcctcgagaaattttatagtatttaagaaagtatatctaggtatcaaaattttacactaaaaattttggtacctcaagatacaagtatctaaaagtaccaagttttacgatagaaaaagtggtactcccttctttttttaatgtatgacgccgttgactttttaattaacgtctgaccattcatcttatttaaaatttctgagcaaatataaaaatatttaaatcatcctgaaagaacatttgatgatagattaagtcataataaaataaataataattacataattcttttgaataagatgaatggtcaaacgtatctcaaaaaatcaacagcgttatacattaaaaagggaacttctcaaggatggtaaaactatctttgttccttgcttcatctaaagatttaacacaaaaattttcaatgacagctcatagcgcgatacggagggtactacgtgctgacaatgacaacatccccggagtttgagcaagaggtcgagaatctggcgcgaaagctctcaccgaacgcgaggaaagtataccatctgtctgggacacagaagtacgagctgccgaagcagcaggtgaggatcgcggatgtgttcatggccgtggagaatttcaagaggaggacggaggtccaggcgtgggggctcgcggacaccaccatggaagacgtgttcgtcaaggtcgccaaaggggcgcagtcgagcgaagaactctcatgatgatctggtgcaaaaatgatgttttgtttgtgctgttctgatgtactttgtacagaaagtaggataaatcttttgtcaggcattagtttgcttatttttctgtacataaggatcctatggcatgttgtttttgttcaatcttcttttggtcttttgtagataaggtttgtgttattgtgtatgttatagaaaaaaagatggtgtgtgtaggcgtatattggtgattgtattttatatatgtttgtcaacttgttgctgcacgtatatgtctctgcaaagaatcataaacctttgaccagaagcctttgaattgatcatattctttgtgtaatataatgggcaattatttttccgtcgtcttggtgacatcgctctcctggttgttgcaccgttgctttcatttgtacttcagtaggctgtagcgatgctttttcgttgggcctgcagcacctgaagttactggtgtatatttgttctaatcattttgagacctaaagcgttgtttcctatagatgtgttcaacattctttttctagcaaacgcacacgcgtagcacattaggattaaatttagattttctataatccccatctagtcaaatcaaacaattgataatttgttggtaagaattttataagtatgttgttaaagtgaaggtgcacataagacttgtttacgtgaatcgtaaaacactccctcgcgtcgctctcatgcgggcggcccgggggaaaaaccctagccacccaccccgacacctccctcccccctcccttctaaccgctggaagcaagcggtcggccgggaaggtggcggcggagcttctcctcagcgtgggaggtggagcggcgcgtttctgacaggaggcggcagccggagtgggcatcgggcagaaatgctccccctacggccaaattaggagagggcaagctcgcggtggcgtggtggcgcgattcgggaggcacggtccggtggaggcttgcggcagcgcgacagctgtggccaatggtcctcgctgcgaggacgtgcagctccgacacctggtggcgctggcgtatcgctgtgttccttgacgacattggcggcgaaggctagtaggcgcgcgcgtggaggcacgatcgacggcggtggaggccagctgcggcagtggccagtgtagagggaggtgaggccggtggaggcggaggcccgacgcgaccggtggggccggtggggggaaggtggggcgccgttggagcggtgcagctatggataggcaggtggtgggtgaaaacctagcctggccttggctgggccggcaataatggcgctcaagcgtcactccctctcctgagggcgttgtcgtgtcgtctcggcctctagtggggctgccgggtgaaaacctagtcgcgactatttttgagaccttgacggacggtggcggcggtctttcgtcacttctctccctagagacattgtctaggcaacccccttgccgaagcctcccaaacaactcgtgcaagctcattctagattcatgtcctcttgtgtcgacgcactagtttatgcaagttggccacgtcggagggcctatgggggagagcggttccatttttctctctcaccctctcttcctcaatcccaatgatgtagatagagcgggggttcctgtcggttgcaagggtttggtttttgggtgatcttggctatagttcctttgttggcttagcggcggccgatcacgcttagtgctagccgacgcagtgctagccttcttctgggtctgtgcgttggtgttgtcggtgtgtgggtggtggtattcttttttctttttcctggttacgaccttccggggttataatcttgtaattttttcatgctctatcaatatgaacttcgcactgtctaatgcgagtcattcaaaaatatatatataagtatgttgttgataagaattttataagtatgtgtagcattgctcgcaattttaagcgttcgctcttgaaacttcaaaaataccttatgttactccattaatgctatttcacgcatatgtgcctgcagcacatgctcttggcccataaggcttgggaagcgaagagactaccgattcctcttttctcgtccaccccctcctatttctctttccttccattctcattcgacactgtcaaagtggcttgttgtgacctgttgatctgctccaccagctcccaataatccccatctccggttgcttccatccttccccatcttactgacatccaacattccctatccgttgtctccgaccaccctctattcttccctatctgtttttctcgggccatcaagtgggcacccctaggtcctttgaccctagcaccgctaggggttgtgatgtcaaccatcaaccactgctccctgctacaaggactctatctcttcgttctctctgtcacagccagggctgcatcatgctcgtgtcggcctctccgaaataggaggcgacctttgtgatagcgcccaggaaggcaacgatggttgtggctgtaggagccgtgggattttttttatttagatggaagttttggattttttaggtgaatctttttatatggaagttttagttttaaatctttttgtatgttgtgtggaaagtttcacatcttcaattggaagttttgtgattttgatatggaagttcgggattggaagtttatgatttgagatgaaagtttcatattttagaatttctttttttgatttgaggtgaaagtttgcaacacaaatggaagcttcaaagatcagagtttgacttgatgtgcaaaggaggcgtagtgtgaagcaaaatcacttatgtatgtgatgcgaaaaggaggcgtgtgacttgttgctagcgtagttggtctagttaattctaggaaaactcctatattaccgtctcaactataacccgattttctccctaaaatcaaaaccagataatgggcctgtttgggggagtttctagcagccccaaacagtccagatttttatctaaattctgagaatccatagttgtataatggagaaaatgaactataggatataagctgagtttttttctagattttcacaagctgtttctcataatcttaatggcctgtttagtacagctccaactcctaaatataactccaggagttgagtctggagtggagttgtggagctgc

SEQ ID NO: 7276 - DNA, 20522 bp, Oryza sativa
attcctgcggcccgaaattggtatttcccacattttacttcacttgaaaattaaagaacctttaattttaaatcctattaataatttattaaataattaataaatcctgaaccaaaaatcaggatgtgacaagacatgaccactctttcatgacttgattgacaaccatctgagagtctccacagacgattagtcggcgaatacctagagatattgcaatcctttgtccatgaagtagcgccttgtattccgccacgttatgggacgcagaaaaatgtatccacaatacgtagctcaatctttctccagtcggggagattaaaacaaccccagctccagtgcctgtaagcctcttcgacccatcaaaatacatagtccaatattccatcttttcctctggcatgtcttcttggcactcggtccactcggcaaggaaatcagctaaagcttgtgacttgatcgaagttcgtggcttgaacgatatgtccaaagacatcaattctaaggcccatttcgcgatccgtccgtttgcttcgcggttatgaagtatatccccgagtggaaacgatgtgactaccgtgactgggtgactttgaaagtagtgagataatttcctaacggtaattaagacaccatatagtaacttttgaacctgaggatatcttgtcttggagtcggctaaaacctcgctaacgaaataaattggacgttagactttttgaacatggccttcctcttcacgctcgacaaccaggaccgcactcacaacctgggaggtcgccaacacatataacagtagcggctcttgcggatgtggcgaggccaaaactggtggagtggtgagaagtttcttgaagtcttcaaaggctttctgtgcttcgggtccccactggaaattgtcagtcttctttagcagcttaaagaaaggcatcccccgcttgccgagtcgtgagacgaaccggctgagcgccgccatgcaaccagtcaacttttggacgtctttttgggagcttggcggtttcatgttgagaatggcgttgattttctccgggttggcctgtatgcctctttgagataccataaatccgagcaatttccctgacggtactccgaagatgcacttttccgggtttagtttcatcttgaaagcacgaatgcttgtaaaagtttcttctaaatccacaatcaggtcatccttctgcttggtcttgacgactacatcatcaacataagcttcaacattgcgaccgatctgagttgaaaaacatctttgaatcatgcgttgataggtcgctcctgcattcttcaatccaaagggcatggtgatgtagcagtaggccccaaagggcgtaataaacgaggtcttcaagcagtcggattcttttagtcggatctgatgatatcccgagtaacagtccaagaaactgagtaacttgtagccagccgttgagtcaaccacctggtcaatgtgaggtaacccaaaagggtctttgggacaagatttgttgaggtcggtataatcgacacacatgcgccattaccccgtctttttccgaaccaggactgggttagccagccagtcgagatgaaggacttccttaatgaagcctgctactaacagcttggttaattcctccttgatcgcatccttcctgtcctgtgcaaaacggcggagtcattgcttgatgggtttggcgtcttcgttaacaagtaaagagtgctcaatcacctctctggggataccaggcatatcggatggtttccacgcaaaaatatctttattattctgaagaaaggtgatgagcacgctttcctatttacaatctaactcagcacctattacaacagtcttatcaagatcggagggatctaagggaatcttttttgtcttggcatcactttcttcggtcttcgtcagcttggttgaaggcacttctccctcgcttgccgtggtcgcagccagtcggatctcttcgcgggcgagagtagtctcgtgagtttgggccatctcgcaactttctttgtcacatgtgacggcttgcttgatgtcgctccgttgtgatatgacccctcgaggaccaggcatcttcatcattatgtaggtgtagtatgggacggccatgaatttggctagagccggtcgtccaagtatagcatgatatgctgtctcgaaatcagcaacttcgaaacaaacattttctgtgcgaaaattctcccgagtgccgaaggtaactggaagagtgatctggcgagtggtatagctgacaatcctgggataacaccgtggaagggtgcattactcggctttaattccgtgcgaggaatctgcatatcgtccagggtcttagcgaaaaggatgttgagtgcgctgccaccgtcgatgagagtccgtcggagcttgacattgcgaaccactgggtctagtaccagggggtaccgccccgggtggaccactcggtcgggatgatccgagcggttgaacttaattgttatctctgaccaccgaagatattggggcgtgctaggctgaaccgcattgatctcccgctctgttagcttttgttttctcttagattcataagccaggggtccgccgaagatgtgattaagttctttgcgatgatcttgaaaaccggtcggggcatcgtcttcatcatctttcttctttgatgtgccttgatctccgtctgagggtttacgtgcgttcttaacgtattgctccgcgaactgtttgtagacgaagcaatctttggccacgtggttggagttgggatgatgcgggcattgggagttcattatcttgtcgaaggtgttgacacgagaacgttgtcgggaagatggagaggtggtcgccacaagttcttcgagcttacgcttgcgatccttgtggtttttacttccactccctcctgcggtcggcgtatccttctttggcttccaagtggtgcccgactgcttggatgtcgtgatagcatcttcggctttggcatactcattggctttttcaaacatctgtttgaccgtcttgggaggtttgcgtccgaacttgtcgactaggtcctcgtggcgaatgcctttagtaaaggcggcaatgatgacgtcgtcggtgatgtcggagatcttgttgcgttgctcagagaagcgtcgaatgtaatctcgaagagattctccagacttctgaacgatgttgtagagatcgaagtgtgtgccgggccgttcaaaagtaccttggaagttggcgatgaagtggtcgcgtagctctgcccatgatccgatcgtgtcgcggggtagcccgtgaagccatgaccaggcagaatccgctagggccacaggtagatagttcgtcatggctttgctgtcccctcctgctgcgcggattgcgagaccatagacggtgagccaagactcagggttagtggtgccgtcatattttttgattccagtcggcttaaagccggctggccaatccactcgacgtagatcgcttgtgaaggcagcaactccgtccacgttgtcgtcgtagcgatccggtgaatgatggcctcttgctgtgcggcgctggttgatggtgtcgcgaagatcgatgggacgtcttcgatgtggggagtgtggtcgttcaattcggcgctccctatatcgctcgggaggcgagcgaacggaccgttcatcatgtcccctgctcctgcgactagattcggcgccggcaatgctgaggcttggctggtgatagtcttgagatcgaagatgagggactcggctaccagtcggggtgcgggtgcttgcagagttggctgggaccgaggcagcgatcatggtcttcgtctggttcaagatgttgactacatgatcagcttggttgagtgcgtcttccttgaggagggtgtcgaggagagtgattgctgcaaccgcgttctgttggggggtgcgaaagaccgctatcccatcgacgtcttgttgcccaatgagctctctcgcttgccacccagattccaaggcgcgttgtcgtcgatcttcagcctcctttgcaatccgttcgcgatcttgttgctcacgctgtagtcgttctcgctcttgtcgctgtcgctcttcctccaatcggcgacgttcagcttcttgccgtgcgcgatcttggtccgcttctcgggcttggcgctgttcctccgtttcgttgtcagccatgaatacgccgaagaagaggggcgtgtagttatccttatagctgtcgtcgaagttgtcgaggtcgccgtggtcgtagtggtagccgaaatcgtcgtagtcgaggatctcggttggtcgagaactgacgccgggggagctgaggtagccatccaactcttccgtcgagactgtcccgagaggttggagtataacgccaacctccctggatctagatcggatcggggccgaagccggagctcgcctagatcttcgagtgggagatgtcttgactgtgaagacagcggccaaatcatcaggaagtttcatcaggattgagggataggacccgtcgtcttgatctggtcgcggaagagtagattggatctcatccgagtggtttgaagccgactcgggagagatgatcttggagtaggcctcggccgagttcggaataccgaacggcacagggacctggtctctccccgactggtttgaatccgagtcaaggagagagatcttgccgaagtcgttggtgatgaagttgaggctgccgaaccggaacgcctgcccgggaggaaaggcgaagtcgtcgatgccagaaacgaaacccatcgcacttagtcggcgagaacttgacgctacccctacctggcgcgccaactgtcgaagcaagatttcggcaataataaaagggggtggctgtcaagctaggaaaatggatgggtttggagacaagaaattttatacaggttcaggccttcttattaaagaagtaataccctactcctgtccggggatgattccgccgagtgtgttattaattgtatagactgggaaaaagaatcacctcccaagaggcacgcggaccctccttatataggggaaggagtccgctttacaaaatacagtccatatcctaacggaatatgggattatagataaaatacaatcgtaaccgactaagatcccgggtatttccttgacatacaagtttagaacctaacccgagtcttcatagagatattccatctatatttgataccgtatatccgactaaattacaaccgtcatgtagatatggggtatccataatctccacaagctggcttgtctcgagctatcttattgggtcacatgacggtgttaaattttgaaatagatctaaggaaatcatgcataagagaaaatagccaaaagaaaataaaagacacaaatccaatttttaaagacttctcaattatctatctcttaaagataaatatagagaatatccataataaaaggaatgccgagaagcaaatagaaggcataacatccagattgtaaaggcttcccaaaatatctttcccctttgcaatctatcaatcccatgctggttggttttatgccagctgattgttgccctcaacattctttagttgagcgacacgtgacgacatacaagcgtcgaaaagagagccggttaataaaccctccctataaaactggcaagcgttcagttacaacggtgaatagaaaaacaagagaagagttgttccacgtgtcgtgaccacatatcctatatttggagaaactaaaagcaataaatagaaaaactaaatgacataaacaataaactctataatcctgataaccaatttctaaatatatgtattttctgcttatactataaataaataatatgtagatctttacgctacaattataataaaacaaatattaattctggtgttggatttatacctagagttttatgtcaaatctaaacaccataatgctcaaaatcataaaagaaaaattgaaatattagtatattaactatatggtttttaaaagccatacacccaagctaattagtggacgcgccaaacggcgtcttgattttctaatctacattattggtgattagtgaacctgaactaaaatttcatgaagtgcctttttttcaagttcacttagaaacttgtgtaaatattgatcacctaaaatttcatatataagcatgcatatagcattagatgatacatgcctactggataaatagtgaaataatgaaaataagagtaattctgggtttaccagctacacgagctagctgacaccaaaacagaaacatgattaatcggttatcagattagccaagagataaagcaatccaaataaattttaaaaaatgaaaaaaagcaacaaaaacaaaccaatatggccctagggagatccaattgtcagttatatctatctaataacagacacatttttgacaattatgtgatgttgtacagttgcaataccaaaaacagatagagaatttgctggtgaaaaacttgaaacataaattgcaaattgctaatatcagttatgtgattaaatgacaataactagtggaaattgaatagcattgctgacagataacaattgtgttactgatcaaatggcaagattatagatagagaaaaaaaacagagactaagtatgacatacttctgcatctaggatattatcatacatagagagctttcagaataatcttgcaggtgtaaaattattgaaccaacaagatggaacattcaatcttgcagatcttgtgattctgacaagtaatcctacttctgtgacgctagaaccttgaggacagcctcatccgccagagcactgtagttcggtttcactgtagttcagcttcaggttgtcgtaatcctgtgttgtcatggtggctgcaaattttcctgggcccttagagaaattcgaagcatgcagcgttcttcaagccggagcatccgtgttgctaggccaagattaggatgctcaccacgctggccacctcgatatgtttacaaagaagggcttctcatagcagcctccatcctgtatcgatcgggccgcgatgaggagatgctcggccatggcgcgtccctcctcgcgcctgctgcatctgcggcggcaatgagtctatgtaatagtgttattacagtgcgacacagctaggatgtaatggaagatggagcctcgaagtattgagcccgaggtccgccaattaattattttgaaatggtccattaattggagtcagactgccaatttatatatatgttgggctgagttacacctcagcaatagcccaatccgattttttttttcgtttcactccttggcaaagtaactcgcaacccattggcagtgatcaagagttcatgactttttgcatttaggttccagagttttcatgttttggttgcatttagattcctgtgcgtgcttagcctaaatatgtactctccttgccttttgtcactcctccgacggtcacaagctgccaccttgcctcaccatgaacctcctccctgcacgaactcctctccagtctccactccgccgaaagcacaacctctcaaatcgtgtttaatttcccgctgaatgtacgttgctgcaacaatagcaaaaaagttcccgctagatgcacgcctgctaaatgcaacggtttgttgggacacaggtcaagattctgataagcagttgatgaatagtcaatagataagaatataagcattatcgatttttagcttctactttactttctgcattagctagaggtgctagacaactagagaaatcggagcatgagacgccccaaataaatagcttcaatatgcgtttcacaagtagttaaagtggtttatgtgaggttgtcgtccaatccagtttcattattggaggtcaatttgaggtgttagacaagttcatgcatgtgaggaggaaagtgcaaggtgaattggatagaagcatacccaccaaccgagtatatgggggcatcagatccagcacctcgagaaatcttccagagcgatgcgcctgagatggttatgacacgaaaggagatctccgaaaaaatcataagtgggatcacaaacaccatgagaagatgctgacatgctcttgttcgctgcgaccaccagcggacgtgggtataatctgtttatgggatttggcatggttgtaaggatagaggcgaaagaatataacaccaaaggtccacgcaatttccagaaagaaaaacagaacacataaacaagaccacataaggcagcgtgtgacagcaagatcttgacatgcgaatgaatgaatgcatgatagctaacttgctagatcaacttgtaaacttatggaatgtagtacaagaggtgcagctcatccccgatgatatggacaaaaaaaacttggaaactcacaagtcatgaggaatacatgacggcaactgcctacaaaacataatttaccaaccccccccccaaaaaaaaaaggcgtttgcctagctagtaatacaaaactaaatctgaacatcagacaaagtatcaatctgagaatggacaaacaacacatactgccctctttgccccctacgttagaaacatccttccatctactcacgaatgtagatacacgaggaaaatctaagacatgctgacaacctagatctcgtgggaacaactcgaacaagtgaagcctattcattgaaaaacatgtacaaacatacatgaatggggggaggcgctcgcaacttgccttggggaacccaagcaaggagtttgctccctcaccctcctaacaaacttaggaactatggaaggaaaatatccataataacctccgttgaaaatcaaggaaaaagcaataacttagacttttgcaggggtgaagcgtcaagctagcatagattttactctaagcccttccttgtacaacccttgtttttcatacttgtacaatataaatttttacatgtgttatatatcagtaaaagttgtcactaaattttactattagagttatcgcacgaatcatgcaatttttttcttgcagcacaatggctgagttgaatgctgcaagcttgcaacacaacatgtaaaacttggaagtggatttttatccctcgagagaacatcacatatgttttgtgcatgtcgttcaaaaagttatcagaaaatttaaaaaaatttatcaagatagataatatatgatatatcttttcgcaaacatgcgagttaaaattcgacttatacaattcgaaacaaaaataacaaatttgaccgtaaattacgtgttatattcatagtcaaacttgtttttttttctacttgggccgagtttagttccaaaatttttcttcaaacttccaacttttccattacatcaaaactttcctacacacaaactttcaacttttccgtcacatcgttccaatttcaaccaaacttccaattttggcgtgaactaaacacacccttgtataagttgaatttgaatttgtatgtatgtgaagtgatatatcacatatttatctatcctgctaattttttttaatttttaaattttttgatgactttttgagtgcatgtaaaaatgagaggatatccttaagggatgaattaagttttccgtaaaactccaggtatgaacggcttggatgccggccaaaccaaaccgtcgttgttcgtgtgctgttttgcagccgctgtacgagatggccttttcactttccagcataaatagaagccgtcaaatgccggcgtgcgccagtgcgtcgtcggacggcaaccccccgaaagcaacgtcactgtggatattatgggtaccccatacccatacggcatggttatccgactagtcataggggataacttatatctatggaatatgtaatagatcatgactcgggtattacgtttccttatatattacggaacagcctaaagtcctggtttgataatattgtaaagtagatttaggaaaccgataccgtgttggttaaggtttctatcttgtaatcctgccccccatcctatataaggtgggcaggaggccctctagggggcaggagacaacctgatcgtcagatctatactacacccggcggattcaaatccccaaacaggagtagggtattacctctcattgagagggcctgaacctgtctaaatcctttgtctctgcatccatccactttaggtctcgtacgctacccccttttattattgccgaaatctagtttcgacagttggcgcgccaggtaggggtgcgtcgagtttcctatcgacaagtgcgatggaaccaatctccgatgtggttgaactcgccaagctcgtttttcccttctctgattcaatccagtcgcgaagatcaatctcggcgacttcaatggtttaatctcctatcaccagcaagtggattcgtggtgtcgctgtgcagccaactggccgtgtcgccgtgagcctactccgccgccgccgaatcttttctttagtcagcaagactctaagccatcagccctcaagcaaacagaggagccatgcccttgacctctatctgccaagacgtcgagtcaggcacagcaagccaacaacacatgtcccggacagcatacgtcatcatatatcgtacacggtttgtcgaaacatgaattcggcaataataaaagggggtagcgcacgagacctaaaagtggatggatgtggagacaaaggatttagacaggttcaggccctctcaatgagaggtaataccctactcctgtttggggaattgaatccaccgggtgtttattgatctgacgatcagattgtcccatgccccctagagggcctcctgcccaccttatatagggtggggggcaggattacaagatagaaaccttaaccaatacggtatcggtttcctaaatctactttacaatattatcaaaccaggactttaggctgttccgtaatatataaggaaacgtaatacccaagtcatgatctgttacatattccatatatataagttatcccctataactagtcggataaccatgccgtgtgggtatggggtacccataatctccaaagtagcccctaagaccttcacagtcgaaaagataatcttctctcgaaccagattactccaaagccgagtacttcaatcatctttgccatggtctcccgagtacttttaccaaatctgaagactgtggagggctgaaaaataaagtcaggtgcatcgactagatgcacctaataggtgtagccctcgactatgcggttaagtgaacaaaccaagcatatagtcaaggaataaataatccaaccaaccgagtggttttgataatcgtaatcaaccaagtgacttgatatcaatatatagcatatgcggtgtgaatcctccaaataacatgatccgagtgatataccaactgctttgtaaaatatgatgagtgatatagcaaaataactataaagaagcttgtatattgtgaataaagaaatttccaaagtattgggcatacgccatgcgcacactgctttaacagatgtgcttaagtccctagaagacacatggtttcaccacacctggaaatatatggcatatgtggtgtaaaatccgagtaaataaactcataaaggatttaccaaccgcctagaaaatgaccacaatatataatcagcctaagccataatattggtcaataaaaatgcacacttacgtggcgaaaagcaatgatattgtatccaatcaattgcttgataaacccaaacagcaccttgactatataaaaaaagtcagcgggacagctatataaagctttactgtttgacaccttttaagatgcattgtaccaactcctaaaaagttaagtaactgcggtataaaaggattttaaggtattgggcacttgatcacgcgcactttggcctaagcaaaaagtgcctaagtccctaaaagaacgtgacaggccacacctgaaaatatgggctgcagacatattaggcctaggccaaaaaatatgccttcgacaccctttaaaggatgacgcatgtaacatgctcccgagtaataaatcttctgggtaatatagaccaagtgtagctcatatgaatagcttctgatctgaatgattatcccttatgggatactccaaaataaatataataattgaatcccgactggcgcaagtattcggttgacagcccttacggggaataataattggtccagtctttgagcatagaaaatagactcatgactatgaatccatgtggaatgtatccggaacaagtccaaattggagatataatcctcacgcttgagttgatgagcccctgagcatatagcttgtccttctgtcatagtcaaaattgtctattggcaatagctgacgcagtcggcatggagatgaaatgaccaacatgaagacgaaattgctcatcagaagtaacggaagatgtcagtggtaataaaaacagtgacaccaatcaaaggtaatgaagttgcataaccatggaggcgaagaaaccagtcggcaacagtcaggtcagctagcagtgaagatgtaggcgcccaacaacaacgaaagaacagtcggtgatgacaaaagcaaaccgacgatgaagacgtagacgcgcatcaacagtgatggcgaaatccaccaatcatgaagatgaagaaaataatcggcggcgacaaacgcatccaacggtaatgatgattaacggcaacagagatagccgactatgatgacgaagtttcccatcaacggcagcagagttggctatgttgatgaggcttgacaagatgttgatgaagatgacgatgtcggtgatccagtcaatagcgatgtagcagccgatgataacgatgagatcctctatcggcagttgcgtagtaggccaaccgtgaagacaaataattggaggagagttgatgttgttgcccaactcgtctaaaccgaaatatttgaagttgttgaagtagaatgtctgttccgaagcaaagatgaagataatgactcctggagttgactcattggctgattaattgatttcttcagcttgacataaaatttgtcaaattttgagccttatatttgtgtagccccctgtcacgaccggaaatcacccaacaggcgttcccgacgtgcgtgtattattccttgtcccaggaggcaaggtacaccaaaagttgatacaatacagagtttaacaagcggaagcgtatataaaattattacatgggcaacgaaggcccagcacacacagagacaaacgaagaacagcggaagactagggcgacgaccacaggcacttgacggcaggcacgagctagacaccgaagccttcatcttcaaggagctcctcttctgggcttgggaaaaattgagcaagactgtgtacaaccaccgtactcaacaagacacacccacaaatgcagaataaatgcaagggagtacaagggaattataatataaagggttagggttgcagtaaacagcatttaaagacatttagttgctcaaagctactttgtaaacgcgatcctagaatgctacaaagttattaatcaaggccgtgaacccacacgaacctgccttaacccaaggcctatgatgattcagaccgaactggcaacccgaccctgggtcccagctcgtcctaagccaacccaggccaaccattccacattttagttgttaagcaagttttaagaattaaaacactaacttgggtacattgctcggcttgcccataaccgagggctcggctattcgaatagattatactctgatcagaggtgtacatctttacccacaagacacatcttcctcacgtgtaaccacgtgccacataccaccacggtatacggacggaagacgtgacatagtttccaacccatcctagccttagacaagagtaccgacccaatcccacctacggccgggatacccgggacaggcaggcagaactgagcccctagcagcagggcaccaaccctctgccatatgacatctcgactaccgggccgcagctcgtgtagccttcatttgccctggagaatgtccatcgacacccgacttcatccatctccaatccgtgtacttttgtttatgactagactgagccacaaactaagccttacccactagacatgtggaagtacggtagtgctttgcaacagaggcccgaagaccggtccttaaacggccgaggtgctactatcaaaaccatgcaccccgagcccagcctaaaaccattttggggattttgaatagagggggcggtgtgaagccaattccacaataaacccacaattccagagtatccaggtgatatgaatatttcccaaagtctatagttgtaaaaccacctaaggttacctaattagattgcgaagcatctacctaaaattatactagggataccatgagtagagtgtccactagttgaggttttgtttgtctagggtgaacaaggtagtaataacaataacaataataatatggtcataacaaaggtaaataggcatggctaagtaaaacagtgataacgcgggaatttaaataaagcgacaatgcaataatttaaatcaacataattttataaaatgggattcaatatgatcaagatgatgtgtcttgccttgctcgttttcccaatcgacggcttcgacttccacgaagagcggatcttccgaagctgcagcgtctacacgaccaacggaaaagaaaaaggctttaacactaaataactccacataacagcagaaacaaagcacaaaaatgggttctttacatcttaaggaaaaattagagacttgaacggtccaattccgagttcaaatggccaagatatggccatttgaagtttatatgctctttaaatggatatttgcgaatttcttcatttaattttcaattaaaaaatactatttattgcgtcagccgagggagcggggcgcgcggaccgggtccacgggaagtggggcccacgcgtcagccccacggtccacggtggaccgggcgcacgcggctggcggcggtcggcgccgtgggtcccgcgcgtcagccgcacccgcgggcgcgggcggctgacggccgggcccacttggcagccgcgagggcgcgccgaaggcggcctcgccggcacggccgacgggaggaggacgcgcacccgcgccccgatggtcgccgccggcgaccaacggcgcggcggagtggcacccgagagagaggagggaagggggaagcgaacggaacggtcttcggctcaccccggtcgacggcgacgacgggaacggcggccgaagcggaagaagacggcggcgcggctcgggatgacgagggcgacggtgctccggcggtcggcgggcgaagcggaggcgcggacggagtcggcgacgatgcggcgaagccgaaggaggggtcgccgagtcggaaggacgtccggagcgacgtcggcggcgaaccgaaggtcgacggcgacggcggagagagaggagcacggcgcgagcacgaatccgacggcgagagcgagcggcgagcggcggaaacggaagagcgaagcacggggatcgaatatatagcaacgggagggggagagcgcggccggggagagaggaatcgcgcgcggagatctcggccgccattgaagacgccggcgatgattgcgggattcaaatcggacgaatccgagggagagagagagggaaaagaggggggaaacgggggaaacgggaaagggaatcacggggagtgattcccctctctttaatgcgcgcggggacggcgggatgcggcgcaatccgcggcggcggcggcgctagggcacgggcgcggcggcgggcgcggcgggaggaaggcgatgacaggtgggccccacccgtcagcgagagtggcgggcgggcccgcctgtcagcggcgcgcgcgcgcgcggggagccgatgggccgcgggagaggagagagagagagggagggagaagtgggccgagccggcccaagagggaaggggggggagaaaaagaacttcttttaggattttcttttttttataaaccttttccactttgtttatttcttttcaattattatttgtgctctgaaaattccactaaaatttgtttaagcattttaggcttttaggaaatatacaaaaatcctccaagcctcgtttgacttttatctttgcacattttaattgttggaggctttcacattgaattttaattattctgtggagattatgggtaccccatacccacacggcatggttatccgactagttataggggataacttatatctatgtaatatgtaacagatcatgacttgggtgttacgtttccttgtatatgacggaacggcctaaagtcctgatttaggaaaccgataccgtattggttaaggtttctatcttgtaatcctgccccccatcctatataaggtgggcaggaggccctctagggggcatatatgatgaggacacgacctgatcgtcagatcaatacacactcggcggattcaaatccccaaacaggagtagggtattacctctcattgagagggcctgaacctgtctaaatcctttgtctccgcatccatccacttttaggtctcgtgcgctacccccttttattattgccgaattcatgtttcgacagttggcgcgccaggtaggggttgcgtcgagtttcctatcaacgagcgcgatggaatcaatttcatgagtcgccgacttcgctttcgctttgggagttttcacttcctttccgtcgaccacttcttcaagctcctcttctctgacttgatccaaatcagtcagggggaaactcaatctgatttttatcattatttatcatattgatttttaatctcagattaatttcttgctattttttgttgttgttcgcatataactacgcggcactattgaggcgattgatgctggtcatggactcgaggcgtctcagctttccggtcgatcggccgcgagtccactccgccggcttgtcctcgccaccgccattgctgatagcaacaacgacttcaccgccggcctgcctccgtcgccgccgactggtgtcatcgcctatacggttggtcggtcacaccaccgttcatgggcgtccatgtcttcaccgaccggctggccttcgccgccgccgactggtgtttccgcctgcacggctggcctattatgccgccgctgttgggcgtctacgacttcaccaccggcctgcctccgtcgccgccgactggtgtcctcgcctatacggtcggttggtcacaccaccgttgatgggcatcgtcatctacaccgccggcctgcctccgtcgccgccgactggtgtccccgcctatacggtcggttggtcacaccaccgttgatgggcatcgtcatctacaccgccggcctgcctccgtcgccgccgagtggtgcctccgcctacacggctggcctattatgccgccgctgttgggcgtctacgacttcaccgccggcctgcctccgtcgccgccgagtggtgcctccacccacacggctggcctattatgccgccgctgttgggcgtctacgacttcaccgccggcctgcctccgtcgccgccgagtggtgcctccgcctacacggctggcctattatgccgccgctgttgggcgtctacgacttcaccgccggcctacctccgtcgccgccgagtggtgcctccgcctacacggctggcctattatgccgccgctgttgggcgtctacgacttcaccgccggcgtgcctccgtcgccgccgagtggtgcctccgcctacacggctggcctattatgccgccgctgttgggcgtctacgacctcaccgccggcctgcctccgccgccgtcgactggcgtcctcgcctatacggttggttggtcacaccatcgttgatgggcgtcttcgctttcaccgaccggcttgcttccgccgccgactggtgttttcgcctatacggttggcggacttcgccgccgttaatgggcttcatcatctacaccactggcttggttccactggcgccgactggtgtttttgtcaccattgatggattgtttcgttcccacatcggctacttctgctgtcaccgagggaatacgacaaagctaagtcatcgcttattttattctttatatgatattttgtcttttcctttgcctcactacatcaactggttcgccgttgactagtgagtcgggggctatagatgttatatcgtattttttaaacaattttcataatatttatcttgattgcttgcgacatgttctgagtacaaaagtgcctatcgagttatggagttccatcttcctatgctttccgtttggtttgccaatagatagttgcctttaggccgattcctagcacccgggggctcgttggatggaccgagtaacgcaaggtgctaagtattattcggaataaatcaaaagcatagagatgagataaatttattttctgctcttaataattgcaaaagtacccgagtagtaaattctgattcgtgaaactttgttccattaatggcgaactcatgtcactcatatgcatgtctgggaagtgcctaggccgactcccggtgcttgggggctatgactagtcggacagagcgtttaaacgtaatgaatcatctgctcggggaaatcaaaattgacaagaggagaaatacatatttataaatattttaaaatacttgcatttttcttgagtattgtatttacatcagatactactcatcctatatgtttgttctgcaggatccaaatccaaatatgcataaaagggattcatggctttaagcttatctcttacgctccaggaatggatcagtcagaacatcaccaccggctcgccgtcgtcgccgccgactggagtcttcgcctatacggttggagtcttcaccgaccggccgccttgtccgccgccgactggtgtttccgcctgcacggctggcctttatgccgccgttgttgggcgtctatgtcttcaccgaccggcttgccctcgtccgccgccgactggtgtttccgcctgcacggctggcctgttatgacaccaactgatgctatcttcttcacggccggctacgtcgccgtcaccactaataggcgtcatcatattcaaacgcaagctgtctacgtctgctgccgactagtttattcacttccatggctgcatgattctgccagtgttgattggccttatcttcttcaccgccggtcatctcgtctgctgttgactagtgccctcgcctctacgtctggtttataccactaccactactgatggacatcatcgtcttccgtcgccgactggttatgccgccgccgactggtgcttttatcttcacaactgcgcgtcttcactaccggtttgcttctgttgccgccgactcgtgttcacttcatcacggcaatgcaactttgtcatcatgcctcgacatctcggcatgcgatgccatgttgttttactacaacaagaggctctccaatattcaggatttctacttggacatcttcaacacatatcttcaatcaagcaatgactactcgacgataagaagctataattctcgactctatgttcagttgtttcccaactaaccaaagagtcgggggctacacaaatataaggctcaaaatttgccaaattttatgtcaagctgaagaaatcaattcatcaaccaacgagtcaactccaggagtcattatcttcatctttgattcggagcagacattctacttcaacaacttcaaatatttcggtttggacgagttagacaacaacatcaactctcctccaagtgaagcatctacaacagccataacattaatttgatggattattgtcactgacatcatcaccagcacttctgcttcatcgaccctgacatctctgctgttgctaatggatgattatgttttcgccgacttattatttcaccttcacggttgacctactatgcaaatgctgatgagcgtctttgtcattatcattggttgctacactgctattgaccggatcaccgacatcgtcatcttcatcatgtcggttgcgtttgtcttcgtcaagtattttcttcatcttcatgattggtggatttcgttattgcctttgatacgtgtctacatcttcaccgtcggcttgctttcgtcaccaccgactggtatcctcgccttcacggatggcttattatgtcgccactaatgggcatcttcatcttcttcaccggctgcctcatctgtcaccgactgattatttcgccaccatggctgctcaattttgtcgatgttgctggatgccttcatcttcactgttggctgacttgtctgctgccgactggtttcttcgctccacggctgtgcaacttcatcacttttgattgctaccatcaatggacaattgtgactacgacagaaggacaagctatatgctcaggggcttactagctcaaacacaagtatcataccttcaagttggacttgttccggatacatgcaacatgaattcatgatcatgggtctattttctatg

SEQ ID NO: 7277 - DNA, 5000 bp, Oryza sativa
ctgcagcccctcttgtttttttagttttataaatacaagtagattttgcatacaccatgatgatactaggattaaatggtacaaacatttctcttattctccaattaacgtggtactccctctgttttaaaaacggcgatagtaattttaggcccctcagagtaacagataggtaaattaaaggaagccactcatagttgcatacttgcactagtaatctccataagagcgaattttagattgaattatttgatgagctaagttcttaatttaaaagacagtatatatctacccttctctacaaataaattgcactagtaacaagtaacagcaatacatacttttccaatgattgagaagggcagatccaaattattaagacaatgactacaaaaaattgacattacattttcatgaaaaattttttgacaatgtcaaatctcacgtgccataactatttacttccatttataaaacaccaggcttcatatttttttcaaacaggtaggaaaaacagtattattgcattcatatttaaatataaatatataacagtaattttacttttcaccaccttttattactgacattttgctttggattaccgtttaacaaatattttgaactttggattaggtaatcttaccttcgttacactctgggccatattgactcacttctcaagcatataaacgatttcgaatacgtcggctcttactcgtcaatgaactcctatagccgtatgagagataatttctttactataatacaaactggatatatatatatatatatatatatatatatatataaagagttaagggtgatccaaagtgccacaaaaggtaaaattatccggtttaaagtgaaaacattggtaaatgatggttcaaagtaaaacattgataataaaagtggccccaaagcgaaattcattcaatatatgatgatgttaatgtcatttggtatgtggcaagcaacttatttgaccactccttttcaattagaataaaacgataatgtctaacaaaattataatattgaaaagtacttatagagataaatctaccatattatttatatgtttttaaactaaatattttgagagctgttgattatcaaagttttaaaaatttaaccaaattagtcaatagtgtcacatatttaaatacaggagtagtatttacccggttgatgcgtgtagatcgacatccctaaagagaaagttcattccaatttgtggtaccgtaattaaggcaaataacatcacagaaatgggagaggatgcatgttcaagatgatagctaccctgatatatcaatctagttttccttatcggttatcatttcgggtaagctaccaacaacatctcttttcttttggagtatgctactaggaacaacctatgatgtatagtttgatgcatatgtatatacacagtggactaagagcatccccagcagctcttctatctagtcatccatccgatatttggagtatggaggagaaaaacaatgctccagcagagtctccatcatcatatgctctatttttggaggtcctccaaacctagcccttcctaagctaaatatggagctctctctcctcacttcatcctcaactacccactccctaagatcttttttaagtggtgaaaggtgagaggaataggagtaaaaatgtgtggtagttaaaaaatattagtaaaatataggatgttggtatatgtgggatgtaatatgaatgatctgttggagtaaaaagttatatagagtgagaatctttttggatggccatctaaatgagagtatggaggataaaatttagatgagctgctgggatgctctaaccttctcattttctctccactcttgtgaagtccgacagaagtttcggtgcaaaatttgaagggacaattcggcaaactcaacgtatcctatacgcatttgcaccgattaaaaagagaagtaatttggggcatagacttcgctgtcctagtcttcggtctgatgttaccgctgtaaacatcgaaatttataagtgacaattgacatgccgatcacactgaatttcttcctacatttctactagctaggatggcagaaaaagttcagaaaatcctgaattcttcctacagttctactgggagcagggtttcgatttcgaaattggattttatgcctggggtgaccgaaatgtaatttcagaaatttctggccaaaattatttgaaatttgactgaatttaaataaaatttgatcaaattcacaaaaaatgtaaaaaaactaaaaatttcggacgagaattgagcatgccggtggggggcgaaatttcaaaccctgactgggagtataggcagtataggacaagttcagaaaatcgttgaattcatcctactgttctactgggagtgtagctgtttagcactagttcagaaaatcttggattcttcctacaattccactgagagtgtacgacaagttcagaacatgtttgctctcaaaatatatgcatctcaaaatcaaatataccaactcgatcacactcgatcgtatcaagaattaacaggaaagagaaaaacttgaagcatgcgcacaattttcgtctctatgtatgtactctgcaataatccatgcgttcatgaactattcacatggtgccgtactgatccgtactgactatctaacgaagtagtaggtgctccgctccttggcggcggcggcggcggcgcgctgctgctgctgcatgcgcagctgctcgtggaaccacatgatgaactcgtcggcgcggcggtccaccacgccgagcctcccctcttcgtcgtcgtcgccgtccgcctcccacgccgggaacggcgagtccgtgatccgcacctgccgcggcgccggcaccaccaccgcgggccacgcgaccacgtcgccgtcttcgtcgtcgatatccgtcgtcatcgcctcggcggcggcctcctccttcacgtccatcagctcgaacagcctcgacaccgtggcggccgagccgtacggatccgcggcggacgaacggtcgtgccactgcccgtgctgctgcaggcgcagctggctgcggcgctgcgcgcggcggcgcctgtgcagcggcgtgctgctgcagctgaactcgacctcacggggccggtactggtactgcgacacggcggcggagggatccatggaccggcacgacatcgaggagagcccggaaacgcctcccgacgcgctgctgatgccgccgccgctgcgacggcggccagcgccgtgcgcgccgcggccccgcgggtacgggtgcaccgccgcggccgggtccatggacctgcacgacatcgtcgacgacaggtacgtcagcaacgccgggtgctcccgcaaatcgtcgaggccgtggtcgtggccaccgccgccatgccgcctcgaggacatcatctggtgcaggtggacgccgagcgcggcgagcttgggctggtgcttgccgagccccttgacgaggacgaggtacacggcgcgcaccacgcgacacagcttcttggcgctctcgcccgcggtggccgcctgcctctcctgatgatgctggcaaccacccgactccattgccgcctgctcgctgctgctcatctcgatcgaaaaaatatttgtctcttctcttgtttttagaaaattccggtgatctcagctgcgatctcctggaccagctactcctctctctctttctctctgtgttcttcgcaaccaatgaggcttattatcagagaggagacgagagggagaggtatttaaagggggccagatcactagctgggcattcatggcaaagggaaattattggtgtacgtatcgtcttcgtattgttcctttcgtgtttcggacacatgcctgcttttttttttcgtgacgcgttcagttttgatcagtgtgatttagttggtggttttcttggtttattactggagctaactaaggcactatttagatcccgcccaaaaatttttaccctatcacatcgaacatttaaacacatgtatgaagtattaaatataggttaaaaaataactaattgtgtagattgcgactaatttacgagacaaatcttttaagcctaattacttcatgatttaataatgtggtgctacagaacatttgctaatgatagattaattaggcttaataaatttatctcgtggtttactgacggattatgtaattagtttttttattagtatcagaacacctcatgtgacattaatataatacctgatatgacatgctaaagctttacaccgttagatctaactaccccctaagctctaagcttgccgtgtccagaccggatctgataggtacgggcagtatatagatagctgcttttaaattacctttctggagacgctttcagaggtttaccaattgggttaatccgagtgtttaagtagtaaaacacgtgcatatatggcacttgcatatactgtacgcggcgataatcagttaagagagttgttgaatgacctgcgtagctgctccattttagtattactcttttccggttgataatatttgtcccggagaaaatattaagttattgcagaaacattgtcctaaggattttggttaggaagttgacaaatacaatgccaaccgctcgattatcatggctattggacttattgatccagtatatatcaattgagaaaccgttcgataaactcgtcaatttaaaaataatcaaactaaagttcaaatttgtggtaaaatctgtttgagtttaaccggttgctgtgaccgaacgattttctaatccatgttgtccagttgcatgtttatcaatgtcatacacctcaaataaccgcttaccatttttttcggccagatgtatatgactgtactaccatttttatttgttactactactagtttgcatagtgctcatttaggtaagtacttatttttttaaaaaaaatgaagtcaatagagaaacaaataaagtggggctgcaggaat

SEQ ID NO: 7278 - DNA, 8400 bp, Oryza sativa
cgtgggggagtggggaggagagagaggcggtattcggttttcgaatcccggccatctcgggcgcgggcgcgaacggaagggagaggggaaagggcgcgggagacgcggcgcacgcgcgggcgtggccaacgtggcccgggagagacggaggcgtgggcgcggcggcggtttcggcgcggcggcgcgccgggatcggcgggaggtgggggaaggacccgacaggtgggccccacctgtcggcgaccccgagagaggaggcgggcggcggctgccaggctgggccctcggcctacggccggcccagcaaggaggagggggaggaaggaggggaatgggccggcggcccatccgaaaagaaaaaaggagggaaaaagggagggaaaagaaaaagaaaaaggaaaaggattttccctggaattaaaaattgcactttggtgatttttaattggttaaaattatttccaaggctctgaaaattccactaaaaatcctgttaatatattgtgacatgtagaatccaagaaaaattccacatgccgattccgattattatttgcatttattaattagggaattagctctaggttaattaagataatttcttcggacgatttatttagccaaatttttaaagcaagcaaaaaggggaaaacttcagggcgtgacaaacctaccccccttaaacggaatctcgaccccgagattcggaagagctggcgaagaggtgcgggtgggtggccttcaactcatcttctctttcccaagtggcctcttcctctgagtggtggctccactgaaccttgcagaatcttattactttgtttctggtctttctctcgctggtttcgaggatacgagttggcttctccacatacgtcaagtcttcctggatttcgatttgatccggacttgcctgttcctcaggaactctcaaacatttcttcaactgggagacgtggaacacattatggatgccaagcatgttggagggaagctcgagctggtaagcaacttcacctctacgttccaaaacccgatatggtcccacaaagcgtggtgccaactttcctttggtttggaagcgatgtactcccctgagcggagtgacacggagatacacataatcccctgtttcgaaagcgagctcccttcggcggttgtctgcatagcttttctgccgagactgcgcgattctcaatctttccctaacagctctgactttctcttctgcctcatttaaaacttctgtaccaaacaactggcgttcccctgtctgataccagaagagcggagtacgacacctccgtccatacagtgcttcaaatggtgccatctgcagactagcttggtaactgttgttgtacgagaactcagcatacggcaagcttttgtcccatgccccaccaaaatcaagcgcacaggctctcaacatatcctctagtatttgattgactcgctcggtctggccatctgtttgtggatggtaagcggtgctgaaattcaaccgggttcccaattcttcttgtaatttctgccagaactttgaagtgaattggcttcctcgatcagacacgatcttcttaggtacaccatgtaaacacataattcttgccagatagagttctgctaatttcttccctgagtaggtagtgtgcaccggaatgaagtgggccactttggtgagtcggtcaatgactacccaaatagaatcatgccccgatgacgtcctgggcaaaccggtgatgaaatccattccgatttcttcccacttccattctggaatctgaagtggctgtagcaaacctgctggcctttggtgttctgcctttactcgttgacagacgtcacagagtgctacgaattcagctatttcccttctcatgctgacccaccaaaacttctctttgaggtcttggtacatcttagtactaccgggatgaatggaatattgagtttgatgagcctcggttagtatcaggtcttttaattccttgttttcgggtacacacaatctttctcccatccagattgttccttgttcatcctcaacaaaacctcgggcttttccgaccctcatgttctttttgagctctgctatttcaggatcacttgcttgagctatgcgaacctgctccaccagtgtgggctgtgcctctagggcagccacgaatccgtgctcaactataccaaggttcaaatgttccaaatcatgttgaacctcacagcatagttcctctacccatgcgacgttgcagtaactcttcctgctcaaggcatctgctaccacattggccttgccgggatgatagtgtattcccatatcataatctttgattagctccaaccatcttcgttgtcggagattcagatcaggttgggtgaagatgtactttagacttttgtgatctgtatatacctcacaacggttaccgatgagatagtgccgccaaatctttaaagcatgaacaactgcggctaattccagatcatgcgtcgggtagttgccttcatgaggacgcaactgccgtgaagcataagaaaccactttgccatcctgcatcaacacacatcctagcccctggcgagatgcatcacaatagacctggaaatctttcgtctgatcaggcaggattaagactggtgcagacaccaaccgtcgtttgagttcttcaaaactcctattgcattcagcagaccagataaacttttcttccttcttcaatagctgtgtcattggcttagcaattttagagaagttctcaatgaaccggcggtaataacccgcaagtcctaagaaactccgaacctgagtgactgtccttggtggggtccatttggtaactgactccacatttgctggatccacagctactccttgagcattcacgatgtgaccgagaaactgaacttccttaagccagaagtcgcacttgctgaacttggcatatagctggtgctcttttaacttttcaagtaccagccgaagatgctgctcatgttcttcctcggacttggagtagataagtatgtcatcgatgaaaaccacgacaaacttgtctagaaattccataaacaccttgttcatcaaattcatgaagaaggcaggtgcgttagtgagtccgaaagacataactgtgcattcgaacaacccgtaccgagtgatgaatgctgtctttggaatatcctcttcgcggatcctcaactggtgatagcctgatcgcaggtctatcttagagaacacagtagctcctttcaactgatcaaacaggtcatcaatccttggcaaaggatacttgttcttgatggtgacctcattgagtgcgcggtagtcaacgcacatcctcttggttttgtctttcttctccacaaagataaccggagcaccccaaggcgacgtgctcgggcggatgtatcccttctgtaactgttcatcaacttgcttcttgacttccgccaactcgttggctcccattctgtaaggcctcttgtggatcggtgcagttccaggtaccaagtcaatccggaactcgatatccctttttggtggcattgttgtcagatcatccggaaaaacctctggatactctctgactatgggaatatcctccagcttcttagtggttttctccactgctacctcttgttcttcaccagcagcctggtttaaactaatccctggcttctgcggcactggagactggaagattaccacctctccttttgcattggtcaacttgatggtgcggctggcgcaatcaatcactcctctgtgccttgccaaccaatccattccaagtatgacatctaggtccttggattcgagaagaatgaggttggctggaaaaatcaacccttgaatttcaactgtcacagatgggcagtagtgagttgtggtcatgccacctccaggagtatgaactcgcattggtatcttaagcttcactaaagataacccatgtgcaccagcaaaacgcttggaaataaataaaggaatgggttgcaccagaatcaaacaatattactgccggtgtcgagttgacggggaatgtgcccaatataacctctggtgctgactgcgcctcctctgcagatgcatgattaacacgggcctgaacgaacttgggtccggcacgtcttggcttcgggcactttccaaccgtgtgtccgggtttgttacaattgaagcagagttcgggtttttctcccaacctcttgggctgttctgtcagagctggctgaactgattgagctggaatctttagtgaactcggagtagggttgaggctgtgctgctcactattgttgtgactgtcactatggtggttcttgttgaagttacccgggtggtagggacggtgctgccggataatcatggtggaaggtccaccgtgatgtcccatcgtgaaacgaggcttctgactcttcccctggggagtcctgaactgagctgccttcctcttacggtttattttgttacagtgctcctcctgacggatagccttatccaccagcttctcaaagtcctcataatctctagagatcaactggttagtcaattcatcatcaagaccagacaaaaacttctcctgcctctcggcatcggtacgcacgtcctcaggggcatagcgcgcgaggcggttgaactcatgcaaatactctataactgttctggttccttgttgcagggaacggaactctctcttcttttgtgccacgattccctcgggaacctgggctttattgaaactatgacaaaactctgtccaagtaacctctgccccagctggacgggtcaccatgtagttgtcccaccaaatagaagcgggaccttgtagctggtgtgtagcaaaagcaaccttctcctgctcgttgcattgcaaaagattcagcttcttctcaacggcatgaagccagtcgtgggcctcgattgggttggtggtgcttgagaaagtgggcggcttgacacgaagaaattctaacaatttggactgaggaggtggaggaccaaactgcaggttctgctgctgcagctgtgcttgctgctgcacctgctgcaacacctgatggtactgttgctgcatctgttgcatcatcattgtcatcatctgagtctgattgtccaacacctgagcgatcgttgggttctcgggcggtggggacggactgttgtcagatgcaccgttggcacgtgctccattgatcggctcttcgctgccactggcgttgttggagtcgcgtgaaccattccttgtctccatctgaggggataggtagaaatatgagaaaaggaagaaaacaggggctcagaaactaatcttgcttatgaatttaagtgcaattatcttaatcttgattaaaacactgaaaaagaggcacgaaactcctaattgaggcagtcataccactgacacatgatatcgaccgccgactaacccacaagcaacaaacctaaacacgaaaactagcaagcaaacagactaagaaggcgataaagctaagggcggcgactctgaagctcgaggcggcgcttgcaaacgagggataggactgacatctaaagtagacaagggataggaaccaactcatgctcaaatccaaattaaacaaagcaaaagaagactcaaataaataaccgagcatgatgatttttatgcatagaatatttttcatgaactcaaataaagacactaatgcaactaaacaataaattaatgcatagactagttgcatggaaaatgatgcgcataacattgcccccaccgaatatagacacgacctaatgcataacccccaataaattcccgactgactgtcgaataaactccaactaaaatttttctaaagccctaggctgagctcattttttttttaaaaaaaaatccgatccgaatgaacgaccaagatttttcccgcaaaccaaagaggcaaaactccaaattttcccaaaacaaattccaagtgcaaaagggcatatgcatatgaaaaggggttcagagggctcttagggtttccagttggcttgtcctacggtcaaggtcggctctgataccaacttgtcacgcccagaaattctcgaaccagaatttctaagctgaatgtgcattgaatccctgtccaggaccagccagggtacacaaacgacaattgttgacatacagatccacgtcttacaaaaatagaaaagattacaaatgcagcggaaaagataaaagcgagctaaaccgggaagcttgacttcagcagcgggcgactccactccacagacaatccttgacggcagcgacgaaaccaaatttgacaaaacagctccaactaggaaaatcttcagctctggtgtgggggaaaagagagcaagactgagtactacccactgtactcagcaagtcataccggtagaggaggtatgatgcaggatataaccaaaggaggctagaggttcttttgcataaagctagcatttaaaagcagtagttgaaagcagtaaaacagttgtagtaattaatcaatattaaccaaacactgtccaacgctacaccacgttgcaacaggcccaaccaaccacctgaactacaccagttcattaagctaaactaggggtgagactaatcacggtgaatctggttgatcgcccataaccgcgggcacggctattcgaatagttttactctggccagaggtgtacaactgtacccacaagacacgattccacacatgtcgccatgccccgaagtatcaccatgatactgcaaagggggaaatcgtgacaagaccctccacataaccctcccctaaccatccacaccacgctaaggtttcacccccacccctcaaaaggcagtgggcggtcccctcttgcgccgcggtgaatccggcagctggacaaccggacaccccggccgacccaactccatcacgcccaccctcgccaccggtgcctaggaaagggtcgagctatacttcagatcaagcagttacccactcccgcttgtggtaagcacggtaagtctcccagggtttcccgtgaaccggtccttaactgccatgggtgcgaccagcaaaaccatgcacccacaacccaccattcaatgtattttaattaactaataccattgcggtggcaccaatccaaagctatgctcatagtcaaagtctatgtaataaggtgatccccatttgtgtgctagttgaactaagcatggctaagcatttcctaaaccaacatctagtcattttgatacccaggttatcaatggcatatggtaaacaataaatggctgagtaataggacccattccacatgatattgtaaacgaatgcaacatttaatagaaatgcgggatatttgtaaattgggtacaatatgatcaaacgtattgcatgacttgccttgctctcgcactgacgagacctcagcaacgtcttcgagaaaccgtggatcgacgaaacggccgaaacctacgcgacaaacaaagcacacaagcaaaacaggctataagactactgaaacagagaacaaaaccatttttaatggattctacacatttttcttgatttactgagacttgaatgggattaaacggagctcggatgaattagatatgaattttagaagattcactgtgtttattactataaaagaaatccttaaataatttattgcgcaatattaaccagggctgacgtcagcacggaggggtgcggcgccgacaggcggggcccaccggtcagcgaccgggagagagagaaagggggtggcggcgcgcgggcccactggtcagcggcacgggggaaaggaggggcggcggcgccacgtggcggccgaaccgacggccccgatctacccaagggtagatcgccccgatctacccaagggtagatcggacggcggcgggacctcgcggccggggcgcgcgggcgcggcgcgagacggcggcgaccatggcgccggcggcgcggcgcccacacggcggcggcgcgcatgcggcagcggcgcaaggcggcgaccgaaggcgaccgaccggcggcggggagcggcggctagaggaggagcggcggctacgcggctaagcggcgcgcacgcggctacacggtacggggaaaaggagaaaggggagggggaagcctcaccgacaacggtcgacgacggcggccgacggaggacgacgacgacggcgggacgagctccggaacctcctaacgaacaaaaggagagggattagagagagaggaaagagcgtgggagggcgagagcgccggccgaaggcggcggccatggcgccgcttgccggcacacgacggggatgggtctccggcggcgaacctcgacggggaaggggcggccgaggtagatctcgaccccgcgaagctaacggcggcgacggcgcgagacggcgacgagcc

SEQ ID NO: 7279 - DNA, 2394 bp, Oryza sativa
tctgttaagcagtgtgcgcatggcgtatgcccaatactttagaaatttctttattcacaatatacaagcttctttatagctattttgctatatcactcatcatattttacaaagcagttggtatatcactcggatcatgttatttggaggattcacaccgcatatgctatatattgatatcaagtcacttggttgattacgattatcaaaaccactcggttggttggattatttattccttgactatacgcttggtttgttcaattaaccacattgtcgggggctacacctattaggtgcatctagtcggtgcacctgactttattttccagccctccacagtcttcagatttggtaaaagtactcgggagaccatgacaaagatgattgaagcactcggctttggagtaatctggttcgagagaagattatcttttcgactgcgaaggtctcaggggctactgtggatattatgggtaccccatacccatacggcatggttatccgactagtcataggggataacttatatctatggaatatgtaatagatcatgactcgggtattacgtttccttatatattacggaacagcctaaagtcctggtttgataatattgtaaagtagatttaggaaaccgataccgtgttggttaaggtttctatcttgtaatcctgccccccatcctatataaggtgggcaggaggccctctagggggcaggagacaacctgatcgtcagatctatactacacccggcggattcaaatccccaaacaggagtagggtattacctctcattgagagggcctgaacctgtctaaatcctttgtctctgcatccatccactttaggtctcgtacgctacccccttttattattgccgaaatctagtttcgacagtcaccgactgacagacagcgccgtgttgcagtgcagctgctgtgcgatcgatcgaggtggtgagaccctcccatccccgccacctcgcagccaccgggccgcccgcccggccgcgccccccgatccctttctccctcatcatttcgcgtctcgcgcgcagccgcgctcctgcaagcaacgtaacgcaacgcgcgccgcgaccgaaccacctaactggccacgcgcgcgcgcgcccgcccgcgccgcgtcggcctctccgaaccgcgcacacaaaactgctcgattattgtgagaccgcgagagcaagcgagcgatcgatcgatcagccagccaaccagcccgtcacgttcggaaaaacgggttaggtgccgcgcggccgcgcgcccccggcggattcgtggaaggaatcgcaccggagattaaaagaaaaaaaaaacgagcttcagaggaaaagacgtcctttcaaacattcttaagaaaagaatgtgagcatattgagaattagtaacattgaatattgggttaaaattacacatatcttactacactatctggtacatctccgtaccggggattcatcatgcacgattcctcacttctctcctgccagccatcgcggcgccacagaatcgctgctccgtctcggtgttctgcctcctgtccatagagctagccagcccacgattttctgcctgcaccgattcgcgtgtttttggatactgatcatgtgtgcgatcgacaatcacccggctaaacctgtcatcataactgtgcctcgcacactcgggagactttcttccagcgtacgtagaattgtcctgcgtctcctgcccgcccatggaacgaagtacaacttgcgagagctcttgagaccataattaaccatgattagtcaaaggcaataattcgtgacactaatttcgcttcgtcgatgcgtggcaccgagtggccggcgattggctcggagtaaatgcgaggcaattgatgggttccttcttccctgcagtggtcctggctgaagaaaagggttcttgctgtttgctcttgtggctgctgtgacactgtaggtccgagagaacaatcataggtaaattgtctgcttcatgcatgataactcatgaattatggagttttgatcgacgtaaagggaaaaagatatgattattgccaacctggaattcgttcttatcggcacggattgagaagcctgaaggaacaggaatggaatactgtcaggttttgatgcgcattctaatgaaatattcaggtgaggtttgtaggtcggaattacttatgccgaagtaataatcgacaagtactgaaaaatgtacgcagaatatagatcacagttgaaacgagaatgatataccgtctgggctctgcattttcagacggaattttctgtgctgtatctgaaagcaaaagcaacagcctcatttaaactgtgaaagttaagcagacgacattcagagaagctgtcaattccatcatt

SEQ ID NO: 7280 - DNA, 10533 bp, Oryza sativa
aatcttttctttagtcagcaagactctaagccatcagccctcaagcaaacagaggagccatgcccttgacctctatctgccaagacgtcgagtcaggcacagcaaaccaacaacacatgtcccggacagcatacgtcatcatatatcgtacacggtttgtcgaaacatgaattcggcaataataaaagggggtagcgcacgagacctaaaagtggatggatgtggagacaaaggatttagacaggttcaggccctctcaatgagaggtaataccctactcctgtttggggaattgaatccaccgggtgtttattgatctgacgatcagattgtcccatgccccctagagggcctcctgcccaccttatatagggtggggggcaggattacaagatagaaaccttaaccaatacggtatcggtttcctaaatctactttacaatattatcaaaccaggactttaggctgttccgtaatatataaggaaacgtaatacccaagtcatgatctgttacatattccatatatataagttatcccctataactagtcggataaccatgccgtgtgggtatggggtacccataatctccaaagtagcccctaagaccttcacagtcgaaaagataatcttctctcgaaccagattactccaaagccgagtacttcaatcatctttgccatggtctcccgagtacttttaccaaatctgaagactgtggagggctgaaaaataaagtcaggtgcatcgactagatgcacctaataggtgtagccctcgactatgcggttaagtgaacaaaccaagcatatagtcaaggaataaataatccaaccaaccgagtggttttgataatcgtaatcaaccaagtgacttgatatcaatatatagcatatgcggtgtgaatcctccaaataacatgatccgagtgatataccaactgctttgtaaaatatgatgagtgatatagcaaaataactataaagaagcttgtatattgtgaataaagaaatttccaaagtattgggcatacgccatgcgcacactgctttaacagatgtgcttaagtccctagaagacacatggtttcaccacacctggaaatatatggcatatgtggtgtaaaatccgagtaaataaactcataaaggatttaccaaccgcctagaaaatgaccacaatatataatcagcctaagccataatattggtcaataaaaatgcacacttacgtggcgaaaagcaatgatattgtatccaatcaattgcttgataaacccaaacagcaccttgactatataaaaaaagtcagcgggacagctatataaagctttactgtttgacaccttttaagatgcattgtaccaactcctaaaaagttaagtaactgcggtataaaaggattttaaggtattgggcacttgatcacgcgcactttggcctaagcaaaaagtgcctaagtccctaaaagaacgtgacaggccacacctgaaaatatgggctgcagacatattaggcctaggccaaaaaatatgccttcgacaccctttaaaggatgacgcatgtaacatgctcccgagtaataaatcttctgggtaatatagaccaagtgtagctcatatgaatagcttctgatctgaatgattatcccttatgggatactccaaaataaatataataattgaatcccgactggcgcaagtattcggttgacagcccttacggggaataataattggtccagtctttgagcatagaaaatagactcatgactatgaatccatgtggaatgtatccggaacaagtccaaattggagatataatcctcacgcttgagttgatgagcccctgagcatatagcttgtccttctgtcatagtcaaaattgtctattggcaatagctgacgcagtcggcatggagatgaaatgaccaacatgaagacgaaattgctcatcagaagtaacggaagatgtcagtggtaataaaaacagtgacaccaatcaaaggtaatgaagttgcataaccatggaggcgaagaaaccagtcggcaacagtcaggtcagctagcagtgaagatgtaggcgcccaacaacaacgaaagaacagtcggtgatgacaaaagcaaaccgacgatgaagacgtagacgcgcatcaacagtgatggcgaaatccaccaatcatgaagatgaagaaaataatcggcggcgacaaacgcatccaacggtaatgatgattaacggcaacagagatagccgactatgatgacgaagtttcccatcaacggcagcagagttggctatgttgatgaggcttgacaagatgttgatgaagatgacgatgtcggtgatccagtcaatagcgatgtagcagccgatgataacgatgagatcctctatcggcagttgcgtagtaggccaaccgtgaagacaaataattggaggagagttgatgttgttgcccaactcgtctaaaccgaaatatttgaagttgttgaagtagaatgtctgttccgaagcaaagatgaagataatgactcctggagttgactcattggctgattaattgatttcttcagcttgacataaaatttgtcaaattttgagccttatatttgtgtagccccctgtcacgaccggaaatcacccaacaggcgttcccgacgtgcgtgtattattccttgtcccaggaggcaaggtacaccaaaagttgatacaatacagagtttaacaagcggaagcgtatataaaattattacatgggcaacgaaggcccagcacacacagagacaaacgaagaacagcggaagactagggcgacgaccacaggcacttgacggcaggcacgagctagacaccgaagccttcatcttcaaggagctcctcttctgggcttgggaaaaattgagcaagactgtgtacaaccaccgtactcaacaagacacacccacaaatgcagaataaatgcaagggagtacaagggaattataatataaagggttagggttgcagtaaacagcatttaaagacatttagttgctcaaagctactttgtaaacgcgatcctagaatgctacaaagttattaatcaaggccgtgaacccacacgaacctgccttaacccaaggcctatgatgattcagaccgaactggcaacccgaccctgggtcccagctcgtcctaagccaacccaggccaaccattccacattttagttgttaagcaagttttaagaattaaaacactaacttgggtacattgctcggcttgcccataaccgagggctcggctattcgaatagattatactctgatcagaggtgtacatctttacccacaagacacatcttcctcacgtgtaaccacgtgccacataccaccacggtatacggacggaagacgtgacatagtttccaacccatcctagccttagacaagagtaccgacccaatcccacctacggccgggatacccgggacaggcaggcagaactgagcccctagcagcagggcaccaaccctctgccatatgacatctcgactaccgggccgcagctcgtgtagccttcatttgccctggagaatgtccatcgacacccgacttcatccatctccaatccgtgtacttttgtttatgactagactgagccacaaactaagccttacccactagacatgtggaagtacggtagtgctttgcaacagaggcccgaagaccggtccttaaacggccgaggtgctactatcaaaaccatgcaccccgagcccagcctaaaaccattttggggattttgaatagagggggcggtgtgaagccaattccacaataaacccacaattccagagtatccaggtgatatgaatatttcccaaagtctatagttgtaaaaccacctaaggttacctaattagattgcgaagcatctacctaaaattatactagggataccatgagtagagtgtccactagttgaggttttgtttgtctagggtgaacaaggtagtaataacaataacaataataatatggtcataacaaaggtaaataggcatggctaagtaaaacagtgataacgcgggaatttaaataaagcgacaatgcaataatttaaatcaacataattttataaaatgggattcaatatgatcaagatgatgtgtcttgccttgctcgttttcccaatcgacggcttcgacttccacgaagagcggatcttccgaagctgcagcgtctacacgaccaacggaaaagaaaaaggctttaacactaaataactccacataacagcagaaacaaagcacaaaaatgggttctttacatcttaaggaaaaattagagacttgaacggtccaattccgagttcaaatggccaagatatggccatttgaagtttatatgctctttaaatggatatttgcgaatttcttcatttaattttcaattaaaaaatactatttattgcgtcagccgagggagcggggcgcgcggaccgggtccacgggaagtggggcccacgcgtcagccccacggtccacggtggaccgggcgcacgcggctggcggcggtcggcgccgtgggtcccgcgcgtcagccgcacccgcgggcgcgggcggctgacggccgggcccacttggcagccgcgagggcgcgccgaaggcggcctcgccggcacggccgacgggaggaggacgcgcacccgcgccccgatggtcgccgccggcgaccaacggcgcggcggagtggcacccgagagagaggagggaagggggaagcgaacggaacggtcttcggctcaccccggtcgacggcgacgacgggaacggcggccgaagcggaagaagacggcggcgcggctcgggatgacgagggcgacggtgctccggcggtcggcgggcgaagcggaggcgcggacggagtcggcgacgatgcggcgaagccgaaggaggggtcgccgagtcggaaggacgtccggagcgacgtcggcggcgaaccgaaggtcgacggcgacggcggagagagaggagcacggcgcgagcacgaatccgacggcgagagcgagcggcgagcggcggaaacggaagagcgaagcacggggatcgaatatatagcaacgggagggggagagcgcgcccggggagagaggaatcgcgcgcggagatctcggccgccattgaagacgccgccgatgattgcgggattcgaatcggacgaatccgagggagagagagagggaaaagaggggggaaacgggggacacgggagagggaatcacgggggtgattcccctctctttaatgcgcgcggggacggcgggatgcggcgcaatccgcggcggcggcggcgctagggcacgggcgcggcggcgggcgcggcgggaggaaggcgatgacaggtgggccccacccgtcagcgagagtggcgggcgggcccgcctgtcagcggcgcgcgcgcgcgcggggagccgatgggccgcgggagaggagagagagagagggagggagaagtgggccgagccggcccaagagggaaggggggggagaaaaagaacttcttttaggattttcttttttttataaaccttttccactttgtttatttcttttcaattattatttgtgctctgaaaattccactaaaatttgtttaagcattttaggcttttaggaaatatacaaaaatcctccaagcctcgtttgacttttatctttgcacattttaattgttggaggctttcacattgaattttaattattctgtggagattatgggtaccccatacccacacggcatggttatccgactagttataggggataacttatatctatgtaatatgtaacagatcatgacttgggtgttacgtttccttgtatatgacggaacggcctaaagtcctgatttaggaaaccgataccgtattggttaaggtttctatcttgtaatcctgccccccatcctatataaggtgggcaggaggccctctagggggcatatatgatgaggacacgacctgatcgtcagatcaatacacactcggcggattcaaatccccaaacaggagtagggtattacctctcattgagagggcctgaacctgtctaaatcctttgtctccgcatccatccacttttaggtctcgtgcgctacccccttttattattgccgaattcatgtttcgacagttggcgcgccaggtaggggttgcgtcgagtttcctatcaacgagcgcgatggaatcaatttcatgagtcgccgacttcgctttcgctttgggagttttcacttcctttccgtcgaccacttcttcaagctcctcttctctgacttgatccaaatcagtcagggggaaactcaatctgatttttatcattatttatcatattgatttttaatctcagattaatttcttgctattttttgttgttgttcgcatataactacgcggcactattgaggcgattgatgctggtcatggactcgaggcgtctcagctttccggtcgatcggccgcgagtccactccgccggcttgtcctcgccaccgccattgctgatagcaacaacgacttcaccgccggcctgcctccgtcgccgccgactggtgtcatcgcctatacggttggtcggtcacaccaccgttcatgggcgtccatgtcttcaccgaccggctggccttcgccgccgccgactggtgtttccgcctgcacggctggcctattatgccgccgctgttgggcgtctacgacttcaccaccggcctgcctccgtcgccgccgactggtgtcctcgcctatacggtcggttggtcacaccaccgttgatgggcatcgtcatctacaccgccggcctgcctccgtcgccgccgactggtgtccccgcctatacggtcggttggtcacaccaccgttgatgggcatcgtcatctacaccgccggcctgcctccgtcgccgccgagtggtgcctccgcctacacggctggcctattatgccgccgctgttgggcgtctacgacttcaccgccggcctgcctccgtcgccgccgagtggtgcctccacccacacggctggcctattatgccgccgctgttgggcgtctacgacttcaccgccggcctgcctccgtcgccgccgagtggtgcctccgcctacacggctggcctattatgccgccgctgttgggcgtctacgacttcaccgccggcgtgcctccgtcgccgccgagtggtgcctccgcctacacggctggcgtattatgccgccgctgttgggcgtctacgacctcaccgccggcctgcctccgccgccgtcgactggcgtcctcgcctatacggttggttggtcacaccatcgttgatgggcgtcttcgctttcaccgaccggcttgcttccgccgccgactggtgttttcgcctatacggttggcggacttcgccgccgttaatgggcttcatcatctacaccactggcttggttccactggcgccgactggtgtttttgtcaccattgatggattgtttcgttcccacatcggctacttctgctgtcaccgagggaatacgacaaagctaagtcatcgcttattttattctttatatgatattttgtcttttcctttgcctcactacatcaactggttcgccgttgactagtgagtcgggggctatagatgttatatcgtattttttaaacaattttcataatatttatcttgattgcttgcgacatgttctgagtacaaaagtgcctatcgagttatggagttccatcttcctatgctttccgtttggtttgccaatagatagttgcctttaggccgattcctagcacccgggggctcgttggatggaccgagtaacgcaaggtgctaagtattattcggaataaatcaaaagcatagagatgagataaatttattttctgctcttaataattgcaaaagtacccgagtagtaaattctgattcgtgaaactttgttccattaatggcgaactcatgtcactcatatgcatgtctgggaagtgcctaggccgactcccggtgcttgggggctatgactagtcggacagagcgtttaaacgtaatgaatcatctgctcggggaaatcaaaattgacaagaggagaaatacatatttataaatattttaaaatacttgcatttttcttgagtattgtatttacatcagatactactcatcctatatgtttgttctgcaggatccaaatccaaatatgcataaaagggattcatggctttaagcttatctcttacgctccaggaatggatcagtcagaacatcaccaccggctcgccgtcgtcgccgccgactggagtcttcgcctatacagttggagtcttcaccgaccggccgccttgtccgccgccgactggtgtttccgcctgcacggctggcctttatgccgccgttgttgggcgtctatgtcttcaccgaccggcttgccctcgtccgccgccgactggtgtttccgcctgcacggctggcctgttatgacaccaactgatgctatcttcttcacggccggctacgtcgccgtcaccactaataggcgtcatcatattcaaacgcaagctgtctacgtctgctgccgactagtttattcacttccatggctgcatgattctgccagtgttgattggccttatcttcttcaccgccggtcatctcgtctgctgttgactagtgccctcgcctctacgtctggtttataccactaccactactgatggacatcatcgtcttccgtcgccgactggttatgccgccgccgactggtgcttttatcttcacaactgcgcgtcttcactaccggtttgcttctgttgccgccgactcgtgttcacttcatcacggcaatgcaactttgtcatcatgcctcgacatctcggcatgcgatgccatgttgttttactacaacaagaggctctccaatattcaggatttctacttggacatcttcaacacatatcttcaatcaagcaatgactactcgacgataagaagctataattctcgactctatgttcagttgtttcccaactaaccaaagagtcgggggctacacaaatataaggctcaaaatttgccaaattttatgtcaagctgaagaaatcaattcatcaaccaacgagtcaactccaggagtcattatcttcatctttgattcggagcagacattctacttcaacaacttcaaatatttcggtttggacgagttagacaacaacatcaactctcctccaagtgaagcatctacaacagccataacattaatttgatggattattgtcactgacatcatcaccagcacttctgcttcatcgaccctgacatctctgctgttgctaatggatgattatgttttcgccgacttattatttcaccttcacggttgacctactatgcaaatgctgatgagcgtcttgtcattatcattggttgctacactgctattgaccggatcaccgacatcgtcatcttcatcatgtcggttgcgtttgtcttcgtcaagtattttcttcatcttcatgattggtggatttcgttattgcctttgatacgtgtctacatcttcaccgtcggcttgctttcgtcaccaccgactggtatcctcgccttcacggatggcttattatgtcgccactaatgggcatcttcatcttcttcaccggctgcctcatctgtcaccgactgattatttcgccaccatggctgctcaattttgtcgatgttgctggatgccttcatcttcactgttggctgacttgtctgctgccgactggtttcttcgctccacggctgtgcaacttcatcacttttgattgctaccatcaatggacaattgtgactacgacagaaggacaagctatatgctcaggggcttactagctcaaacacaagtatcataccttcaatttggacttgttccggatacatgcaacatgaattcatgatcatgggtctattttctatgctcaaagactggactatttattattccccgtaagggttatcaactgaatacttgcgccagtcgggattcaattgttacatctattttggagtatcccataagggataaccactcagatcagaagctattcatatgagctacgcttggtctatattacccggaagatttattactcaggagcatgttacatgcgtcatcctttaaagggtgtcgaaggcatatgttttggcctaggcctaatatgtttgcagcccatattttcaggtgtggcctgtcacgttcttttagggacttaggcactttttgcttaggccaaagtgcgcgtgatcaagtgcccaataccttaaaatccttttataccgcagttacttaactttttaggagttggtacaatgcatcttaaaaggtgtcaaacagtaaagctttatatagctgtcccgctgacttttttatatataagtcaaggtactgtttgggattttaagcaattgattggatacaatatcattgcttttcgccacgtaagtgtgcatttttattgacc

SEQ ID NO: 7281 - DNA, 971 bp, Oryza sativa
cgcccgaaaccctagcgcgccgccgtcgccgtttccttccaaatccggccgctcctttccttctccggccgaattgattgaggggaaacaatctccgggatctcctctaccttttctcctttggaaacatcggctaaatcgttttggaagttcgtggaatagagttcgattcggatcggcctctttccttcaagccgcgagctttccttctcgtcgccggccgccgtgggcctttgccgccgcctccttgcacctatataaggacccccgagctcccctctacccgtcgcctcctttgccttagcctgccgtcgcgtctagcgccgcctccgcgtagccctagtcgccgccgtcgttgccgtcggttcagccgcgccgcgccgccgttgcagtcgccgtcgtcggtcgccgtcgccaccatcgggttcgccaagtcatcgccgtccccgtccaccgcttcgccgccgccgaagaccgtcggagcgccgtcgccgtcgtcgacccgaagagcttcgccgcttcctcctcgtcgccgccgccgtccgttggtcttccgccgccgttttggtcaccggtgagttcgccgcgtcgtcctctacgtgctggtgccctccgtttgtgccgaagtgccgccgttcgccggcgagcgtgcgccgcccgagctgtccgctccgccgagccgccgccgctgtcggtgacgtcatcgctggcgtcatcgtcccttttcccgtgagccggtcgtggaccgatcgatctcagccgtccgttttggatagggttgatctcggccgtccgttcccgtgaaccgtcgcccgtgcgcccggtccaccgaaaccctagccgctgacgcaataatccttcttttccttttcaaaaataattcattattgcgtcataattcaattaaaatccatataaaggttttaatccgatttaatctttaaaaattcataactaattcatcttaactc

SEQ ID NO: 7282 - DNA, 41953 bp, Oryza sativa
tgtgcatacaaagaaaataaaacaaacatgtttggaacacaatgtaaatgagagtttttaagtgtgtgctgtgctgatactatgaatattatatctaggaagttactgatttttgttgttatatatgttgaagagtattatgaatacctagcaacatgatatatatgccatgtttatggttcatcaattagagaatcttatcataccatggtgacccactataataaacatggtgtatgttgcaggtgtaaatcaacgtctgagaggaattgtgttcaggataatagcttcagagataagcattcattaaaattccaaccaaaacctgggcagtgattattgtttcaatgaacagtaagtaaattgataattctgtgtgctaaggtgctgtcgtgacattatatgtaaactattcatagcagaattcctgactcaatactccactgttgctttttgtttagaattgcaatacgtgaataatgtatttgtagtttttgtactatcttcaacatctttacaggaaatacaattattgctctctgcttgtgtggctggtcctgggagatgttttactgcttgctgcatatcgaggttgaaatgttttcgtttggggggtgggggggaaaggtcactggtgggaggttgaaatgttctgtagaaagatgtcgtcatgagaatgtcccgtagctaaagggagagcgatgccactgtaaggatgaatagtgagccatgccattgtccctttatttaaacacattacccgttatccaggggaggtagcaactgctagctttcatgtactctatttctgttccccattcatttatcattcgctgccatggcagtttgatctgcatagattagaatttgcttttgtgatatgtttgaaactttccttgtgtttgaacccacgtcagattctcttatcaagatgtgattgaatgtactctttcgaccaatcattgaatgaacttattttacaccttttggtaaatgatactctttgttttttctgcaagggcaaaggctactagtttgccacgtggcccactgatttgagagaattttgtttgtaacttcaaaggagctattgaaatcgctttctttctccaactttttttttgatgtgtacaaagtaagaatcttttcggcctattataatcctcccatcggtgtcaatgattttatcaccgcattatgcttgaactttgaggtgaaaaaaatgatagtatcatttccctatttgattgttcctgcaatgtgtcaccctagaaaatttcttattttaggagttattatgattcatatatttggactcaacatatgttatttgaatataagaggtacttactaactaaaacattatatcagatgaagtaattcatagttttcattttttttattttcccaaaaatgattattcttgttctaagccctgcatgtgtgaattcttatggccttgaaaataaattgtcaactggacggttatttgtttgtgcctgtgagatattaagtttgatgcatcaagtcttgaaagagttcttacgacatatcagaagttgtcgcttgcatgcttctacataattatgtgataccgagaggcactaattttgtcttttcattgaatgagaaactgagtgaactaaaagcaactacaaaggttagatactttcatcttggatctttattaaataaccgagattattaaggttggggttgatgtgggaaagatactttagtaatttgcaatataatttgttaaaaatctagttgaccattagaaaatggtgtgaatgtatttttcatcacaaatccttttgttagttttataatttttagtagaatttagctataaaatttaatgggcggattttataatactgggtcctatgtcaactgaaatactgacaatatttttgtactgtagcctctataaatgatcacttagttatagatgagcaattttgatttctgaacaccaaatatacaaaatagtatcctataaagtatctccagaatctgcagctattcaagtcactgtctaaaatgtggatagatattgcacaccctgggataactcacttgtatacgaactttaaaatatcttcacttatgttggtgaaggaatagtaacaggctcctgggctatataaatgaacctcatgttctactttctgtaacttaggtgatcggcaacctgtgtattcatttttgggattgactcctactttaaaggcttcacttcgcctcatttttttcctgactgttcaatacttgtgaatggagtacggtaatttgcgacgtcaagcagcttccttgaaaaagagcctcttcgatcaggcttgtgctctgttcatctcaaaatttcaagcattatagttgaggcatatctgagactctgcaaatatatccatcagtccttttgctatatcttcttctgctatttatcattcagcaagacatagaatacagtgttttgatggacatcaccttacagtcatgccattttaattgccataccatggattgacactattgcacacagataatgaaaacaaagctaaggagaatcagattgaagcacattatattaatataagtgggttatcgatatttctgtagagttcattccatttcgtacttatccccaccccagttagcaaagaaatgctttaaaatcaacgcctttcaccatttcggaactctcttttctggtctttatcttagtttaacatgtgttaagtgtgctggtttaacaaatcgttttgtattgacagggttacttggatgagcaattttgtcaggttgaggatttgcaggatgaagcaaatccaaattttgcagaggaggttgtttccttgttttttaaggattcaaccagggtaatgttgaattttgagcaagctatgtaagtggtgacaatttcataaactagacctgtcttgattatcttttcacattcagcagcattattgttggttactaatatctaacatcacacagtgagaagcatccgaaagacttcgccagatgggacacacacatgcagcaattgaaaggcagctgttctaggtaagcctcagctcagtttcttgtgagatctccatgttgtcatttgacggaactggcactgatggacttttacagggtgtttgaattttattgcctttttaggaaagtgtatgcctagtgcaattacccatttgtctaggaaaaaataatcctgcctttttccaacaaaccacctaactttgtttagaaaaacattgcttggagaaggagagccacacatcgcaaggtcggtttgttgggtgaaaatgaacatgattagattttctatattttgagcatatgctgtaggtaaacttaatttgaaatcttaagtttttaactgcacacaattgtatctttcaaaaagactatgtatgtgataataattttatcactaaatctaatttagagtgtcaagaatctataaaaagctaactaacattaccctataaaaactatatggccttagtttttctcccttcagtcttcaagaaagtagcttaactttcctaactggcatagttctcaggtttttatattaagtttatccttttctcaatggaagcaaatatgacagtttcgaacacaagctgaaggagaacttccagaagcctgatgtacctgaactcccaccacacgcacacacaacaaagaaaagaccttcaaataatggcctgcttaatatcttgtgaaattctagtgaacggtcagggaatatgttaaacagagatatttacagagacccatattgctttgattggtgcagccttgcaggtgcacagctggtagatcatgagtacatgctcactccttatttcattatttgacatgataaaagaagctggcaatttgcttagttatacatatgtgataatcttttgtgtactttatcaatgcttgacatgatatggtttgtcacagcattggtgcctccagggtgaagaatgaatgcacttcattcaggaatttctgtggagaagaaaacgccgaagggtatctctctctctctctctccacttttatgacatgtggtatggcatggtaaaagttcatggcttgagcattgtgattttcccatgcccatggctgttactgggtgtgctcgtctgtgcttgcaggcttgcagccacagcggctgtggcagttgtaaatggctgccggctgcagctggtttcaactgccgcagctgcagtggctgtggcaaccagagcatccaatcggcctgatcattacggaaaaaccaacaaagtaaatggctaagtgccagtctgccaccttgtcaaacttggcatggctcagtcgaggcatgtagaagtgtcacctgtcagccctcactgttatgagtgttagtacctagttacacatgcatattctgatgggtgaaagttcctcctgctagtgaactggaattagcccttgccgtctatctttttttgttcaattcattggcttatttcgtatgatgatagatctctactactattgttatgcagttgcacgagatccttccagaaagtgaagagggagcatgccgtcctcaggcagaagtgggagtcctacttccaggtaatcttcaccagccacttcgtacccagctttcattaatggcaatatatgtttgttactaaggttgtgttcacctcgttaccattttcaagcttgccaaattctagcaagacaacatagcattaccaacataaccttaccaaaataaaattttgtaaggccttaaaccaaataccacctaatgttactatatactccctccatttctaaatatttgacgccgttgactatttcaaacatatttgaccattcgtcttattaaaaaaattaagtaattattaaatcttttcctatcatttgattcatcgttaaatatactttcatgtatacatatagttttacatatttcataaaaaaatttgaataaaacgaatggtcaaacatgtgctaaaaagtcaacggtgtcaaacatttagaaacggagggagtatttcaccaaaaaaaaaaagggtaatgccaaagtttggtaagttttctttctgcaacaaactgaacacacctatggctaataaaccattcatttctccacctatctcataataaacacaacgtggctttgtgcagctgttgcgacaagctggtcctgctgggaccgcgactaggcctgcgggcaagtaagctataagcagccggctattgaattggtctcgggctgctgctgccgtggatgcgactaggctggtacacaagagcagcctgccgttgttctagtatgccactacggtgaaaacccgtatatagacgtgctacgacttatgagttgtgacatgcatgtctgcttgtttatgacaaaaataaaaccgatcaagattactacatcatcatgagattgctctctttgcccttattttgtccatgctgttgtccagattgcgatgggtttatatacagctataaccacagatgaaactgtccggctgtgtcggtgaccattgctatgctggagatagtgtgatcggccgacaaaagtttatgaaggtaatcaggactgatagccctgatagtgtgataggtattactgaactaactggaatgacaggggtgtatctgatatctatgtgatggacatgactgagctaactactactaagataagtactcctatatgcaaaagcatgagctatgttctaatcttggcggttaagttgcaaccactcaagatgtacattttgtgtttggctccttttacagctctgttacagtgttactgacaccggagcaaactctgacgacggaaaatttgaaaaccacaacctaagggtgtgtttagttccacgttaaaattgaaagtttgactaaggctgtgtttagatccaaagtttggatccaaacttcagtcatttttcatcacatcaatctgtcatacacacacaactttccagtcacatcatctccaatttcaactaaaatccaaactttgcgctgaactaaacatagcctaaatttgaaagttcaaagaaaaaagttgaaagtttatgtatgtaggaaagttttgatgtgatagaaaagttagaattttgaagaaaaagttgggacctaaaaccggccgaaatatgcaagtagtagttcctactttcacacaaccaatatggttcattccatgatgggaattcagaaatatttcctgtcaagctctcgctgagcagtgagcaccagcacgatgggaaaaagtggagtagcatttcgccgccggctttcatagatctttttttatctttttgaactttttaattttttaattttaaaactaaatatttccaagacttattttcaagatttgaacggtgtgacagtgttatttggtcacactgttctaatatagacaaaatgtctagattttgtaaataagtttcagaagtgtttattttttaaaataaaaaaattaaaaagtacaaaaagtaatttaaaaaaaatcctttcacgataccggcttgcggcttcacggaccgaatcaatcggaggtagccagtttggccactttggcgggagtgcgattaaaacctgtttgacgacgtcaactctccggcgtgccggcttaaggtagggctcatgtgtaaaagaaaaagaaaaaaaaactcaggtcgcctgcacgatgggaaagggtatccttgtaattgatacaggattcggcgtttgagtttggactctgcactctgccgcgcacgtcgtatgaatattggagcttaatcaggtcccagggattcaaacgcgtaccactattggttccgataaagatgttctacccaattggctccttgaggattccaaaacaaagaaattgtttactggagtacttcttgcgttgttcaaattatgctagactatagtaggaacaaagaacaaagaacaaaaatatgtctatgaatagttccacgcttttcaatgcttcaaagtcaagcctcaatgaggttaaaattttctattatcaaaatccaaactaactggaaagcaccaccggtgatatggggagcatcgaaagcaaatcgaagtaatttggttggggtttttacccaccaaaatttaaatcttggtgcgcatacaagttagcaatattagaaatttggtcttgtttagtttcaaactttttcttcaaacttacaacttttttatcacataaaactttcctacacacaaactttcaacttttctatcacaccattccaatttcaataaacttttaattttagtgtgaactaaacatacctttatcgttggcttctctttttaaacgtgtgttacttttttttaagatcttgttgttcatattattagatctttaaacgtgtgttactgtgttaggggatttattcatgagtgtattagtgtgatattacatgtgtagtagtttgtgtacgttaattggaaaaaaaacgaaactattcttaaaacaaattcgaattgccggtaacggcgaccagagcaaaactcacgcaagcgaagtttcaaatttgaaaacgaaattaaaaaaaaaaactcacgcgaacaacaacaaacccgcgacctgcgcgagaggacaaaccaaaccaaaccaaaaccaaaagcgaaacacagaggacaacacaaagcacggccggggggcggcgcaccgcgcacgacggcgacgagacgcgtggcggagcaacaaaaccagcccccgcattgccccgaggcggcgccgcccgagctcgaatccgcccaatctcgccggcggcggcctcgatctgagccgaggccgccgtgcgccggcccgggcggcgaggaatggggagcgtggacggagatttcgaggggctccaggcaggtgaggcgccccgctgatccggatgctctcgggagtttgaattctagccctagctgctcgaggtttgggttgctgcgagtttttgtgattttgggggtaaatttgtggcgaggaggagtggtggtcggcgatgggcgaacccgctttttctgcgctctgatttagtggttttcgagttggaattcagctcagcgacctcagtgattcgtgcatattcttcctctggttctaggcttctagctatcgccagcccagctattgttcagttactatgttttagtgtttgaagttagctggcgaccgctggattttgaattttttgctgtttcgatagtaaaatgtttgccgaagaagaaccgtgtgttaacccgtttttgtgccggagggttcaaaagttttattattatcatttttgatctgagatatcagttccgagctgccgatctgagttgtgatttttaatttctcatacttgctttacatgatggtgcaaaaaacattgtagcggatcggcgtgcggaagtgattgaatggctcaatgcgttactcccggagtactgtttgccactggactcatcggatgacgagttgcgggagctgctcagtgatggcacggtcttgtgccatatcgtgaacgcactcattcctggtgttctcgaggtgtgtccttttgggcttgaagaattttggcttttttgttgaactgtggatgttgatattggtgctctctggatgtgagtttttgtttgtttaggagtcgtggggtgcttatgcatcgtcagatcaacatgcaggccatgtgaagaagttcctcgcagtggttgctgatatggggttgccaggcttcagtgttaaagatcttgaggaggtgaggttggtcttatcatactatgtagttggtttgcagaaatgagttctgaaatgcaaatggttgagattagttttcttaaatgtttgcgtgctagccttattgtgctagtcaatataatggtgcttggccttgttgctcatggtattgcgttgctgacaagttttagtcatgcatacacatataagtagaactatatttctagagttttttttcccattataatctgtgaggaataaatgaataacctcttaatatcgcctaaccataattgcactatagtaataactcaaattctgtgatagattgttgactgctagaaaaggaggttagattattagttctagatttattctatgccggatgctgtcatctaggaagcaaatctgcaaaaaggattgacaccgcatagttaaaatgacatgcttttaaatactcgcaattgacggaaacatgcaagcattggagcaaatccccccaatttcactatttgtggatgtaagatgttacagtttttcattaaaaaaaatgtttaccatttccaaagttcctgattgcttatgttaactcataacttgaccatggcagggttcaatgtctggggtagtggactgcctcttggttctgagggaaagtgtgagttctggattacgtgatggtacttccaaggctcctttgaggaaaaaatggcgagttccagaaactggtgaacctcttgtccctggtgtggcacaagggaagacatcccctggagaggacaagaggaatggccttccagaccctaagtctcagcagaaaactcccatctttaatggtatgcacattgttgactattttggtgcatagtttaaaaatattagttgaaaagaagtccctacatgtttacgctttggctctagaattctgtactatatagtcaaattctcaaagggaaaatgacatgggctatttgtgattgggcacttggccatgttgtggggggtcaacgatttattggttgaagctgtagattggacaactatgttcaacatagaatcttagtggacatacaaactttctgatgaagctagatttgatcatggtggggtggttactttaacgtttcttaaattcaacatggcttccaagctccaaactacaaacttgttaacgtgtatgcttgctgcaagttgtaactcaagctattgtgtataatctatatctgggtcactactgttccctaccttttagtttataatagctcgtcatatatgctgcaggacgaaagcttcgtgagattttccaattaaaacgtggatcctatgctgatcttccggctgccaagatttcagaaatgatgcattctaacagtttagatgtaactttccattgcttatgcttgttgaattgttctatcttgttgtttgctattcctttcctaacagtaattaccttctcacagaatgcaccaacccaatcccttcttagcgtcgttaatggcattttggacgaaagcattgaaaggaaaaagggagaaataccacatgtatgtctgtgtttctgaattgcatgctctctttttcattggtatcttttaaatctaataaatttatctacctcacctcagcgtgtagtgtacctactgaggaaagtagttcaagaaattgagcgtcgtctttgtattcaagcagagcacataagaagtgtaagagagtcttttttccctgaagcctatatatcctttagctaataaatgcaactcatgaatcagatgtctcttgttgcagcaaaatgtgatcattaagacaagggaagataaataccattcaaaaatcaaagcacttgaaatattagtaaatgggacaaatgaagaaaaccaggtaaatattcagtattttcattgttataataaattacataatttagaagttctcccccctaactgatgacattgtggacttcctttcttcagatggctataaaccggcttcagataattaaggttagacctacactgaaaagatttgatttcctacatttgctatctttatagtacatttgctatctttatattattgtaataatataaacaaatgaaatattaactatataatgtttgatcatatattattgctataaggatgatatttgatgttaattttgttaccgcctagaccggtagaaattatggcaactgttatatcaactatataacatattatatatttttttctgcattcaggaagagaagtcaaaaatagaagagaaaaggaaacttggtgagcaagatgttgctcggctaatgaaagaaaaagaaatttctgaaaacacaatagctagtcttaagaaagagatggaagtcatgactagcatgcatgagcaacaacttcagaaaatcgaactgaccgcaaagcaaatggaagaacatttaactaccaaaattaaggaggttgagtctcttttagtgcaatcaaacaagaaaattgaagaagttgaggctgcttccctgttaaaatcacagttgtggaataagaaggagggcatttttcagaaatacatgaatagtcaacaactatatgtcaaggtttgtttatctttaacttgctcttacttccttttgtttttcatcttatttatgggttattgcttgaaaatgacagggtttaaggatatcatcatggtctataaaaaatgagatgcatgcccttgaaatggagttgagagatgagatgtccaattttggtatgtgttgtataatctataaagtaaacatttacttgtatattttaacattgtgttgcttaaacttttgcaggctctggtttaaagtgtttggttgatgctgctgaaaactaccacaaagttcttgctgaaaatcaaaagttgttcaatgaagtgcaagaactaaaaggttttttactgctcaaattttttatagcttcagaatgcacctattgatgtccatttcaatatctgcctcttttaggtaatataagggtgtattgtcgtgtaagaccatttcttcctggtcaagataaaaaatcaaccactgttgattacattggtgaaaatggtgagcttttgatctcaaatccatttaaacaaggaaaggatggacatcggatgttcaagtttaacaaggtttttagtccattttcttctcaaggtatatttttttacaatggaaatctggtataagcttatctgtgtgcaaataaattctaatacttatctttcaatttacagctgaggttttctcggacattcaaccgctgattcgatcagttcttgatggattcaatgtttgtatttttgcttatggtcaaactggttcaggaaaaacttacacaatggtactaacttttaccgatattttactggctcagcattgttgttaacttatattgatcttttttattggtattgtactggttcagcatgatgcactgctactaacttttgatcacttatgttctattccaataattttgttcttagagtggacccagcacatcaaaacaagattggggtgtcaattacagggctttaaatgatttatttgatatctcactaagtaggagaaatgctttctcttatgaggtgggagttcagatggttgagatatacaatgaacaagtgcgggatcttctgtcaaatgatattgcacagaaacgatatcctttttcatacttaaattgtcatttctaattatatttctggtacctatgtttttagtttgtaagagaatggttgtgttctctttaacataaaaaaacacttggcatatggagcacctctcaacctaatggacttgtcgtcccagatgcgagcttacacccagttaaatcaacatcagatgttttagacttgatggaaattggacaggcaaatagagctgttggttcaacagctcttaatgaaaggagcagtcggtctcataggttgagtgactgataactgaagttaaactatatcttttttgctctcaatatgattttattttgaaacacattattctatgcagtattctgactgtacatgttcgagggttggatgtgaagaatggatccacttctagaggatgcctacatcttattgatcttgcagggagtgaaagggttgagcggtctgaagcaactggagatagattgaaagaggctcaacacattaataaatcactgtctgctttgggtgatgtgatttttgctttggcgcaaaagaatgctcatgtgccatacaggaacagcaagctaacacaagttcttcaaagctctttaggtaatcaattatttagttgaaaaatcatgcatgtggagttagatttatggtttttgtaactataatcttataaaataatctcttgcaggtggacaagcaaagacactaatgtttgttcaaataaatcctgatgttgagtcatattcagagactataagcactctaaagtttgctgaaagggtttctggagttgagttaggtgctgcaagaagtaataaagagggaaaggatataaaagagctgctggaacaggttcttgctttttatgttctgtctgactcatcattaactgaaatttctttgcttttgttttacataattgctgaactatttagttctaggaagaaggggaatccttatgtgtaaatttgatgttcatgcaacaaattttcttgcaaatactgaagtaatttctaattgaacttagagctctattttagaatgttgctgatgttttactcaaaagcatggccattgttctcaacttcatattttccacaaatttattcaaacattctaaagaatcagcagtaaaacaacagcaatttccaagctattcctgaacgaatgttctcccaatagtaatacaagttatcatcaatattaggcttgatcctgaacaaatgttctcccaatagtaatacaagttatcatcaatattaggcttgagatacagaaaacctgctgcaaacaacctttttttttgtctagtatgaaaaaaatataaacaaatcaaaatggtgacttgttgtgatgttctatgtaattattcaagtctatatgctgctagtggtgtaaatttctagttgaactcatgttatggtttgtgcttgccaatgagacatgtttctgttataatgacaattccttctttttactataaatattttgtcctcccaacttgaaaagtcacttcacatattttgtccaggttgcatctttgaaagacactattgtacgaaaagatacggaaattgagcagctccaactcatgaaagacaaagtcaaatcgccaagttttgcagtcgatataaatggtgctagcatgccaaaaaattctaactctgacctaagatcagtattgtcaatcacaacaaaccaacagagccaactatcagatcctcagagttatgctgaggtgaacagagatggtggacctacttcatacactgacattacaccaacatgcttggatgaagcagattttgaggacaatgcatcagaagatggtttctctggaggaaccgactattctgttggctgtgctgccggtgccagcgttttcccaaattcctgctcagatagaaccgcagatacctccatgtactctcatctccctatatcacttacaccaaactaacttgcagctattaattgttctctcattacatttactcaatttgttgtaatataatcttattattctttatgcaacattatcttttcatgttgtgatgaagaagcattaatttggtacctcctaatgattgcagtaggagaatttcatcacgaatagctcgattcagtctcacaaagaatggacaaccagcaacatccagaccaaaaccaaaggatactgctccgaagactccaagtatgtactataagccactaatttacttcaacagattggtaactattactgtactggctacacagttttagtatatgtgctcaacgagttcaaattatcatgccaatatcagaagacacttgccaactttgtcttggttttcaaaaacaaatggtaattttttgggaatagaaaggtcatgttgctccgtgcaaataatttcatacacatgtggttgctattattgtaaaacttttagttttttttaaagatatttttcaaatttttagtgcactgtccaaatagtttcatacctgcacatgatgtaattaattatccttggttattaatgagaaatatattgattatcagatcaaacgagagttcaatcgagccaattgataggaggctcttcactgagggcatctaaaaggtggcagaagtagagcacgctccggttgctcagttgtattttgtatgtccagaatgtgaaaataggcgaagtagctgtaggagacaatgtacttgtaagttgtaactctacagatgtgagagcattctgctgacgaaggacgagcagctgatgactcatcctttgctcatacagatcaaatatccaggaaaggattcccttttctgttctccatgtttcccctgtacttcaatttttgtcatggttactgcatctctggaatcaaacgtttccaattttggaagaaacactggtattttttatttttattttgctctgagcttctgacgtacttcgagcatgctcgattctttgggcaagccaaatgttactgggcatggaagtctgcgtggtgtaatggaagagagacagtttggttctctctctctcgatcaatggatgcttgcatcaccctcggaatcaatggtgtaaagcttcgctttggtcgccctttggacctaagttttggagtttgtcgattctgatagcaaatcaggtctgaaaaaattataatcgcaactgttttaacaaaatcactgccgctgtttcttttttttcgaacacactgccgctgtttctgtaattactgtaacttgttcagatgagaacggtggcgatatcgaacttataaagagtagcacggaaataacgagttgtcgccgggcaaagtccaaatgtatatcgctggagcactgaagatcccttgaagaccagtgactactgaacacttgtgcaaaagagctaagcagaaaaactgaagaactgaagccttggtaaaaaaaaaaacttatgcaaaagagctaagcagaaatactgaagaactgaaccattggtaaaaaaaagaaaacacacaaaaacacttatgcaaaagagctaagcagaaaaactgaagaactgaagccttggtaaaaaaaaaaagaaaaagaaaaagaaaaagtgaagccttggtaaaaaaaaaagaaaaatgcaaaagagctaagcagaaaaactgaagaactaagccttggtaaaaaaaaaaaagaaaagaaaaagtgaagccttggtaaaacaaaaaaaaaaggaaaatgcggtgagcgtggatcgaacacgcgaccttcagatcttcagtctgacgctctcccaactgagctatccccgcccttggttaattaatgatctactacaaatatatctgtatccttaagctatctcatataaacacattttacatatatcttcaagtagattatgtttatgttgcaatgtaattttgtgtttaaaattttattttgagagattgaacaaatcctgccattctgcatgcataatgaccccgtaacttataaacaagaaaagggcaaatcatgtttgatctttttaaaggggaacttacaaaaaccacctcaaatatcacactgagttcgagggaagaggattatctgacttatttccctctgactttgagtcgcttacgtgtggacccactaagtagagggtccatatgtcagtgacacaagttagagggaagtaagttagaggatctcaatccgagttcgagatccctgtaaaaccatttgtagcaatatcctttcccaattgtcactgcttgcacatatgcgatatccatcaatacgatccgatgtctacgctcaagccgaacctgatatgcaaacaaacagggttagcggaatcaggaaatgtagtaattcgagtaagtccaaccttcaaggaagaaggaaggcaatccgtcgcttgtttgttgcaagttctttccttttctctttccttatgtgttatatgacttagcacatcttttgatatacatggactcatcttccggcgacccccatctctaagagctgagactcgtgattaccatcgcccaacaacatgctggatgccagatgccgcaatcgtgccatcgagcctacccaatattactggtgaccacggctccttggctagtactccctccatcccaaaatataataacttttagctctcaagatttgtcccaaaatataacaacttctccaccaacattctcttcccaaccaatcacaactctctaccattcacttttcccatctacttccactactcaactaatcacaaccctccatcattcatttctacccactttattaataactgtgtcctactataaaaatgcttatattttagaatggagggagtagtattcaggtgagcccatgtggggtttgcggctatgagaacgggtgggcataggtgaattaggaggagggagatttgtgataaatcatcttatcgggagtatcgaattgagggtgacatttgggatggttttttaaattttcctttttaaacaagaaatactacgttttaccgttgataagtgattgactctacgaactgctatcaacgaacattaactctacgaaataccattaccaaagtgttttttcttctgtttctgccatcttcattaagtctcccattagatacattccgttaacacgtcatacaaaaaatacattttacctatagaaccatatctcagagtctcagagtaggaagtgcttgatatatttgaaggggtaaaatggaaattttgcataaagttaactaggtgcatttgatactaatgctagtggagttggcatggagaaaaaggaaaaaaaattaaaacactcttatgtgatgttataccataaaactcccgttctcgagtatcaaacattttctcctcataaataggtctataataataatcttatcatctgcaatgcgtcatatgacatagtacaatgtatgccttttgtgcatttctcgaacaccaagcccgtctagctcagtcggtagagcgcaaggctcttaaccttgtggtcgtgggttcgagccccacggtgggcgtccattcctttttttttctctcgtctccactccactggttcggagaaaccccatgcttgagctcgcggacagctcagacggagaagatcctcctcactttcttcagtttcctccggcacaacgggcagctcccgtcctcctctgccaccctgcaaccacagcgtttgcaattttatggtgataaggtttacaaaccctgaggttatcgtaattatcacggacgataaccacggttcatggtaaccacgataaccgttaataacgataatctcacttaggccgagtttagtttcaaacttctaattttttccatacacatgaacttttaactttttcatcgtttcaattttaatcaaacttttaattttagcgtgaactaaacacacccttaaaacagtttagtacctcgtgccgcacgcgtggcaggtggcggagtgcccgcaggggaggaagaagcagtccctccgcgcgtcgcagcacaccacgcataggtgccgcccctcgccgccgccgccgccgccgcctctttcctctacgtcgtcgtcgtcgtcttccccgtcgccgtcgtgcgagacggagtcgtacgacgaccccaggctcgcgtcgtcttcctctttgctcgccgccgccgccgacgacgacgacagcagcgaggctctcgcgtctcctcctccaggcccgggaccgaacagcatgttcagtatatcgtacatgatcagcagtgcaacagccaacagaactgcaattcagagggattaataatttagtgtgcagtcaatcctaccattaatttgagaggttcttcttgtaggtgattattgagttggtacctaatccgatgatgtacactatccagcgaggtccatatgacagcttcacataatgaccatcagaattcagtccctgaatgaaattgtgcactagactagtcagtactgcatccggctaaagtgagcattgtacagtatacgagaggaatctgaagatgacagagaagacgctttttgtcacctctttggggccggatgacagaaccacaacgttttgtcctaaaaacggcagtttgtaagtgcaaagagagctggccggtgagcatgtataatctgctgcgctggtgttgtagaacaaggtcctgattctgaattccagtagcacctgccagatgaaacctctgtaacaaggctgaagatgccacaaaaacattttggaagctctgtcgctcttgacacggggtaatttaccgttacatcctgattgttaaagtttcccaaggcaatgaagtactctgaagagagattgatagtctgcttgattgttccatttcctgtgattacacatcctgatagcattagtatacggattctcccggggtactgcaagtctgcaactgattcttagtcaatgagatcatgcttaccgtgcaccaagtgccaagataatgtggtctcatttgctgatggattctcagcccattgcaagaagctttctttgcctatgaagcagtgaagcaccaacacgcaagaattttaatggtgtcagtgaaactctgttactgatatgaaaaaatcacacttaaacacacttgttcatatatctgaacctttcttacctcgcgcaatgatcatgcagattggacgagacgattcagtttcactcctgacgctgtaagctacttctatctccgatcctctgttaaggaaatacacccattcctgcagcacacaacatggagtatagtaagtagcaactaatcttcaattctgaaaataactgacatgatcatgagttcagagtttcaaacagaatcacacagatgataacgcagcattaccatgtgagaattggctggtacgacggcgcggcgagcctccgaccaagcggctgggacgccgagaggcggagcgaccggcatcccgtagagcaccaacccattctccggcgaccctccctccgtccttgcctgcaagagcgagtgcacacattaaaacactcgtcctgactgagctcgtgcagagctacgggaggatggtcaccttgatgtcctgcgcaaagaacgagttcgtctccacaagcctcgagcaacctgagccgatgacgactagctccggcgagccgtggtaataccccaacatcaacgccgccggcgctgttccatcaatgtaaaggatcaaagcgagttatagcactgagacataggccgtgttcaggtttcccagcacgcaaagtgaagctcgtattattgcatgattaattaagtattaaataatatttttttaaaaaatagattaatatgattttttaaaacaacttttatatagaaagttttttataaatcacaccatttatcaatttgaaaatcgtatgtgcggaaaacgagagaggtgggttagaaaaatgggaggaataacacagccatattatgtgttgtcgatcagagagattcggagtaactgacccaagaaacagaaggcgaggagggtgacaaagcagagcactgccgccgccatgactgtaaagtctgtacccgtcgccggcgctggacagcaagacgacgcgtgagagaagctgtgaatacctgaacggatcacggccgcgggggattttgtggaatcggtgtcttagctgatgtgtcctggttcggtagctggctcgtgctccaactaccattccacctagccgaaagaacagagcagtagttagttgagacttgagacagaactcacagaaggcaattcgacacgagttagcgattgacattaggcttattcattttattaccactttatttgggctttggaagtagagaatagaagtaacctttgacgattagaagtaactatacagtaacggaaaaataactttaaaaaataattacagtattacaagtacattactagaggaaaataactctaaaaaaatagaaataactttacatggtattaaaagtaactttaaaaaatagaagtaactcatgtaagaagtggctacactggtagaggaagtaactctcaagaaaaatataagtaacttttcatgtattaaaagtagctctttgaaaaaaaaatagaattaaacatcctgggaatacctatattgctagatgatttaaaaataagaataaaatttagaagtagttatgatttgtataagtcacttttaggtcttattgaatttactatcataaatatctgagaagtaaattaatcaaatctagaaataatttacaacaaaagtaatttgcgtatataaaaaagtaatttacaacatatatatttatttttatcaaaatataattatgtaagatcttgttataaagatttaattaaagaatacaatgatactatcagagtgtggatccagtatataatttgaaacaaaagtttatttgaggcttagctattatgactattttttctttgttgttgcatacttgcatactcggaaatacatgaatgctaattagacataactaatttcggaaagtgcactcggttaaacatcgtattaattatgaaagcacaagctttgtagtctcgtccatattttttactttgaaatttactttgtgatcacgatcacttgtcgagttgaccccctcatatttaaaatctggcttcaccactgtacatgaacagtgtattttcatgcttaggcatgatttagtttccaactttttctttaaacttttaacttttctatcacatcaaaacttttctacacacaaacttccaatttttccgtcacatcgtttcaatttcaatcaaactttcaattttgatgtgaagttaacacacccttatttcctttaagaagatcatctaacggcttcgatccttgatcctattcagcattgcttcaaatcatttgtgcagaactgctcagctaccactttttgatgaggccttcaaacaactcttgtctaaaagaaaaggagcagctgatggagccgccgtcgccggtgcccaacagtacatccttctaaaatccaggacgacgcatgaagaaatcgaggcaagtttccttagaacacggcaatcatgctgctccgcgagcgcgatgaccttccccactgtgaacgcatcaatgtcgtacctgtcgtcgccgtcgccggctgcttgttcctccatcttcttcttcgtcgtcgtcatcatctccggcaacgagtcggtgtacgcgaagaagagcaacgccttgaacacccgcgcctccatgccgtcgacgcggacgatgccggtgctttggccgacgacgacctccttcgcagtcgttgcgccgaagagctctaggtcgaagacggacgaccgggcgtcgagcacgcaccggtgcgcggcgaacctctcgccgccgacctcgaacaccacgtcggcgccagtttctccgcggaggaggtcgccgaggtgacggtgcaggtcggacggcggcccgtcgacatcgacgctgccgggcgccacttccgccgggcggaactcggtgacgacgacgtcgcatcggacgatgaaggaatcgttcttcagatgcctcctcctcgacctctccaagattctcctcttgacgaaccggctcggcccctcgccgcgctcccgctcgtgaagctcgtcaaagacgacgacggcggcggcggcggcgctggcgcttgctccgcctccttctccgcgtcgccggcgaaccggaaccggtgctgcgcgtacaccggcgcggcgacattctcgtcgaggatgaggtcgaaggagatgtagtcggcgcagccggagttcttgccgttggggtagtaactgatgcgccattgatggcctccgatggcgaacgcgctcgacgtcatgtacactccggtgggtatcggcgtggtggccatgtagccgtcgatcgtgaggaggttgtacccgctcgtgacgttggcttggacgatggaggcggatcgcgacgccatggccggcaaaccttggtgtgttggaaatgcaggtgccttcagtttactactccgtcatcgtatgctgatcggatcagatagttaattaggccctctgatcttgtccgaatctgggtctgtttgtgcatatcgttggatcacgcgtacacaaggacgaagggaagtttggctctgaacgaccaaatgggccgtggaggctaatgagccggatcaagaaacccacaccagcaaattctccctctgttttcgatggttttccctgcatctgtacaactacacatagcagtcaaagaatgactctaaaaaggtgataaaatacaggcggtttcatgcgcctatgaatataacaaaatataatactagctacgattttatccctctaattcatctctgaatatgttaaaaaatatgtaagcaacatccatatctcaaacatagagaaattgttggtagaaactaattaatcaagcacgcaatatgcacaatgataggtccaattcggagcccacatatataacacggctataacactgtacaacgagctgctatctctgtctcaggttataagatattttgactttggtcagaatcaaactacttaatgtattcaactattgattggatgaaactaatttagtactgtaaatattactatatttatctataaacttaatcaaacttaaaatagtttgactttgatcaaagttaaaatgttttataacctgaaacggagggagaagtaactttcagagcatgccaatcaactcctccgtgatgaacgggcagctcctactcaggtggtagaaaccatcagtggctaacaccgccattagattgtctggaaagctgacaaaatctaagcaagcctttatgaggccatgggccatggcaatggtactggtcaaccaacgccatgatggacgccactgtgcccacgtcaatgtacttgcacaacttgctctcgcatatcagcttgagcctctccatgccgtacacttcggctgcgacaagcagacgctggcatatggcttcttcctcctcctttctcatctccggcaacgagtcggtgtacacgaagaagagcagcgtcctgaacacctgcggctccatgtcgtcgatgcggacgacgcatgcggcgtcgccctctttcatcgcgccgaagagctccgccttgaaaaccttggaccgcgccgcgagcacgcaccggtgcgcggcgaatctcaccccgccgccgccgccgacctcgaacgccacatccgcgtccttccctgcacgaattaggatttaggagttcgccgaggtgatggtgcaggtcgggcaatcggggaggcttattagcgacgacaaggctttggggcgccgccgtgtcatcgttgacgacgacgacgacgacgtcgcagcggaggtgaaggaatcgttcttcatatacctcgacttctccaagacttccctctcgatgaacttgcagcaactccgccactccggtcagcgtagttcttgagacacgtcgacggacaaggcggcggcactgggtcagaaatgcccgacatattactacgaatatttggatcacataagtaaacaaagttcctttgtttctgtttcactattctgcttaggaaggtacatgtcatttgctagcacatgtttgcaatttatctcgtatggagcaaatagaaattaacccgaactcttgggttccagagcaccataaacttcattgcatatgtaccgcaatcaatcctccaaatgaaaaatcatatatgggaaattaattattcaaatgggcaaccagtttcatgcacaacataggctaggtccttccatctagtatttgtaaatctattttctaaagctgtgtcgaagcaagatttcagcaataataaaagggggtggctgtcaagctaggaaagtggatgggtttggagacaagaaattttatacaggttcaggccttcttattcaagaagtaataccctactcctgtccggggatgattccgccgagtgtgttattaattgtatagactgggaaaaagaatcgccttccaagaggcacacggaccctccttatataagggaaggagtccgctttacaaaatacagtccatatcctaacggaatatgggattatagataaaatacaatcgtaaccgactaagatcccgggtatttccttgacatacaagtttagaacctaacccgagtattcatagagatattccatctatatttggtaccgtatatccgactaaattacaaccgtcatgtcgatatgggatatccataatctccacagtagcccccgagaccttcgtagttgacaaaatagccttctcgaaacaaaaaacagtagtccgagtgcttcaattcaacttgctccagcttgccgagtactaaaaatcaaaaactgtgaagggcgaaaataaaacatggtgcatcgagtagatgcacctaattaggtgtagcccctgactatgtgattagttgaaaaactaaacatatagtcaagaaccgagtggttttatagcgaagcacgcatggtacttagtaagatacccagccgactgcttctcaacttgaatgtatcaaggacaaaaaatacaagaagggccgagtgataaacactcaaaggtccaaaaatagacatgtttgataggaatccgagtaaaaatctcataaaatgacccaccaaacaggatagaaaatcatggtaattaatgagtccaatagcctaggctgtgacccttaccataaccaaaataagcatataacatgctaaaagaatgactattaataaaccagtcatctcaaatcaacccaaacagcttttgcagcctaataaagcttacaaaaaaatggtataacacctttctgtcaggcacctttttatgcgcatcataataattccaaagaattattgaatcgcgttaaaaaggattttaacagcattaggccacaccatcgtaaacacaaattgccaaagcaaaaagtgcctaagtccctagagatcacaacagaccacgctgattatagcattgggctgaagtactgtacaggcccaggcccattagtgctcccgataccctaataataccgaagtaaaaaacgtctcttcgtcttccccgccgagactctcgccattttccccatttcctgctacagtgcaaaactacgccgggcaaactagggttcatcaatccgctccaatccacactcaaaaacttcacgaaatttctccctgcatccaccgctccaattccccatccctttccagccgtatctcgaactaaatcagaccatccatttcacattcatggcggaagaaagagaaagcttcgagagtcagtgggcgccctccgatgtgacggaagacaatctgaaggagatggtggcgcacggcgttcttccagcaaaagagatcatcgggtggcgaccggcatttggtgaggcattcccgacctccgatacacacgaaatcgtggtatttgctcatttcttctacggtggattttctcttccaacctcaagatttttccggggaattctgaacttctacgggattagcttgcatcatctgaatccaaactccatagtgcatattgccaattttattcatgcctgcgaagcttttctgggcattaggcctcatttcgccttgttccgctgcatcttcttcctcaagccccaaccaaacaagagtaaaccatgcatcgttgggggtgctggtttccaactcaggggaacactaagccaaaaatacttctccatgcccttcaagacctcaaataaaggctggcacgcaaattggttttatgttcaaaaccccgagcctgttcttctcgagtactcctgtcttcctccagtttatcgggatacttggaactcactgccaatgggagacgaagctgcacaagcagtagaactgatggagaggatgataaagctgaaagaacagggccttcaaggagaacagatcacccggcactttatcaagtgtcggttagctccaatcaaagaaagatctcgcacagccttcgaatttgacggcaagcatgacccaaaccgtgaagatccagattctcttgacttcaaggtcatgaaggaaaggatgtataagatcttctcaaacgccatcgttgtcagctacttacacttgttgccagtcgtaccgttcaatgcattcaatcctcctccaccggtacgtattcatacacttcaacctttctcaaaacatgatcttgctttcttgttgaatcagttaacaatgaaggatattacacccaggaatttgctttgatgaagtcggatcccccaatcgctcaacgccgatcgccccgccaccaaactgggcaagggagcggaggaccaagaattcggtctgaaactcaaccaagtgcttctgatccaatcggccagtcagattctcgaaagaggaagctggttctaagtgacgacgaagccgatgataccgccaggaggcctggagaccgagagacaaccaagaaactaccaaagcaggctactccaaggtagaaaacatccagtcgccctgtgccaaagatcaggaagtcttctaggtgcaactcatataacgatctcttttgcattgatgcgcacccattgcggcaataatactgataatcaaatttgcaggaaaccatctgatatagatccgtctgggaaagactctgacccgactaacgtggacacaagttcttccaaagaaaccgagccaactgctgaggatcatctgagtgacaatcaaccggcaaccgataatgtagaatccggtgatcaacccccgactggaatccagtcggccgaagccgaagccggagttaatcaggagcccccgactggaaaccagtcggacgcagggccaagccaagagattccagaagtcgaaacccaagcagacaaccctcgtggacaagacgccagcaatgaccggagatctggatcccctttaaaagtatccgaatccactcgtcctcgtccagaaatcattacaggtaaacactttgtccgaaaccatgttgacccaaataactctgatcgatcgtgtaacctttgtcaatggatgcattaggaccaatgatcggtgatgaagaagaaattccccgtatacaaacagccgaagattcgtgccctcctattctggtcaagtggtgggatgacaacttgcaacctcaaggaattgtaataaaccggcaaaaagaagacgaagaggtatgcctactgaaaaaggcactcaaccaagcgactcgcattgtaaatgtaagttccttgacgcctaacctcagccatcttgtttaccgtctggctcgagcgctgattaaactgctccgcagaggattcatcttaggaacgaggcgaaaaccgcaaccctagagagactagttcctcatcttggaaccctcgaagccaccaggagtcaactgcacgaggccagagaacttaccaagaagaatgaacacgatctgagggatcggattgctgagctccaggagtccaatttcgaactgagtggctcatcaaaaggttcgcgcaaactctgcccaactgatttgtgctgttatctctgtaatcttgattaaccgaagttaatgtagtgcaagctgccaagatatctcaactagagaagcagatccaaactctggaaaatgacaaggcagagctggcaagacagagggattcggctttaaaggaggttgaaggtaccaataatcaatacctcaaaagccattatcttctacatgctgattcattaatgtgaatctgttgacgcagaccgcaagatcaagtctcaagcacaatttgatgtcttagttgacaagatcaacaagcttgaaggagccaaggataaagtcgctaatgccgctactccacttatccaggccatgttcttcaataacgccggttcgagtacacttgatgctgccgaaatcttcgacaagctgagagtcgctacagatacttacttcaagaacatcaaagaagctggaagtatgggagcaagtctggcattggcgatgaccaaatccctttatccaagagttgacattgatgccattgatggctttgtagacgggacgagcgaagaagctgctcttgacctcatcagtgatgcgtagaaagcggctgacaagattgctgctgatgtagttgagagattccaagatgtcgaccttcggccaactgggtctgataagtctaatgatgaaaaaactgatactgattgatataacaatgattttgatgatcaatgatggtggaagctcaatttgtacaatactgatgaatttatgctatgcttggtgttccatacttagcttctgatttcttaaaagcctttgtcaagccttattgagcctaaaacccgcaaaagctattaaaaaccttcagtcctcattggctaagtcgaaagaccaaacagggcaatgataaatcaagtaagcaaattgaattgataaaaatcacactccattattatcataatggccccctgactgaaaacttcaaggaaaaacttgaagttagcagtcaaataggaaagatacaagcgaaatgcctaagcataaaatcgacgaaggtgttcaatattccaagaattgttgatgagagtactgtcttcgcgcttgagtcgataagaacctggccgagtgacttcagcaattatgaacggttcttcccataagagagataatttatgccgatcccgtgttgtttgaattttcctcagaaccaggtcgccgactaaaaaggctcgcgatcgaacattccgattatgataacggcgcaatccttgcaaatatcgagtcgactgaattaaaactgcttctcgggcttcttctagtcggttgatgtcgtctactcggccctcttcatagccctcctcgttgaagttccgaaatcgtagtgattcaaattccacttcactcggcaacattgcttctgcgccataaaccaaaaagaacggcgactggtcggtagcccactaggagtagtgcgtaaagaccaaagtacggacggcagctgatctacccacttgctagcatagggacgtagtcggtcaaaaactcgtgctttgatcccttgcagtatcatgccgttagcgcgctcgacttgtccgttactcatagggtgtgccacggaggcgtaacaaattttaatgccgaagtcttcacaaaagtctttaaatgctccgccagtgaattgagtgccattgtcagtgatgatcctattaggtaccccaaaccgatgcacaatgttgatgaagaaatctctagctttatctgctgtgatcgtgatgaccggtttagcctcaatccacttggagaatttgtcgatagccacaaagagatgcgtgtaaccgccgactgcccttttaaacgggccgaccatgtcaatcccccagaccgcaaatggccaggacaacgggatggtttgcaactcttgggctggcaaatgaatttgtctggcaaaaaattgacaaccttcgcatgtccgcacaatcttgtcagcgtcggacaccgctgtaggccagaaaaaaccttgccggtaagctttgccgacaatggtccgtgcagcggcatggttaccacaaataccaaaatgtatatccttcaacaactatatcccttcttccaaagacacacagcgctgcagtattcctgacagacttttcttgtacagctcagtctcatgaataatataaagtctgctgcgcctggaaatccgctcagcttcatttttgtcttgaggtagttcttgtttgctcaaaaattttataaacggttctctccagtcggcttcgatcatgcttatgccttgaatatccatggcttcgactgtctcttttctgggcacggtcggttcgtaaaggtgttcgacaaacacatctgaaggagctgcttcccgttttgaaccaaaattagccagtctgtcggctgcctcattgttatgtcgaaggacatgggtgagctcgagtccatcgaatttattttccaacttgcgtacctcttgtcgataagcggtcatattatcatctagacatgtcacgcccgaaaattcacaagtaatttccgaacttatttgtgcataaaatcctcgtccaggaatcagccgaggtacacaaactgacaatttaatatacagattcatcaaattaactaaaacgataaatacttacttaagaggcacttagtcctcaccaagaagaaaattgcagcggaaaataaaatctagcgaagctccggctccactcccacaggcagctcaactggggtataagccaaacgtcttctccttcgcaacttgtcttcaactgaggttgattgattattgcaaggtgagcatatgacatactcagcaagccacacagcaaatatgcaagtgcacaaggataccaaaggaatggcataatattggctcatttgcaaaagcagcatttagcaaaatatttaagagaagtaaaacagtggagtaattaatcagaaattttaatcaacactgaacagcacacccatgctgcacaggcccaaccatcctgaacaaccatacccggctgaacagatctaactccaaaccaggagctaagcaaattattatcaggtataacatccataattattgtgagaggtgtgagactaatcacgaaaaacattgctcaactcgcccataaccgcgggcacggctattcgaatagttttactctggccagaggtgtaccactgtacccacaagacacagcctcaacatcatgtctaccatgcgtcgcgatactggaaagtacccgaatagaggctgtgacaataccctctgcataacacaactcaccacagtgcaccattcctggatcataatcacccccttataaaacaaggcatggactccccagcgacccccgtgggcttatttccgccacttctcagtctggtgctccgcaatgaaccatgctatacaaaaggtaaagccgttgcccacgctggcttgtggttggcacggttaatgtttcacaacagtagctcgcgaaccggtccttaattgccatgagcacgactctcaaaaccatgtgctcacaacccaccattatcaagttttagttggcaagtaattaattaaccaatcacgattgaccatcgtgagctaccattaaaccatcattaaataataatgaatcataagttatcccaatagtgtgctaatgtttctaagcatggctaagcaatcatatctaatatctagttgaaccaatatatataaagctcaactagtccaattataatcacccaaggtatcaaggaataaagtaatcgagaacaaaagggccataacaaagaataggttaattccacccaatgacattcgaaaataaatgcacagttgaaataaatagagaatttaaatataggatcaacatgctcaaaggattgtgtttaggatctgtgtgacttgccttgcaataatcggtcttcaattaatcttcttgaacactcccgacgcactcgcgaaccttcgcaacgacggaaacgacaagctatcacgcaaaacgaggaaaaagactaataaaaaccaaataaacaatacataaaaagtaaacaaacatgtagatcatatttttagatgaattatgagacttgaacggcctcattctgacttcaaatgaatttattaagaattttacaagattaaatctaattaaagcccatttaaaaagaattaaataaatttaattcaatttatggacaattttaatatgtagatctttattttaaacaacttttgcaacttgaaccacattaaactgagttaagatgaattagttatgaatttttaaagattaaatcggattaaaacctttatatggattttaattgaattatgacgcaataatgaattatttttgaaaaggaaaagaaggattattgcgtcagcggctagggtttcggtggaccgggcgcacgggcgacggttcacgggaacggacggccgagatcaaccctatccaaaacggacggctgagatcgatcggtccacgaccggctcacgggaaaagggacgatgacgccagcgatgacgtcaccgacagcggcggcggctcggcggagcggacagctcgggcggcgcacgctcgccggcgaacggcggcacttcggcacaaacggagggcaccagcacgtagaggacgacgcggcgaactcaccggtgaccaaaacggcggcggaagaccaacggacggcggcggcgacgaggaggaagcggcgaagctcttcgggtcgacgacggcgacggcgctccgacggtcttcggcggcggcgaagcggtggacggggacagcgatgacttggcgaacccgatggtggcgacgtgtcacgcccagaaattctcgaaccagaatttctaagctgaatgtgcattgaatccctgtccaggaccagccagggtacacaaacgacaattgttgacatacagatccacgtcttacaaaaatagaaaagattacaaatgcagcggaaaagataaaagcgagctaaaccgggaagcttgacttcagcagcgggcgactccactccacagacaatccttgacggcagcgacgaaaccaaatttgacaaaacagctccaactaggaaaatcttcagctctggtgtgggggaaaagagagcaagactgagtactacccactgtactcagcaagtcataccggtagaggaggtatgatgcaggatataaccaaaggaggctagaggttcttttgcataaagctagcatttaaaagcagtagttgaaagcagtaaaacagttgtagtaattaatcaatattaaccaaacactgtccaacgctacaccacgttgcaacaggcccaaccaaccacctgaactacaccagttcattaagctaaactaggggtgagactaatcacggtgaatctggttgatcgcccataaccgcgggcacggctattcgaatagttttactctggccagaggtgtacaactgtacccacaagacacgattccacacatgtcgccatgccccgaagtatcaccatgatactgcaaagggggaaatcgtgacaagaccctccacataaccctcccctaaccatccacaccacgctaaggtttcacccccacccctcaaaaggcagtgggcggtcccctcttgcgccgcggtgaatccggcagctggacaaccggacaccccggccgacccaactccatcacgctcaccctcgccaccggtgcctaggaaagggtcgagctatacttcagatcaagcagttacccactcccgcttgtggtaagcacggtaagtctcccagggtttcccgtgaaccggtccttaactgccatgggtgcgaccagcaaaaccatgcacccacaacccaccattcaatgtattttaattaactaataccattgcggtggcaccaatccaaagctatgctcatagtcaaagtctatgtaataaggtgatccccatttgtgtgctagttgaactaagcatggctaagcatttcctaaaccaacatctagtcattttgatacccaggttatcaatggcatatggtaaacaataaatggctgagtaataggacccattccacatgatattgtaaacgaatgcaacatttaatagaaatgcgggatatttgtaaattgggtacaatatgatcaaacgtattgcatgacttgccttgctctcgcactgacgagacctcagcaacgtcttcgagaaaccgtggatcgacgaaacggccgaaacctacgcgacaaacaaagcacacaagcaaaacaggctataagactactgaaacagagaacaaaaccatttttaatggattctacacatttttcttgatttactgagacttgaatgggattaaacggagctcggatgaattagatatgaattttagaagattcactgtgtttattactataaaagaaatccttaaataatttattgcgcaatattaaccagggctgacgtcagcacggaggggtgcggcgccgacaggcggggcccaccggtcagcgaccgggagagagagaaagggggtggcggcgcgcgggcccactggtcagcggcacgggggaaaggaggggcggcggcgccacgtggcggccgaaccgacggccccgatctacccaagggtagatcgccccgatctacccaagggtagatcggacggcggcgggacctcgcggccggggcgcgcgggcgcggcgcgagacggcggcgaccatggcgccggcggcgcggcgcccacacggcggcggcgcgcatgcggcagcggcgcaaggcggcgaccgaaggcgaccgaccggcggcggggagcggcggctagaggaggagcggcggctacgcggctaagcggcgcgcacgcggctacacggtacggggaaaaggagaaaggggagggggaagcctcaccgacaacggtcgacgacggcggccgacggaggacgacgacgacggcgggacgagctccggaacctcctaacgaacaaaaggagagggattagagagagaggaaagagcgtgggagggcgagagcgccggccgaaggcggcggccatggcgccgcttgccggcacacgacggggatgggtctccggcggcgaacctcgacggggaaggggcggccgaggtagatctcgaccccgcgaagctaacggcggcgacggcgcgagacggcgacgagcctagcggcggctagcggcggtcggagtagcaaaagcggcggcggcgggtggttgcacggcgcggaggcgatggggagctcgggagagatcggcgaaatggggaaaaagcgagagaggaggacggcgatgcttaaaaagggggagagggagccggacgtggccgggagcggcgggattcgacggccgacgtgggggagtggggaggagagagaggcgggattcggttttcgaatcccggccatctcgggcgcgggcgcgaacgggagggagaggggaaagggcgcgggagacgcggcgcacgcgcgggcgtggccgacgtggcccgggagagacggaggcgtgggcgcggcggcggtttcggcgcggcggcgcgccgggatcggcgggaggtgggggaaggacccgacaggtgggccccacctgtcggcgaccccgagagaggaggcgggcggcggctgccaggctgggccctcggcctgcggccggcccagcaaggaggagggggaggaaggaggggaatgggccggcggcccatccgaaaagaaaaaaggagggaaaaagggagggaaaagaaaaagaaaaaggaaaaggattttccctggaattaaaaattgcactttggtgatttttaattggttaaaattatttccaaggctctgaaaaatccactaaaaatcctgttaatatattgtgacatgtagaatccaagaaaaattccacatgccgattccgattattatttgcatttattaattagggaattagctctaggttaattaagataatttcttcggacgatttatttagccaaatttttaaagcaagcaaaaaggggaaaacttcagggcgtgacacgacggcgaccgacgacggcgactgcaacggcggcgcggcgcggctgaaccgacggcaacgacggcggcgactagggctacgcggaggcggcgctagacgcgacggcaggctaaggcaaaggaggcgacgggtagaggggagctcgggggtccttatataggtgcaaggaggcggcggcaaaggcccacggcggccggcgacgagaaggaaagctcgcggcttgaaggaaagaggccgatccgaatcgaactctattccacgaacttccaaaacgatttagccgatgtttccaaaggagaaaaggtagaggagatcccggagattgtttcccctcaatcaattcggccggagaaggaaaggagcggccggatttggaaggaaacggcgacggcggcgcgctagggtttcgggcggcagcggcggctcgaggaagacgaacctgacaggtggggcccacctgtcagcggctgagagagaggagagcggcggctcggcggactgggccggctgggccgagggaaagagagagaagggttttgggccggctttcggcccaaagccaaaagaagactttttaaaacctttttcaattaaattatttcttaaatgcaattccatttattaaaaatacttccttagctcaaataaatcccagaaaaatctaggaattatagaattaagcaaagtatttaatgaaattttatctggcccctttttatattgagatttagcaaattaaaattagatcttctcttttaggcttttaaaatcatttctaattattccttttaaacaacaatttataagttaaggatttttaaacaagaaaagctcttaacaattatacttagatcattaatgatcaaataattactgaactgttctttgtattatttaagaattgagctctgaaaaaaaaccgagaaaatttcagagagttgacttaaccatggagaatttaacaaaaattaaatccatccatgctttagatttaagaaatttttatttcccacattttacttcacttgaaaattaaagatcatttaatataaattctattaataatttattaaataatttataaatcctgaaacgaaaatcaggatgtgacaaactaccccccttacaaagaatctcgtcccgagattcggaacggctagaaagaaaagggcataggtaaactgcagtctatcttattccataactccgataattattctaaggctttaaagaaaactactgctgctttgaaactggtggctgagctgcaacacttgaagacacaactcttgaagacgcaactggcactgcattggctcctgtgacgacaatgttgttgacctgaccttgcggctgctgatgcttcggcttcggacactctcttgcaaagtggcctggcttgtaacagttgaaacatacctgctgcttccttccactactgttattctcctgagactgatcctgctgaactggcaccggctgattagcttgcttgatgttaacttcattgctttcattagtctctgatttgatctcaccaccgatattcaactgttgcgattgtccttggccagcggaaaaaggttcaccaatttggagtggcttgatacgctgcctctggctactaccttgtgcctcctggaaaacagtcattttccttttacggttatccatcctgttcttcttgtcttcaagtcgaattgctttgtcaaccaactcctgaaaatcctcatagtcatgagagatcaacataactgatagctcatcctttaagccttccaaaaacttctcctgcctttcctcgtcagtacgcacatcttctggagcatagcgagctagacgattgaactcatgaagatattccgtcacggtacgatccttttgcttaagtgcccggaactcacgcttcttcaaagcaacaacacctgcaggtatgtgtgtcttcttgaatgcttccgtgaactccgcccaagtgattggttgtccttctgctctgttcatccggaaatgatcccaccattctgatgcaggtccttgcaactgatgtgaagcgaaaacaactttctcctgatccgtacactggagcaattccaacttcttctcaatagcgtgtagccaatcacctgcttccactgggttggtagtgctagaaaaggtaggtggcctcacacgaagaaaatcagctagcttgttctgcggcggtggagcattgttgttcccttggttgagctggttctgcatctgctgtatcatcatgttcattaactgagtctgttgagccagaacttgagcaagagttgggttcccttcattgttattgtttccacttcgactggcgcgagtgttcaccatctattgcagattagagaagataggaggagaggggttacactaaagacaagaccttaaccatgttaccactgatctggtgtgtgtagaccattatattgttcaagttgattaagcaagcaacctagtatagttacacactcatcaatgaactactccaatgatggaaatgcaaccatacctacacacaagcaaacaacaaacgttctaccctactaactattcttcaaagacactttggcggcataggttctaaggtaggatccaaacttcattccatcttgaccacttggcacttcagatcgaccatcaccttcttattcatcgatccacttgactgacctccataagtagacctcactggcgtcttcaagtttcaacaactagtttcagaaccacttaagttgaaagcaggaggggagaggatgataaaatgatttatacagaattctagagaaggaagaaaggaaaattttcacaaatcatgttttcagaaaatttgtccttaaggtttgaccatttggcttatcctacagtcgagatggctctgataccaacttgtcacgcccgaaaattcacaagtaatttccgaacttatttgtgcataaaatcctcgtccaggaatcagccgaggtacacaaactgacaatttaatatacagattcatcaaattaactaaaacgataaatacttacttaagaggcacttagtcctcaccaagaagaaaattgcagcggaaaataaaatctagcgaagctccggctccactcccacaggcagctcaactggggtataagccaaacgtcttctccttcgcaacttgtcttcaactgaggttgattgattattgcaaggtgagcatatgacatactcagcaagccacacagcaaatatgcaagtgcacaaggataccaaaggaatggcataatattggctcatttgcaaaagcagcatttagcaaaatatttaagagaagtaaaacagtggagtaattaatcagaaattttaatcaacactgaacagcacacccatgctgcacaggcccaaccatcctgaacaaccatacccggctgaacagatctaactccaaaccaggagctaagcaaattattatcaggtataacatccataattattgtgagaggtgtgagactaatcacgaaaaacattgctcaactcgcccataaccgcgggcacggctattcgaatagttttactctggccagaggtgtaccactgtacccacaagacacagcctcaacatcatgtctaccatgcgtcgcgatactggaaagtacccgaatagaggctgtgacaataccctctgcataacacaactcaccacagtgcaccattcctggatcataatcacccccttataaaacaaggcatggactccccagcgacccccgtgggcttatttccgccacttctcagtctggtgctccgcaatgaaccatgctatacaaaaggtaaagccgttgcccacgctggcttgtggttggcacggttaatgtttcacaacagtagctcgcgaaccggtccttaattgccatgagcacgactctcaaaaccatgtgctcacaacccaccattatcaagttttagttggcaagtaattaattaaccaatcacgattgaccatcgtgagctaccattaaaccatcattaaataataatgaatcataagttatcccaatagtgtgctaatgtttctaagcatggctaagcaatcatatctaatatctagttgaaccaatatatataaagctcaactagtccaattataatcacccaaggtatcaaggaataaagtaatcgagaacaaaagggccataacaaagaataggttaattccacccaatgacattcgaaaataaatgcacagttgaaataaatagagaatttaaatataggatcaacatgctcaaaggattgtgtttaggatctgtgtgacttgccttgcaataatcggtcttcaattaatcttcttgaacactcccgacgcactcgcgaaccttcgcaacgacggaaacgacaagctatcacgcaaaacgaggaaaaagactaataaaaaccaaataaacaatacataaaaagtaaacaaacatgtagatcatatttttagatgaattatgagacttgaacggcctcattctgacttcaaatgaatttattaagaattttacaagattaaatctaattaaagcccatttaaaaagaattaaataaatttaattcaatttatggacaattttaatatgtagatctttattttaaacaacttttgcaacttgaaccacattaaactgagttaagatgaattagttatgaatttttaaagattaaatcggattaaaacctttatatggattttaattgaattatgacgcaataatgaattatttttgaaaaggaaaagaaggattattgcgtcagcggctagggtttcggtggaccgggcgcacgggcgacggttcacgggaacggacggccgagatcaaccctatccaaaacggacggctgagatcgatcggtccacgaccggctcacgggaaaagggacgatgacgccagcgatgacgtcaccgacagcggcggcggctcggcggagcggacagctcgggcggcgcacgctcgccggcgaacggcggcacttcggcacaaacggagggcaccagcacgtagaggacgacgcggcgaactcaccggtgaccaaaacggcggcggaagaccaacggacggcggcggcgacgaggaggaagcggcgaagctcttcgggtcgacgacggcgacggcgctccgacggtcttcggcggcggcgaagcggtggacggggacagcgatgacttggcgaacccgatggtggcgacgtgtcacgcccagaaattctcgaaccagaatttctaagctgaatgtgcattgaatccctgtccaggaccagccagggtacacaaacgacaattgttgacatacagatccacgtcttacaaaaatagaaaagattacaaatgcagcggaaaagataaaagcgagctaaaccgggaagcttgacttcagcagcgggcgactccactccacagacaatccttgacggcagcgacgaaaccaaatttgacaaaacagctccaactaggaaaatcttcagctctggtgtgggggaaaa

SEQ ID NO: 7283 - DNA, 46272 bp, Oryza sativa
  unsure (1)..(46272): unsure at all n locations
ttaatatattgtgacatgtagaatccaagaaaaattccacatgccgattccgattattatttgcatttattaattagggaattagctctaggttaattaagataatttcttcggacgatttatttagccaaatttttaaagcaagcaaaaaggggaaaacttcagggcgtgacacgacggcgaccgacgacggcgactgcaacggcggcgcggcgcggctgaaccgacggcaacgacggcggcgactagggctacgcggaggcggcgctagacgcgacggcaggctaaggcaaaggaggcgacgggtagaggggagctcgggggtccttatataggtgcaaggaggcggcggcaaaggcccacggcggccggcgacgagaaggaaagctcgcggcttgaaggaaagaggccgatccgaatcgaactctattccacgaacttccaaaacgatttagccgatgtttccaaaggagaaaaggtagaggagatcccggagattgtttcccctcaatcaattcggccggagaaggaaaggagcggccggatttggaaggaaacggcgacggcggcgcgctagggtttcgggcggcagcggcggctcgaggaagacgaacctgacaggtggggcccacctgtcagcggctgagagagaggagagcggcggctcggcggactgggccggctgggccgagggaaagagagagaagggttttgggccggctttcggcccaaagccaaaagaagactttttaaaacctttttcaattaaattatttcttaaatgcaattccatttattaaaaatacttccttagctcaaataaatcccagaaaaatctaggaattatagaattaagcaaagtatttaatgaaattttatctggcccctttttatattgagatttagcaaattaaaattagatcttctcttttaggcttttaaaatcatttctaattattccttttaaacaacaatttataagttaaggatttttaaacaagaaaagctcttaacaattatacttagatcattaatgatcaaataattactgaactgttctttgtattatttaagaattgagctctgaaaaaaaaccgagaaaatttcagagagttgacttaaccatggagaatttaacaaaaattaaatccatccatgctttagatttaagaaatttttatttcccacattttacttcacttgaaaattaaagatcatttaatataaattctattaataatttattaaataatttataaatcctgaaacgaaaatcaggatgtgacaagacatgaccactctttcatgacttgattgacaaccatctgagagtctccacagacgattagtcggcgaatacctagagatattgcaatcctttgtccatgaagtagcgccttgtattccgccacgttatgggacgcagaaaaatgtatccacaatacgtagctcaatctttctccagtcggggagattaaaacaaccccagctccagtgcctgtaagcctcttcgacccatcaaaatacatagtccaatattccatcttttcctctggcatgtcttcttggcactcggtccactcggcaaggaaatcagctaaagcttgtgacttgatcgaagttcgtggcttgaacgatatgtccaaagacatcaattctaaggcccatttcgcgatccgtccgtttgcttcgcggttatgaagtatatccccgagtggaaacgatgtgactaccgtgactgggtgactttgaaagtagtgagataatttcctaacggtaattaagacaccatatagtaacttttgaacctgaggatatcttgtcttggagtcggctaaaacctcgctaacgaaataaattggacgttagactttttgaacatggccttcctcttcacgctcgacaaccaggaccgcactcacaacctgggaggtcgccaacacatataacagtagcggctcttgcggatgtggcgaggccaaaactggtggagtggtgagaagtttcttgaagtcttcaaaggctttctgtgcttcgggtccccactggaaattgtcagtcttctttagcagcttaaagaaaggcatcccccgcttgccgagtcgtgagacgaaccggctgagcgccgccatgcaaccagtcaacttttggacgtctttttgggagcttggcggtttcatgttgagaatggcgttgattttctccgggttggcctgtatgcctctttgagataccataaatccgagcaatttccctgacggtactccgaagatgcacttttccgggtttagtttcatcttgaaagcacgaatgcttgtaaaagtttcttctaaatccacaatcaggtcatccttctgcttggtcttgacgactacatcatcaacataagcttcaacattgcgaccgatctgagttgaaaaacatctttgaatcatgcgttgataggtcgctcctgcattcttcaatccaaagggcatggtgatgtagcagtaggccccaaagggcgtaataaacgaggtcttcaagcagtcggattcttttagtcggatctgatgatatcccgagtaacagtccaagaaactgagtaacttgtagccagccgttgagtcaaccacctggtcaatgtgaggtaacccaaaagggtctttgggacaagatttgttgaggtcggtataatcgacacacatgcgccattaccccgtctttttccgaaccaggactgggttagccagccagtcgagatgaaggacttccttaatgaagcctgctactaacagcttggttaattcctccttgatcgcatccttcctgtcctgtgcaaaacggcggagtcattgcttgatgggtttggcgtcttcgttaacaagtaaagagtgctcaatcacctctctggggataccaggcatatcggatggtttccacgcaaaaatatctttattattctgaagaaaggtgatgagcacgctttcctatttacaatctaactcagcacctattacaacagtcttatcaagatcggagggatctaagggaatcttttttgtcttggcatcactttcttcggtcttcgtcagcttggttgaaggcacttctccctcgcttgccgtggtcgcagccagtcggatctcttcgcgggcgagagtagtctcgtgagtttgggccatctcgcaactttctttgtcacatgtgacggcttgcttgatgtcgctccgttgtgatatgacccctcgaggaccaggcatcttcatcattatgtaggtgtagtatgggacggccatgaatttggctagagccggtcgtccaagtatagcatgatatgctgtctcgaaatcagcaacttcgaaacaaacattttctgtgcgaaaattctcccgagtgccgaaggtaactggaagagtgatctggcgagtggtatagctgacaatcctgggataacaccgtggaagggtgcattactcggctttaattccgtgcgaggaatctgcatatcgtccagggtcttagcgaaaaggatgttgagtgcgctgccaccgtcgatgagagtccgtcggagcttgacattgcgaaccactgggtctagtaccagggggtaccgccccgggtggaccactcggtcgggatgatccgagcggttgaacttaattgttatctctgaccaccgaagatattggggcgtgctaggctgaaccgcattgatctcccgctctgttagcttttgttttctcttagattcataagccaggggtccgccgaagatgtgattaagttctttgcgatgatcttgaaaaccggtcggggcatcgtcttcatcatctttcttctttgatgtgccttgatctccgtctgagggtttacgtgcgttcttaacgtattgctccgcgaactgtttgtagacgaagcaatctttggccacgtggttggagttgggatgatgcgggcattgggagttcattatcttgtcgaaggtgttgacacgagaacgttgtcgggaagatggagaggtggtcgccacaagttcttcgagcttacgcttgcgatccttgtggtttttacttccactccctcctgcggtcggcgtatccttctttggcttccaagtggtgcccgactgcttggatgtcgtgatagcatcttcggctttggcatactcattggctttttcaaacatctgtttgaccgtcttgggaggtttgcgtccgaacttgtcgactaggtcctcgtggcgaatgcctttagtaaaggcggcaatgatgacgtcgtcggtgatgtcggagatcttgttgcgttgctcagagaagcgtcgaatgtaatctcgaagagattctccagacttctgaacgatgttgtagagatcgaagtgtgtgccgggccgttcaaaagtaccttggaagttggcgatgaagtggtcgcgtagctctgcccatgatccgatcgtgtcgcggggtagcccgtgaagccatgaccaggcagaatccgctagggccacaggtagatagttcgtcatggctttgctgtcccctcctgctgcgcggattgcgagaccatagacggtgagccaagactcagggttagtggtgccgtcatattttttgattccagtcggcttaaagccggctggccaatccactcgacgtagatcgcttgtgaaggcagcaactccgtccacgttgtcgtcgtagcgatccggtgaatgatggcctcttgctgtgcggcgctggttgatggtgtcgcgaagatcgatgggacgtcttcgatgtggggagtgtggtcgttcaattcggcgctccctatatcgctcgggaggcgagcgaacggaccgttcatcatgtcccctgctcctgcgactagattcggcgccggcaatgctgaggcttggctggtgatagtcttgagatcgaagatgagggactcggctaccagtcggggtgcgggtgcttgcagagttggctgggaccgaggcagcgatcatggtcttcgtctggttcaagatgttgactacatgatcagcttggttgagtgcgtcttccttgaggagggtgtcgaggagagtgattgctgcaaccgcgttctgttggggggtgcgaaagaccgctatcccatcgacgtcttgttgcccaatgagctctctcgcttgccacccagattccaaggcgcgttgtcgtcgatcttcagcctcctttgcaatccgttcgcgatcttgttgctcacgctgtagtcgttctcgctcttgtcgctgtcgctcttcctccaatcggcgacgttcagcttcttgccgtgcgcgatcttggtccgcttctcgggcttggcgctgttcctccgtttcgttgtcagccatgaatacgccgaagaagaggggcgtgtagttatccttatagctgtcgtcgaagttgtcgaggtcgccgtggtcgtagtggtagccgaaatcgtcgtagtcgaggatctcggttggtcgagaactgacgccgggggagctgaggtagccatccaactcttccgtcgagactgtcccgagaggttggagtataacgccaacctccctggatctagatcggatcggggccgaagccggagctcgcctagatcttcgagtgggagatgtcttgactgtgaagacagcggccaaatcatcaggaagtttcatcaggattgagggataggacccgtcgtcttgatctggtcgcggaagagtagattggatctcatccgagtggtttgaagccgactcgggagagatgatcttggagtaggcctcggccgagttcggaataccgaacggcacagggacctggtctctccccgactggtttgaatccgagtcaaggagagagatcttgccgaagtcgttggtgatgaagttgaggctgccgaaccggaacgcctgcccgggaggaaaggcgaagtcgtcgatgccagaaacgaaacccatcgcacttagtcggcgagaacttgacgctacccctacctggcgcgccaactgtcgaagcaagatttcggcaataataaaagggggtggctgtcaagctaggaaaatggatgggtttggagacaagaaattttatacaggttcaggccttcttattaaagaagtaataccctactcctgtccggggatgattccgccgagtgtgttattaattgtatagactgggaaaaagaatcacctcccaagaggcacgcggaccctccttatataggggaaggagtccgctttacaaaatacagtccatatcctaacggaatatgggattatagataaaatacaatcgtaaccgactaagatcccgggtatttccttgacatacaagtttagaacctaacccgagtcttcatagagatattccatctatatttgataccgtatatccgactaaattacaaccgtcatgtagatatggggtatccataatctccacaagctggcttgtctcgagctatcttattgggtcacatgacggtgttaaattttgaaatagatctaaggaaatcatgcataagagaaaatagccaaaagaaaataaaagacacaaatccaatttttaaagacttctcaattatctatctcttaaagataaatatagagaatatccataataaaaggaatgccgagaagcaaatagaaggcataacatccagattgtaaaggcttcccaaaatatctttcccctttgcaatctatcaatcccatgctggttggttttatgccagctgattgttgccctcaacattctttagttgagcgacacgtgacgacatacaagcgtcgaaaagagagccggttaataaaccctccctataaaactggcaagcgttcagttacaacggtgaatagaaaaacaagagaagagttgttccacgtgtcgtgaccacatatcctatatttggagaaactaaaagcaataaatagaaaaactaaatgacataaacaataaactctataatcctgataaccaatttctaaatatatgtattttctgcttatactataaataaataatatgtagatctttacgctacaattataataaaacaaatattaattctggtgttggatttatacctagagttttatgtcaaatctaaacaccataatgctcaaaatcataaaagaaaaattgaaatattagtatattaactatatggtttttaaaagccatacacccaagctaattagtggacgcgccaaacggcgtcttgattttctaatctacattattggtgattagtgaacctgaactaaaatttcatgaagtgcctttttttcaagttcacttagaaacttgtgtaaatattgatcacctaaaatttcatatataagcatgcatatagcattagatgatacatgcctactggataaatagtgaaataatgaaaataagagtaattctgggtttaccagctacacgagctagctgacaccaaaacagaaacatgattaatcggttatcagattagccaagagataaagcaatccaaataaattttaaaaaatgaaaaaaagcaacaaaaacaaaccaatatggccctagggagatccaattgtcagttatatctatctaataacagacacatttttgacaattatgtgatgttgtacagttgcaataccaaaaacagatagagaatttgctggtgaaaaacttgaaacataaattgcaaattgctaatatcagttatgtgattaaatgacaataactagtggaaattgaatagcattgctgacagataacaattgtgttactgatcaaatggcaagattatagatagagaaaaaaaacagagactaagtatgacatacttctgcatctaggatattatcatacatagagagctttcagaataatcttgcaggtgtaaaattattgaaccaacaagatggaacattcaatcttgcagatcttgtgattctgacaagtaatcctacttctgtgacgctagaaccttgaggacagcctcatccgccagagcactgtagttcggtttcactgtagttcagcttcaggttgtcgtaatcctgtgttgtcatggtggctgcaaattttcctgggcccttagagaaattcgaagcatgcagcgttcttcaagccggagcatccgtgttgctaggccaagattaggatgctcaccacgctggccacctcgatatgtttacaaagaagggcttctcatagcagcctccatcctgtatcgatcgggccgcgatgaggagatgctcggccatggcgcgtccctcctcgcgcctgctgcatctgcggcggcaatgagtctatgtaatagtgttattacagtgcgacacagctaggatgtaatggaagatggagcctcgaagtattgagcccgaggtccgccaattaattattttgaaatggtccattaattggagtcagactgccaatttatatatatgttgggctgagttacacctcagcaatagcccaatccgattttttttttcgtttcactccttggcaaagtaactcgcaacccattggcagtgatcaagagttcatgactttttgcatttaggttccagagttttcatgttttggttgcatttagattcctgtgcgtgcttagcctaaatatgtactctccttgccttttgtcactcctccgacggtcacaagctgccaccttgcctcaccatgaacctcctccctgcacgaactcctctccagtctccactccgccgaaagcacaacctctcaaatcgtgtttaatttcccgctgaatgtacgttgctgcaacaatagcaaaaaagttcccgctagatgcacgcctgctaaatgcaacggtttgttgggacacaggtcaagattctgataagcagttgatgaatagtcaatagataagaatataagcattatcgatttttagcttctactttactttctgcattagctagaggtgctagacaactagagaaatcggagcatgagacgccccaaataaatagcttcaatatgcgtttcacaagtagttaaagtggtttatgtgaggttgtcgtccaatccagtttcattattggaggtcaatttgaggtgttagacaagttcatgcatgtgaggaggaaagtgcaaggtgaattggatagaagcatacccaccaaccgagtatatgggggcatcagatccagcacctcgagaaatcttccagagcgatgcgcctgagatggttatgacacgaaaggagatctccgaaaaaatcataagtgggatcacaaacaccatgagaagatgctgacatgctcttgttcgctgcgaccaccagcggacgtgggtataatctgtttatgggatttggcatggttgtaaggatagaggcgaaagaatataacaccaaaggtccacgcaatttccagaaagaaaaacagaacacataaacaagaccacataaggcagcgtgtgacagcaagatcttgacatgcgaatgaatgaatgcatgatagctaacttgctagatcaacttgtaaacttatggaatgtagtacaagaggtgcagctcatccccgatgatatggacaaaaaaaacttggaaactcacaagtcatgaggaatacatgacggcaactgcctacaaaacataatttaccaaccccccccccaaaaaaaaaaggcgtttgcctagctagtaatacaaaactaaatctgaacatcagacaaagtatcaatctgagaatggacaaacaacacatactgccctctttgccccctacgttagaaacatccttccatctactcacgaatgtagatacacgaggaaaatctaagacatgctgacaacctagatctcgtgggaacaactcgaacaagtgaagcctattcattgaaaaacatgtacaaacatacatgagtggtgggaggcgctcgcaacttgccttggggaacccaagcaaggagtttgctccctcaccctcctaacaaacttaggaactatggaaggaaaatatccataataacctccgttgaaaatcaaggaaaaagcaataacttagacttttgcaggggtgaagcgtcaagctagcatagattttactctaagcccttccttgtacaacccttgtttttcatacttgtacaatataaatttttacatgtgttatatatcagtaaaagttgtcactaaattttactattagagttatcgcacgaatcatgcaatttttttcttgcagcacaatggctgagttgaatgctgcaagcttgcaacacaacatgtaaaacttggaagtggatttttatccctcgagagaacatcacatatgttttgtgcatgtcgttcaaaaagttatcagaaaatttaaaaaaatttatcaagatagataatatatgatatatcttttcgcaaacatgcgagttaaaattcgacttatacaattcgaaacaaaaataacaaatttgaccgtaaattacgtgttatattcatagtcaaacttgtttttttttctacttgggccgagtttagttccaaaatttttcttcaaacttccaacttttccattacatcaaaactttcctacacacaaactttcaacttttccgtcacatcgttccaatttcaaccaaacttccaattttggcgtgaactaaacacacccttgtataagttgaatttgaatttgtatgtatgtgaagtgatatatcacatatttatctatcctgctaattttttttaatttttaaattttttgatgactttttgagtgcatgtaaaaatgagaggatatccttaagggatgaattaagttttccgtaaaactccaggtatgaacggcttggatgccggccaaaccaaaccgtcgttgttcgtgtgctgttttgcagccgctgtacgagatggccttttcactttccagcataaatagaagccgtcaaatgccggcgtgcgccagtgcgtcgtcggacggcaaccccccgaaagcaacgtcactgtggatattatgggtaccccatacccatacggcatggttatccgactagtcataggggataacttatatctatggaatatgtaatagatcatgactcgggtattacgtttccttatatattacggaacagcctaaagtcctggtttgataatattgtaaagtagatttaggaaaccgataccgtgttggttaaggtttctatcttgtaatcctgccccccatcctatataaggtgggcaggaggccctctagggggcaggagacaacctgatcgtcagatctatactacacccggcggattcaaatccccaaacaggagtagggtattacctctcattgagagggcctgaacctgtctaaatcctttgtctctgcatccatccactttaggtctcgtacgctacccccttttattattgccgaaatctagtttcgacagtcaccgactgacagacagcgccgtgttgcagtgcagctgctgtgcgatcgatcgaggtggtgagaccctcccatccccgccacctcgcagccaccgggccgcccgcccggccgcgccccccgatccctttctccctcatcatttcgcgtctcgcgcgcagccgcgctcctgcaagcaacgtaacgcaacgcgcgccgcgaccgaaccacctaactggccacgcgcgcgcgcgcccgcccgcgccgcgtcggcctctccgaaccgcgcacacaaaactgctcgattattgtgagaccgcgagagcaagcgagcgatcgatcgatcagccagccaaccagcccgtcacgttcggaaaaacgggttaggtgccgcgcggccgcgcgcccccggcggattcgtggaaggaatcgcaccggagattaaaagaaaaaaaaaacgagcttcagaggaaaagacgtcctttcaaacattcttaagaaaagaatgtgagcatattgagaattagtaacattgaatattgggttacaattacacatatcttactacactatctggtacatctccgtaccggggattcatcatgcacgattcctcacttctctcctgccagccatcgcggcgccacagaatcgctgctccgtctcggtgttctgcctcctgtccatagagctagccagcccacgattttctgcctgcaccgattcgcgtgtttttggatactgatcatgtgtgcgatcgacaatcacccggctaaacctgtcatcataactgtgcctcgcacactcgggagactttcttccagcgtacgtagaattgtcctgcgtctcctgcccgcccatggaacgaagtacaacttgcgagagctcttgagaccataattaaccatgattagtcaaaggcaataattcgtgacactaatttcgcttcgtcgatgcgtggcaccgagtggccggcgattggctcggagtaaatgcgaggcaattgatgggttccttcttccctgcagtggtcctggctgaagaaaagggttcttgctgtttgctcttgtggctgctgtgacactgtaggtccgagagaacaatcataggtaaattgtctgcttcatgcatgataactcatgaattatggagttttgatcgacgtaaagggaaaaagatatgattattgccaacctggaattcgttcttatcggcacggattgagaagcctgaaggaacaggaatggaatactgtcaggttttgatgcgcattctaatgaaatattcaggtgaggtttgtaggtcggaattacttatgccgaagtaataatcgacaagtactgaaaaatgtacgcagaatatagatcacagttgaaacgagaatgatataccgtctgggctctgcattttcagacggaattttctgtgctgtatctgaaagcaaaagcaacagcctcatttaaactgtgaaagttaagcagacgacattcagagaagctgtcaattccatcatttcttcaagaggggggcaaactaatagtgccgtgaactttcagcttgtcataatgggaactaagctgaaattccctggtaattgcacagcttgattaaattttatataaaagtagaattgtatttgatatacaactcttgtttttttagttttataaatacaagtagattttgcatacaccatgatgatactaggattaaatggtacaaacatttctcttattctccaattaacgtggtactccctctgttttaaaaacggcgatagtaattttaggcccctcagagtaacagataggtaaattaaaggaagccactcatagttgcatacttgcactagtaatctccataagagcgaattttagattgaattatttgatgagctaagttcttaatttaaaagacagtatatatctacccttctctacaaataaattgcactagtaacaagtaacagcaatacatacttttccaatgattgagaagggcagatccaaattattaagacaatgactacaaaaaattgacattacattttcatgaaaaattttttgacaatgtcaaatctcacgtgccataactatttacttccatttataaaacaccaggcttcatatttttttcaaacaggtaggaaaaacagtattattgcattcatatttaaatataaatatataacagtaattttacttttcaccaccttttattactgacattttgctttggattaccgtttaacaaatattttgaactttggattaggtaatcttaccttcgttacactctgggccatattgactcacttctcaagcatataaacgatttcgaatacgtcggctcttactcgtcaatgaactcctatagccgtatgagagataatttctttactataatacaaactggatatatatatatatatatatatatatatatatatatatatatatatatatatatatatatatatatataaagagttaagggtgatccaaagtgccacaaaaggtaaaattatccggtttaaagtgaaaacattggtaaatgatggttcaaagtaaaacattgataataaaagtggccccaaagcgaaattcattcaatatatgatgatgttaatgtcatttggtatgtggcaagcaacttatttgaccactccttttcaattagaataaaacgataatgtctaacaaaattataatattgaaaagtacttatagagataaatctaccatattatttatatgtttttaaactaaatattttgagagctgttgattatcaaagttttaaaaatttaaccaaattagtcaatagtgtcacatatttaaatacaggagtagtatttacccggttgatgcgtgtagatcgacatccctaaagagaaagttcattccaatttgtggtaccgtaattaaggcaaataacatcacagaaatgggagaggatgcatgttcaagatgatagctaccctgatatatcaatctagttttccttatcggttatcatttcgggtaagctaccaacaacatctcttttcttttggagtatgctactaggaacaacctatgatgtatagtttgatgcatatgtatatacacagtggactaagagcatccccagcagctcttctatctagtcatccatccgatatttggagtatggaggagaaaaacaatgctccagcagagtctccatcatcatatgctctatttttggaggtcctccaaacctagcccttcctaagctaaatatggagctctctctcctcacttcatcctcaactacccactccctaagatcttttttaagtggtgaaaggtgagaggaataggagtaaaaatgtgtggtagttaaaaaatattagtaaaatataggatgttggtatatgtgggatgtaatatgaatgatctgttggagtaaaaagttatatagagtgagaatctttttggatggccatctaaatgagagtatggaggataaaatttagatgagctgctgggatgctctaaccttctcattttctctccactcttgtgaagtccgacagaagtttcggtgcaaaatttgaagggacaattcggcaaactcaacgtatcctatacgcatttgcaccgattaaaaagagaagtaatttggggcatagacttcgctgtcctagtcttcggtctgatgttaccgctgtaaacatcgaaatttataagtgacaattgacatgccgatcacactgaatttcttcctacatttctactagctaggatggcagaaaaagttcagaaaatcctgaattcttcctacagttctactgggagcagggtttcgatttcgaaattggattttatgcctggggtgaccgaaatgtaatttcagaaatttctggccaaaattatttgaaatttgactgaatttaaataaaatttgatcaaattcacaaaaaatgtaaaaaaactaaaaatttcggacgagaattgagcatgccggtggggggcgaaatttcaaaccctgactgggagtataggcagtataggacaagttcagaaaatcgttgaattcatcctactgttctactgggagtgtagctgtttagcactagttcagaaaatcttggattcttcctacaattccactgagagtgtaggacaagttcagaacatgtttgctctcaaaatatatgcatctcaaaatcaaatataccaactcgatcacactcgatcgtatcaagaattaacaggaaagagaaaaacttgaagcatgcgcacaattttcgtctctatgtatgtactctgcaataatccatgcgttcatgaactattcacatggtgccgtactgatccgtactgactatctaacgaagtagtaggtgctccgctccttggcggcggcggcggcggcgcgctgctgctgctgcatgcgcagctgctcgtggaaccacatgatgaactcgtcggcgcggcggtccaccacgccgagcctcccctcttcgtcgtcgtcgccgtccgcctcccacgccgggaacggcgagtccgtgatccgcacctgccgcggcgccggcaccaccaccgcgggccacgcgaccacgtcgccgtcttcgtcgtcgatatccgtcgtcatcgcctcggcggcggcctcctccttcacgtccatcagctcgaacagcctcgacaccgtggcggccgagccgtacggatccgcggcggacgaacggtcgtgccactgcccgtgctgctgcaggcgcagctggctgcggcgctgcgcgcggcggcgcctgtgcagcggcgtgctgctgcagctgaactcgacctcacggggccggtactggtactgcgacacggcggcggagggatccatggaccggcacgacatcgaggagagcccggaaacgcctcccgacgcgctgctgatgccgccgccgctgcgacggcggccagcgccgtgcgcgccgcggccccgcgggtacgggtgcaccgccgcggccgggtccatggacctgcacgacatcgtcgacgacaggtacgtcagcaacgccgggtgctcccgcaaatcgtcgaggccgtggtcgtggccaccgccgccatgccgcctcgaggacatcatctggtgcaggtggacgccgagcgcggcgagcttgggctggtgcttgccgagccccttgacgaggacgaggtacacggcgcgcaccacgcgacacagcttcttggcgctctcgcccgcggtggccgcctgcctctcctgatgatgctggaaccaccggactccatggcggcgtgctcgntggtgctcatctcgatcgaaaaaatatgtgtctcttctcttgtttttagaaaattccggtgatctcagctgcgatctcctggaccagctactcctctctctctttctctctgtgttcttcgcaaccaatgaggcttattatcagagaggagacgagagggagaggtatttaaagggggccagatcactagctgggcattcatgccaaagggaaattattggtgtacgtatcgtcttcgtattgtccctttcgtgtttcggacacatgcctgcttttttttttcgtgacgcgttcagttttgatcagtgtgatttagttggtggttttcttggtttattactggagctaactaaggcactatttagatcccgcccaaaaatttttaccctatcacatcgaacatttaaacacatgtatgaagtattaaatataggttaaaaaataactaattgtgtagattgcgactaatttacgagacaaatcttttaagcctaattacttcatgatttaataatgtggtgctacagaacatttgctaatgatagattaattaggcttaataaatttatctcgtggtttactgacggattatgtaattagtttttttattagtatcagaacacctcatgtgacattaatataatacctgatatgacatgctaaagctttacaccgttagatctaactaccccctaagctctaagcttgccgtgtccagaccggatctgataggtacgggcagtatatagatagctgcttttaaattacctttctggagacgctttcagaggtttaccaattgggttaatccgagtgtttaagtagtaaaacacgtgcatatatggcacttgcatatactgtacgcggcgataatcagttaagagagttgttgaatgacctgcgtagctgctccattttagtattactcttttccggttgataatatttgtcccggagaaaatattaagttattgcagaaacattgtcctaaggattttggttaggaagttgacaaatacaatgccaaccgctcgattatcatggctattggacttattgatccagtatatatcaattgagaaaccgttcgataaactcgtcaatttaaaaataatcaaactaaagttcaaatttgtggtaaaatctgtttgagtttaaccggttgctgtgaccgaacgattttctaatccatgttgtccagttgcatgtttatcaatgtcatacacctcaaataaccgcttaccatttttttcggccagatgtatatgactgtactaccatttttatttgttactactactagtttgcatagtgctcatttaggtaagtacttattttttttaaaaaaatgaagtcaatagagaaacaaataaagtggtccctttcatggttccatcatcaagctctaattaggtttagacatttggaaagctttttagtgttaagacaattagttaggatcttcttttagtgtcggacatgctggttgaagggaagaaattgtctagaaaatactcaatcattgcttgttttgggcccatagaagaaagggcaaatgaacttttcattaaaactggtgtcattagtccatacggacgggatcataatgaagaattgatgccgtattcaaccctgaaagaacagctccatgaacactcggcaaaccagtgataagatgggatcttaatattaaagacatttttgtcaaaatataatgaggaagcgttactaaaaaagaatatcaaggatgtctttttctgtctttcatgaattacaagtggaattttgatgtcaccagctggacaaatcaagtcactgttcattattgaaaaggttatatatatatatggactgcaatttcataacaggaaggagtccataggctgctgctaagggcctgttcactttgataccattttcaatattaccaaattttagtaaagttattaaaaaatggctatatttagtttgctgtcaaattttggtaactatataagaaatcctgccaaaattttggtaagtcattgccaaaatttgataaggtttttttttggcaccaaagtgaacatgccctaagtttgatatcactgtccaaatttaatgaggccccaccaattatcactgtccagctcgagcaaacagctactagtactcagctagcaaatgaacggcatttccatggtttagtattcggtatgaattaacttgtcattaatctggtctatccatggactgtttaacacttgcaagaaatagcaccatttactgcttttactgtgtattttccgggcctaattaaatactccagtacacgccacattgagatatttctaatccctgggatgtcccctgtacgttcccacttctcacatatagcacacaagggacaaaaagacctgttggctgtttgagtgtgttgataaagtttatgttttaaatttcataagatgtagtatatataatgtgccaatacgttgccccctttttttggtaaaatttagctatttttctggtgcaaggagtaggctgaatatctttgtaaatgattagaattttttttctttgacatggcttttgttttgattatgctcttctccatgagagagagagagagagagagagaagttacgtttgctcctaaattttgccgattctacaacaacatatagagagtatatagaaatcagaaaaatcacaattaagaagcaaaatttaaaacggccttccagtattttcaggggaaaaaacgaactctaatgaaattctccatcgacaacactcttacttgaaatatttatctgctttattaacaagttaagttgttatgcgactcaagagtgtactagagcaggttttcagttaatcacttggactaattccttcagtcacgatcagttttcatgcattatgcgtgtagtcttgggcaaaaagcgctatgtatttaagtccaaatttcaaataattagtactagtaagcattatacgtcttcatcagtgttgatcaaccggacgcgttgaatacttaaccaagatatttcctaattgacatttaaggctcggccatggacctagaaatgtgaccggtggttgatccactgcctgttgcagtaatcagcaggagatttagatagtgtttctccatgtgcctaacccgactacctacataagcctaacttagatacagtgtattaattaattactgtatatgtgtatttgttcggcaacgaattcagctaccagcttatcccacgtatctatcttgctgctgtgttttcagacacctaataattaaattgttagtccctagtaactattggatcataccaagttaaaaggttcgatgtgttttcgcctggttaaaagtatacccgtctggtttacttctttggagagactggttttggcgtggctcgttgagtcgttgacctgcagccaggtctactaaaccgttttaaagggtacagttatcatcacctcacgatttaacagtcaccctaaaataccgtgatgtagttttaaaatctgaaaagaatatatatagtaaatgatgcctgcatgagctcacgtcgatcttaacacggaacccaggggctcttgcctcttggtcgacgatcaagttttgcgatcgctggacgcatggcaggttgggcagcggagtcgccgaagtgaagcaatcgccgtgtgttggagacgcaggcgagtcgtcgtcgtcgtcgtcgccgcgccggatgagtcgactagctggcggctagcggctgcatagaaccaacgttgttcgggacttcgggccggtgactgaaggacgtgatcacgcgggtggtggataaacgggccgaggagattggtacatgggccgtagatgaattctgggctggaggccgcagctgaatatataagcccataaaatgccttcgtttcagcgggacgaccaatcaagggctttgacggttgttaattaaggaactatactagtactactctatgctgtgttgagtgtgattctttttattacacgaaacacgcatacgatacgcacgtacgatacatcatactccctccgtttcgaaatgtttgacaccgttaactttttagcacatgtttaaccgttgtgaaatatgtaaaattatatgcctatataaaaatatatttaacaatgaaacaaatgatagaaaaagaattaataattacttaaattttttgaataagacgaaagaacaaatatgtttaaaaaagtcaatggtatcaaatattttaaaacggaggtagtattttcgcgagtgcagcccctaacagatacttagaaaacatatgaagaccctgtaaaacacgtttagttaaacagaaactaacgacatacccctagtccattaaatttctaatcaaagctcacgtgtgcgtgtagtattatttatgggcatcagagtttagctttcgatcggtgaagtcatgtctccacgactcagtcgactctaccactacacctccgacgcttcctcgtgttaagtgtgattttaaatagcaaccgggttagcttggcttagcttattgtgtattaatgtattatgcgattaattggtcaattttttcaatacaataatttgagaaactatcgacgtaccttttgcatgaaaccactctcgtttcagtcacttttaaaaggctcggatcgtgttaacatttgtgtaaacataataaccttgccattttattcccctcccccttctcttgctcgcctcctccaccgccgctcccacctccccaccctcaccaataccagaagacgccaacagtagtaaagccccactagccattcttctccctctccccctcactatctctcctaagccacgaggcgatggggtaccccagtcccactgtcttccacatctctaatggctctcttgcccatcagagacctcgtcgcctcccctgcctccaaactactcaggatgtagcacacccaccgtcaaccacatccaccaccgtcctccaaccccatggctcccccgccacctcccgtcaccttgtccccacctccccagtcgtggtcaccgctgccaccgctccctaccatggaactagtgggtgaagaagatatggaagccctcccggccgtgaccggccccagcgccaatggcgaggtgaccgtggaggagtggcagtggtgaggcacctcctcgcacgctccaagccacaatgaccaccataatccgtgaacttcttgagaggaggaggaggtgcacgcgaatggagaggagggtgaggagaacggactgacgggggtggggggaaggagagggggagcccgagggatcaaggacgggaggggagaaccgaagaagggggaggaaggtgcgagcggacggagttttttatgaggtgggggctcggcttggctctgtcagttttaattggtgctggtgttcttttaaaaaagagcaccaataatgttagttctttagaaaattggtatctataatctactataggtgtcggttcttttaagaaaatgtagctacagtattggtgtcggtttttcctttagaaccaatacctatagtgttcaaaggtatcggttctatatttctttatcactcgaagatgggaaaaggtccaatgaactggcacctatactcaagccgatacctaacctatactcaaatcgatacctataagggattctgtagtagtggattcacgggttgactcacttacccactgagatatcgataaagtataggcatcataatacataatcgacgaatcgaactaccaattgagttcctcccgtacatctgatgatctgaactgaacattttattattaggtatatagtattatgagattgtttagcttttggatgactactgtaactcgtcacctgaatcgaaaaagtttttcatccctcaaggggatatcttctcgtttcatgcatgccacctaaatagtaataaaagtatgaaaaagttgataggatggataaatatgatatatatcactacataaacatgcaagttaaaattctactttaacaatttgtaaaaaaataataaatataaatgcgaatgcatgataattactttaaattttcctttgttgcaacttgcagaaatcgaatttgacattgtatatttgtagagtgatatatttcatatcaatctatgttgtcttttttttgttatttttttaataactatttagatgctctaaaacttcttatattttagaacggaaggagtagtttgtaagtaacgaggggacgtcgccactacggatgaaaatccacatatatccaccttaatcaaatataattggctcctggcagagttgtttcaggctttgtaaaggaggggtcctctgatactcccctctcgccgtcgcagttatatcagtgatgaaaacgtaagtctctttatgcaaaaaccatgagcctaagcgtacggtggacactgcttacatcgtacacggagccgcatgcaagcacaagctagccacgcaacttggctcatcacaagaacttgtaactatacatcgacatagatgtgcccaccaccttaatccaattattccaatacaccatgtacaccactgatgatcacgtatgaccgtatatataaatatcacgtcaaatgcctgcaggctgcagcagcatctttcagtcactatatatgtatactactactctataataacttgttatatatacatatatacatgcataaatgcgtacatatgtacagatatatgcgtaaaagtatactactacgtaggacctgtataaggatgtgcatgcatgatcgctcgcgtgggcacgcgtacacgtatacgtatacgtaggcaatccgatcgttagacgtaggggagggcgcagctggtggagcgggccatggtggcggcgccggcgccggagcaggcggaggggatgacgtcggcgccggtggccgtggcgcggtgctggcagctcttgcgggcgatgtcgcgcatggagcttgcgagggagagcttggggttgaggcggacggtggagttgaagcgctcgcagagcgcggcgtgcgcgtcgacggcgccgtccacggtgagcgccggctcccgcttctgccgctccttgacggcctccgagcacagcccgcacacccacttcccgtggaagcgctcccgcacccgcccgatgtacctcggcgtgcactcctccgccatcccgcagcactcgcaccgcacgctccgagcctcctgatccgcccccgccgccatcccgccgccgccgtccgagttcgacctctgcagcgccgccgcgccctgcatgcaaaccacgcaaaaagacgtaaatattagagaagaactaatatcaaataattaaaaggaggcttcgaatccaaatcatttagcccaccgccctaaaaagctagccgaaagatttcttgatatttctccatatataaaccacgtagagcacccatccgtcaccatgacataaattccatcgtatttatagacacaactgcgtgtacacgtctataggtgggtcggccgtcgccggcctagctccctccttgtcacgtacgtatagcagtcaccattcatcaccaacctcactaattacaagtacacagagcgagcccatcacaggtgattgtttacttgccattctgattgatggacctatcagcactaattctttgatgatagaaaggcagttttcacatactagctttaattaacaccaagtaacacagtataatgatggattatacgtgcagatcaatgatagctcgaatttgaagagggtcattagagcaggcacaatagcaggctataagccatctagaaacatattttatgagataatagaggagagagaagagcagcgggctagaaatctgtagccagctgcagcacggacttcaaaacatggtgtgtgtatgacaggtgggactatgtattaatagtatagtaaacaactattatatgaattgactattagattggctatagataaattagagttactagtgagctatactgttgaacttctcttaccgtggggggctcagcctgctgcctagccatagccaaacgccaaggcatctcgccctctctctctctctctctctctctctctcgaactttcctttcctaaataaagctactttaatcacctgctaatcaatgagctaagctgtctaatgtgtgtgcacaccaatcgcaagctgctaggcctaccacctggccctatttataggcacgagccgcccgaagcaatcgaggtctcgggttggtccggctcaggtccagtgtgcgcgcacagtgtctctcactggataaaatctccccacgaaaaccaatccatcttcgccaaaggggacgaaccacacccgcgccgtcgagctcgagagcaacttgggggatggatggccaatgtcaggttaaaagttcgcggaaaaaagcgatcaaaatatctccatgctgcatgatttcgcctgatctgtgttgcggtttttttcccagaaaagtgcaccggatcgatccagcacaggagcggatcttttcaagcggccaaatgggcagccaagcaggttaactttctcgtcgattaattttactgctactgttgcatggagtacgattcaggataccagcaactgtcacatacagcagcgtgcacgcacataatcgtctctaccctaaatggtcgatctgttcatccatgcatccaattaagtaagtggcaaaaaggatttattaatgtctgaacacatttatcttgattcttttcggattacggtttcatctgcagagatcgactgcacgcacacgcttgcacatggtgcggcggattggatggggatcgattgatcaagcgggttgtcgaaatcaaattaatcgcgcgcgcgcgcctgtgagcagctcacgggatgcgcatcgcggccgccatcgacagagctccatcgcctaacctcatctccggcaacatgacgactacttttcctctttttcgcctccctttcgggtgcgggtcatcgctcgccggcgtacatcattcgatcgtccgcatgtcgccggtgatttcacctccggcgccgtacgcctagctgaggcgattcaggtgagtgtgtcccaagtggatattgaaccccagcaattggtgatactaactaataattagatatctaaataaagcgtaggttgctgcgcaagatctgcgtgctctttcttgcatgtggagagatcgatcgatatatacctgcgtatgtgcctcactttactagctagctatacgtctcagtactttcgtacgtagtatgtaggtagcacgacatattagcaatgtgtgttgacgatggtccgatatatatatatatatatatatatatatatatatatatatatatttttccattgttagatgtggcaaataactatttaccacatggattcacatgtcatagacacatgacatgaggatccacatgtcattaacacatgtgtggcaaaatagttaaacgccaaatctaagagtgataaatagttaaatgtcccgtaacttctattaattataaaatcaatctatctattgaaagatagtaatatagtgaaagttaaaatttgatggtcaacggtgacaactgacaagcaaatgaaggcggttggagtaattttgtgtaaatactcacatatatgccgtagattctttttttgcaaaagaagataactgtgttgcttaaggagtagcctcatatgatttttttttttgttaaggagttgaatccctgtactcatagcttactgcttcaaaccattatctttttcttgtagcactttagttagttttgttttgttgcagatatatggttcactcttgtagcgatggtgtgtggtcgttagtatcggatctcaatatggttattagctgttgtcgatttctgtagtcgacagagaggtttgtgagcagtatttggtagtgggtttaaggttattgtgggcacttgactaactagacaaagaacacaaagattttttacacaggattagacctcctgaatgataatacggctactcctatcgaaatgtattgagagggaaaaaggattacactttgctcatgcaaggatgttatgcctctctctctctctcatgtgcaaaagcacctattattgcgccacaccaatgctagcgtcgttttatttacattatcctaccttcttcaccttctatcatatcgacaggcgtactgcttccaggcgtctctaactagtcattgtctcgagttgtgttgtacgggacatttgctttcccatctaactggacaggggcaggtaatgatgtatgttatgggtacacgggatatgcttgatcacctgtattttatgtgagaagacttgtgatagacatacgtatttattgtggaatgacaggatgcttaagtgtacattacattctatactcatgtcttgaccaagggacctatagagagacggtgaacaccactactagtagtcgcgaagaccactggagatcagcaaagactattagagatcactgccagcaacgcagagaccatcggagattagagggaccaccgccatagtcactgagatcactgctagtggccacatagaccactttcatgtccacgaagaccattagtttattagcaaatcctgcctattccgagaagagtaggaggcgcatagggcatcttctcacccatgaccctagtagttgtttcgaagattatcaatctcactctatgtagaaaagatataggagcaaaaaatgtggcatgcatgctttaaattaaaatacaatatacacttatgcaccagggatggtaactaatggctgtcaaagttttcttcattgtttaaagaaaatagaaaagacaaataaaaggttgtttcaaatgaaaagtcaaactaattaaggtggtggatatgaattggagcatgaaacttttgttcttgtcacaaaagtacggcccattctcaagtgctcaaatttaggcacttctgtatgcaactttacagtatttttttataagatacggtttaatttacataggaataggaaaaactccggtgtttcaaagcagaccttcaattaggaacatgtttgtttttgccattgcatccatgttccatctgttacctccttgcaacttaaaaaacgacaaaataatccattggcaaaaaagtaactgttcctaggtagcaagaagaaaaatcatcggaatatgaaagttacacgcaatgtacaacttacagcagcatgtataataaaaccaacatgatctagtaattctatactaaaataggaaagtacaatatacagcatgtacaagacttataacgtgaacctgttcaccacttacattaccatcacacacactgactcacacagttatacagctcatgaacaattaaaacttgatgcatgcagcagtgtactaacttgacaaataatgcaagtgcctctctgccgttgtgtcacctactcgcctgcattctagtacaagtctacaagatttctactgtacatgtactccctggagcagctgtgccagtgttggttcattatgttgttgctagcaggaacaaaaatgtgttgtgttgatcaatgttcccggcaccacttttatcgcgatgacacctgcaggtataggctgcagtatgcatgcgacggtagtaattaaggccctgtatagatgggactaaaacttttaagtccctatcacatcggatgtttgaaaattaattataaatattaaacgtagactattaataaaactcatccataatcttggactaatttgcgagacgaatctaatgagcctaattaatccatgattagcctatgtgatgctacaataaacattctctaattatagattaattaggcttaaaaaatttgtctcgtgaattaacttttatttatgtaattagttttgtaagtagtctatatttaatactctaaattagtgtctaaagacagggactaaagttaagtccctggatctaaacaccacctaaaggctgcacacaattcatgtcttgctgttgcaagctcattcttcagttctgagttctctggctcgcacatggtaagcatgcgcatgggatactaagcttggcatcatgccatctaaataagtacgcggagaaatgatatgtagatggaaagaacatacctcttccagaatggtgctaaataaaaagaggaaagtagcacacacacaaaacacctgagatagataggacatacacatcggaaagataggttcgcccataggaaagacaataccgctctaaacaagttaggtttgtgatgtattccgtccatggtattttgatcatctaaaaggtatcatgttaaggtctaaaagtcgagctatagtcttgtcaatgttgagttgaaatcaacggtcaataaaaaagtagacaacttgtcccacacaagttgagataagacacatcttcgatatcatccttatgaatgataggtgtttttagcggctatgatattgatagtgttggccgacctaataattatatatatgatcgacctacttatcaagcaaagaatatgtaggtccgtgacatgtatgaatctgacaggtacttttgtcataaatagacttggatacgatacgtgtctttatttaacaagcggctgatatttcaacgtacaaaacataaagtgtagagtagaatcacgagaagtatgaagtggaaaatataacaccctccttacaattactttttttttctttctgcaggttgtcacatgatataatagatgtttcaagcatctacaaaggctacaaccctcggggtaaagaacccattgtcagtaaacggagtacaaccccgttacagagccataggagtcataaaaccgccgagataatacagaaatgggctttctgcacctgggcctgaatcagaagccagaagaaaggctgtgcgcagatggagaaactaaaaactttgtagtgtactgtgtgggctatgacagcctctcacagcaaattcgcagtatctcaataccaaagacattgccgtggcccaggttttagacattgccgtgacattgatcgttatcgctaaaaagaagaaaaaaaacggacaactccatttactccttacctttctcggttcacatgcggatctaccaacgacagcgaggaccctggttaactgttcgtgcctgctgcaaatactcctcgcctactcggtcttgttgctccatcaggtgatcccatggagtggcagaagaaatgagaagcaacacgctgctcctgctggccggttcagtggacgtacgacgcaaccacgtaccggtgattactgtacgtatatatgcgtagtaaatgccttcacgaaggcacggcaaggtggcacgggaaagatcaaccagtgtcacgaacgccggtgcaactaggcggcagtagctgcctgcgcgcagcaacccagtcagtcagtcaccgcgcgtggcgtgacacggtgtacgtgctcggttgcggccgtagctcatggggttcttgccggcccccggccgtcgcgtgcacgcgcgcgcggcggcagacgcctcgatcatcgatcattcatccgtcgacggcgacacacggccgcccggcctgcgctgccacacgcgcgcggtgcccggccgactgtgacgcgtgtggattgggcacgcgaggcgaaacgtaaggtggaacgcgccgcgtgtgcgtgcgcgcgcgggggacgcagcgcagcccgggccacttggccgagccgcgcgtcccacttgggcacttggcacagccgcgcgcgtgttggagagttggacgccgccgtttcacgggcgacgggcgcaagcgggcaatttgaatatttgatggtgcgaagcactgttgcgtacgtatatatgcgcggctcagaggctgtttgcgcgcgcggaattacatatgtttccatctggaaaggataactatgtactagatcgagtatcagtgagaggatacgtactcttctgctgcttcctggtgtatatgtcctgtgttgccgccttgccgggccaactgttatcgtactgtagtctgtggaatgtactccgtacattcatcagagcaggtacaatagcagcagactattagccagctataaacatattttaatgagataaaatatgaaagataagagcatcgggctacagatctatagccagctgcagcacggacttcaagacacaatgtgtgtgtgacaaatgggactatatattaatagtatagtaagcaattattgtatgaattggctattagagcacccgcaatggtaaaagaaggtctcagtaatagactagattaatagtaaaccacctcaatagtatgtctacataggtatctatagctctatcatgcattgccttgtttttctctatagactatctctaagttagtagatagctttgctctctttcttcatttaatatctttcaagtagaaaaatatgctgacatggatctcttgtagagagcttatagataaccattgtggatattcttagattggctatagatgaattggagctagtagtaggctatactattaaacttgctctcagtgtttaattccggggagataaaagctggaaccgtactggttactggtttgtagaccagattcatcaacttgcttgctgcatggcagtaagccagtaattaatggacgttaatgtgttgctcatcgcttactctaccaccttgctattcccaggctccccgctatggatcatgcccaacaatcaattgattataaggaaattattttaaactctcgaggatacatcctctgcttatttacatgtcatctaaatagttataaatagttataaaagaaatttttaaaaaatcaacaagatagatctatctattatattatcaaaggaatagaaaaaggagcctccacgttcgctctcatggtctaaaaattctcacattaatcggagaaaaagaaaagtcagagtccatatagaaatacaatttagaaatagctgaaattcggaattaaaaaataaggaatattagaagaggagactagagtcaatatagaaatacaatttagaaatagttaaaattcggaattaaaaaataaggaatattagaagaggagactagagtccatatagaaatacaattagaagaaatagttaaaattcggaattaaaaaaataaggaatattagaagagaagactagagtccatatagaaatacaacttagaaatagttgaaattcggaattaaaaaataaggaatattagaagaggagactagagtccatatagaaatacaattaggaaataactaaaatttggaattaaaaaaattaggaatattagaagtagagtatagattacttatagaaatacaattaggaaataatagaaattcggaatgaaaaataaggaatattataagtagagtatagaaatacaattaagaaaaaaaaatagaaattcggaattaaaaaataatgaatattagaagtagagtatagagtctatataggaatttaaaactaactaaaattcggaataaacataataaaatgaaaagtagtgtttagagtccatataaaaatacaatttacaaataactaaaattcgaaattaagaaaaacatgagaagaagagtttaaagtcaatataggaatacaatttagaagtaactgaaatttgaaattaaaaattaaagattattgaaagatgagtttagagtccacatagaaatataattagaaataataaaaattcagaattaaaaaaagaaatattaaaacacaagtctatagtccatataggaatatatataatttacaaataactaaattttgatattaaaaataattaataactaacacgtatataaaatacaatatgaatattacacattagttgtttcgtaaagttattgcaaaatttaaaattatgttgtcattgtaatatattttaataatataatgagaaaacatatatgttattatatgagagaaaatataatgatgctaaccgcgcaatttgcgcgagccaccatgctagttatattatcaaaggaatagaaaaaggagcctccacgttcgctttcatggcctagaaattctcacattaatcggagaaaaataaaaagcagaatccatatagaaatacaatttaaaaatagctgaaattcggaattaaaaaaaataaggaatattagaagaggagactagagtccatatagaaatacaatttagaaatacctgaaattcggaattaaaaaaaggaatattagaagaggagaatagagttcatatagaaatacaattaggaaataactgaaattcggaattaaaaataaggaatattagaagtagagtatagaatccatatagaaatataattaggaaataactgaaattcggaattaaaaataaggaatattagaaatagagtatagagtccatatagaaatacaattaggaaataactgaaattcagaattaaaaataaggaatattagaattagagtatagagtccatatagaaatacaattaggaaataatataaatttggaattaaaaataaggattattagaagtagagtatatagtccatatagaaatacaattaagaaaaaaacatagaaattcagaattaaaaataaggaatattagaagtagagtatagagtccatataggaatttaaaactaactaaaatttggaataaagataataaaattaaaagtagagtttagagtccgtataaaaatataatttacaaataactaaaattcgaaattaaaaaaaacatgggaagaagagtttaaggtcaacataggaatagaatttagaaataactgaaattcgaaattaaaaattaaataatattgaaagatgagtttagagtgcagatagaaatacaattagaaataataaaaattcagaaataaaaataaataatattggaagaagagcataaagtctatatagaaatacaatttatagaaaattcaaaatttaaaaaaagaaatataaaaagacgagtctagagtccatataggaatatatatataatttacaaataactaaaatttgatattaaaaatgattaataactaacacgtatataaaatataatatgaaaattcagaaataaaaataaataatattggaagaagagcatagaatctatatagaaatataatttatagaaaattcagaattaaaaaaagaaatattaaaagacaagtctagagtccatataggaatatatataatttacaaataactaaaattttatattaaaaataattaataactaacacgtatataaaatataatatgaatattacacattaatagttttgtaaatttattgcaaaatttaaaattatgttgtcattttaatatatttgaataatataatgagaaacatatatgctattatatgagagaaaaaataatgatgctagccgcgcaatctgcgcgggccaccatgctagttaatagtatgtgataaatcactctacacaaatgcaaagtcaaatttaacttctataagttgcaataaaaaataaatttaactgcgaatatacattaaatagtcatagtttaatttattttttttccttacagtttgtagaagttaaattttaacttacatgtttatgtagtgattcatcatatattaatctatcttagaaattttttaattttttcataaccatttagatgtcatgcaaataacaaggggatgtctcttcgagagtttagaatccactcccttattatgtgtcgggctatgtgcttacatatgtgggaataaaatcatattgccctctcttaacttcttaactatgcgttgagcttgattcgctctcattcacaaaatcacatataaaggctcccttaactactattataatcatgtcaattgatctccctctgctattttaaaagagtttttggttgatgtgtgatggctacgtgtcacattaaattctaatctttatcctacatggtgcttatgtggtatcaaaattgaaaaaataaatataggaaccacttgtaagtcaccaacctttatcttctttctccatctgtccaacttttccctatcctatattctctcttccctctctcccctctcacctttagacgggcaaaggtggtagaggggcggtaggataggctgagagggcgacaattggtgttcctcttcagtcgtgtttggcccttgtcatgctaaccgccgccttctcggccgatgccttaatctaccactgtgtcatcctagtaagagaagagagatggtgctcactgacatatgactccacactatattaaaattcttgtttatgattataatgtcttataagcgtcacgtggttgtcacgtaggatgaagattggtcaacgtaccacgaaaacgtcatgccagccgaacctgctgtaaaaacagtcgagggaggtcaattaacctggttgtaacaatttatggagtccgtgcatctgaatttatggctgagggagttaaaatgaacttttttgcttatgggatttgtgatcgtttttgcctgcggagcccatcgtgtatatgtggttggtgtctatggattgacatagaaccctttcctgattcctgacttgaatttgtttcatgtgaaaaattttagataatcgcctcctcttgcactgtcccaagtctcccagacgacgagattagagttgtctttctttacttgtacagcagggaccctatcgtttcccccaatatggaccaactgcggccatgtgtacaatcgtgccatgtcaacccatctttatgagttacgagtacctacactgttcatgcatgcaccaactagctagtactaccagtagtactctactcacaaaaccttctacgaaatctgcgccaaaaacgagaaccaattttcgctttcactggaaagagcgcgccgggccggcgctttgcgtgagacgaaatcaaccagatgcacatgccatccacggcctcctcttctcccttgtcaaaccaatttacttaccctgaacctgaaggccatccagtactccagcagtatgtacaagtgtcagctttggcaaagcagatgatacacactacacagaataggatggacacaagtgagcaagtgagaatgacgcgataggtaaaaaaaaaaccgaacgaattataagctttcggtggtcagatacgtacgcagcgaacgtccaaaaaagggcccaaacgaggtggtagatagcaccgcaccggccaagggaggtgatgtactgatgtgcctacgaatccatccaacgggagccggtccaaaacatttttacagcagagtggttggatctaaatcccgtccttgcaatcaccacctcccagtccccagtccccagtcccccacacatgagctaccagcagagtggctgctacaactacagcataatcctttcaccaactctggcactctggctgacacgctgggcccactcccagtgaagttatactcgtaaaaaagaatcctaagacgccgggggaggcatctgaccatctgttctttacatgtgtgtgtttttgccaagattctgatgatcacgtgcagctttttttgtttaacactggttattactagtagcacggttgcatgcaccacatttgtgtcactttgtgcgcaccagcatgcatgcctcccttatcataacattgatcgattgattcaccaccacaagggcacgatcatcttgctcaccaaaacacagacaagattggaaatcacgtgtaaagaagaaagtaccgggtgctttgaactaattgaaactgctcctgtttcctcttcttctaagagtcctgcattacaaaattcaaaagaaaaaaaaatgtgctacgaaagaaactcctcagagtctgcttctaagggggaaaaaacactaaaaatctcaaaaaaagaaaaaagaaacttaagaagctgagaaataaagagtaaccaaaaatgcggtttgcaggacaaaaaaaaaattagctgtttttatcgctgaattattcctgggctaatgaatagtttcctaggtagcctggcgccggtagtccgggcttatgcggttatggatcaggaattcgtccgcgccggcgaagagcggcgccgacgacgtcggcccgtcgaacagcagcgggctcgtcacgtggagcagccctccggcggcgccgccgccgcccgcgcccacgtgcggcggcggctgctggtggtggtgcaggagctgcatctccttctggcgccgcagctccaccaccttgcggtgggagttggagtgcttggacaccacgaacgtcgggctcgccgccggccggtactccggcacgagccgcccggacttgtaccgcaccccgcacgcgttgcacagcgtcttgggacccatgggccccgtcctccactgcggcgtcttgtccgtctcgcagtggaggcacctcctcccctccgccgccgcctgcgcggccgcgttcggcgccggcgcgggggacggcccgtccttcttcttggcggacttcgccgccttcttggccgggaatgccggcgccgcggtgcccgactcggacggcgagatgaccgccgacgccggggacggcggcgacgccggcggcggcggcaggaccatcaggcgcgacgaccagctgcacggcgcgacgcgggaccgcttgctccgcgccttccccggcacgggcgcctccgtgggcagcgcgccggcgcctcctgccggcagctgcaccgcggagacggccagagcgggcggcgcgcgcggcgcggcggggatgccggagatgagctgaagcttccggagatcctccgtgggcaaggtctcctcgcccatgtaggtggacacccattccagctccgcgagttgttcatactgcgtagaaatttcacatcagacaaccgtctcagcaatggcgctagttgttaaactcagtaaattaacaagatattgtcatgaaaattagaataaaaaatacagtggctaagttggctaagtggggcgagtggacataggatgctactatttttggacgcagatttcctcggttactatttactcggcaggatgctatttatgttccctttattcatgggggagttttaacgcggggtggtgaattttggaaacgaattacgggtgaattgtacacagttggccaaaattcattgaaaaatatgtgccatatttgcgacgccgcgacagtaatcaaataaacggaagccaaatttagccctcaccggctcgcacagcccgccggagaagtccccgtcggcgaggccggagaatgagttgctgcagctgtcgacggccgtcaccgtcgacgagtcggccgacgcgttcccggccgcgcggtcatccccgccacctccgacgacgcccgctcccaggccggcgccgccgccgccgtacgccccgcacaaccccgtctcctcctcctcctcgtcgcacggcaggtcgaggaggtcatcgacgaggaacatgtccccgctgccgccgcagcctccggcctccttcttgacacggaccccgccggcgtagtccgccgccgccacctccatcgatccctacttcaccaccacgcagttcttgaaaaccgaattcgtctatatctcctctcctttctacctcaccttttgctaatgcttattctttcatgattttctttttctcttctgtgcgtgcgtggagaaggaggcggagataacgtgagggcggagagagagagagagagagagagagagtagggtttaattgggaagcgttcgcgttggagagcggagtggaggacgacgaggaggaggggaggggagggagggcgagagagcggtggtcaggtcagctcgaatgaacgattcttaaggagtaaataaagccagagccactaccccttggggtgaaaacatggacgagtttaaaagccggttaaatccaaaatcccacatttatagcagtaatccttgggagaagacgacaactgtagtgtacaccaaaacggaaccatgtgatcgttgccaatgcagcaatgctcattgcatagtgatagtgctactatctctatctttactactataaaaattaaaaatattttcatccaaattttaatacatcttatccatatttgagtctaactttactattataaaaattaaaaatattatgtttgagtgatttttttaagttggttgtacgtcgtctgtatccaattcatcatgaaactagattatctattatacacctcctttcagtccaaccctcctcttagctcaacccaatcgaaccacaccatccgggcaccccgtcatgtgcaccaccacaacacactgcgcacccctctcctgttttttctatcttttttctcgttttctttttatcttttttcttttctcccaatcatcctgatcctctcctgctctttctaatggcctctctttactcgtccttttctctctgttttctccttttcttttatgttctaattttatattttcataaatatttttcttttaaaattataattgtttaaaatgtgtatgcgataagtttaatactttgcaaatgtttttcatttatagtaaaaaaaagacttttactaattgaacaattaaaattccaacctatggtcgatgaagtataacaaaatacccatgtatcaacttatgacattgccacccatcaatttgtgagactatggaatggtgtatataaggtattcttcgcgtgatgacgcatgaagcgaatacaaccgggttcaatactatatatttcgtgtgtttttctattgttttgtttgtcttattttggtttgtcgtataaattggtaaagtttttttcaatcgtaaaattgccttcacctgttacaatacacagaattttttttctagttagcatatatatgaggaattaatttgttttttagggtaggaattaatttgttgtagtgggaaaaaaatcctatacaaagacgtgtacacacgcgtttccttaacacatgctagagagatagagactatagaccgctgatatcactaaagaagcctttgtttggcacttagttaggggtaaaacaaaaaaaaagttttcatataaaattaaagagaaacaactcaacctccattgttggcataaagttgtatagcggatttcaggcttatctatattacacaaagatttgaaaagtgtattacggagtagttgttagagtatcgtgagtttgaattgtatttttcatatattagcaaaacagaaaaaatgtgtaactttgctactgtcctcaaaggagaaaaaaaaagaggggaacaaaaccattggcctactaagcaagccttcgcttagctcttagttagaagaaaaaaaatccaagtatattaaagaggaaaacaaccgaacttctattataagcataatgtttataaattataacaaaattttaggcttgtctgtattagccaaaaaattgaaaaaaagtgtgaattggggttatttgtgaggatggtgggggagaaagttctctacacagtgggtgcaaattgtatttcacattttttttcaaaaaaaaaaatctattcacgtattatcataacagaaaaaagaagtaactttgctactagcaaaaaaaaagaggggacaaaacaaaaggtaattttgctactgaatatgaccattgagcaatttcgttttcattaacgtgtggggctgactggtgatgcacaaaattgagcatggctgagctattgtgttttgtgcacttcaaaagggaacataatcatataaaaagtagcatcacatgtttggccatcatatcattcagtactatcatagacttatctactccaaaatgcacctatcaaattttgtgaaaaaaaaataaataattacttaaattttttgaataagaaaaaaaaattaatcaagcctaacgtggtatgatctgaagcattagtcagtgattactagctttcaaacaaagcccagtaaaaaaaagtattctactgtactatccatactacttcctccgtttcacaatgtaagttattctaacatttcacatattcatattgatgttaatgaatctatatagatatatatgtctagatttattaacatcaatatgaatatgggaaatactaaaatgacttatattgtgaaacggagggagtacgatgaatcatggaagcagtaagcattgttgcacgcagcacctgcacttttccatttactgtggtacggttaaaatagcttcaaaaaaacggtgtttattagcccccaacattagtagaagggaccagcgtccaggattttttagtagttgtagactggaccaacgtccaggatattgccacgtcgcgccacccatccgtaggatttcgccttcgtgggagacgcgcatgtcacgggcctgtctcgtgctaccacgtaggcaccacgtgggccgcccccgccgctaggcgctccgtggccgttggatgcgtacggcccaccacgtggccggcatcagagtgggctactgggctggattagataagagggtccgggccctgcaggctcaccgatcccgaggtggattggcctcgggagacgtgacaaatgctggggccggttttgttttctgtaaatttataattcctgacctcgggagcggtgatccaccagcatgttaccaccacgaacctctcaacctcatggctgaatcatttgcttaaaaacagtggcccaaaatattaccactgtgcagcacatttcatgtcttgtttacattggaaaagatcctaggaagtcaaaagtattcagtttttgtaaaaaaaagtcccagaagattagtatttggaacaaaagaatgatgatacacccaattcaattgtattgaaataggaattgccattgaatataaattttcaaggagaacaattgtgagatttaaccacttgttttttcccattcaagctgacaatttctccatgcaacttctaaaactttcatgtactcctttgttggtctagcgtgttggtatgttcacggttcagatacacttaatttttcaaaattttagcaacatttacacaactatagtatatttaaaatattcagtaacaaacgacatgatttttactctatatcttcctaggctctcacctagttttgttagggtagatagccaaacaagctattttgaataagatgtcgacaactttgtcaatttggtattgttccaagtgtgaaattgtatacaagtgtttagaatgttcctactacttatatgttctgaagatactgcaactaaacgcattaaaattaactctaaaattaagtactaaaatttattttttaattgcgtatgaaaagctaaagagcaagtgatgaagctgtaattgtactggtagaaaagatgtgctatgctagagtactctctctctctctctctatccattatataataataaaccaatttttatataataagtctaaacatatcccctctataaaaaacaatttatgactacaaatctaattgtaggttatatcgaaatctgtagctataaattttggaatagacgaaactagaagaactgtcacttggattaaattcaagacatctcgtaacggtggtactgtagaaaagtacgtactagtagtacaacaccttgtgctttgtaattttaaaatctaccgtcctcgtttatgtaccaggccgattatcaacgcactgcaaattagaagagatgccctgacaaataaaatcacgcataattttgtgggccgttgacattgtagtagcactgtttaaggtggagtggaaaacatccacacttctaaacaaaaatactcatcacttgttaccctacaacgtccaatgatgcatggccgcacaaggaaaaaccaagagaacgatgggaacataatattatcgctgtccctaagcttttctctcatttttttatcttttctttcatttctttgacttcttttattcgagggcttttcccctttctctgacaaagtggactacacgggccaaatattctatccgctcccacgttctccacggcacggcccatttataaagcgaggtgatggggtggtgtgggtcccgccggccacgtgagtgctagctggcgagccgtgtcaggagtcatgtgagcggcggggtccgaccgaccgacgcgcgggggcgggccgcaccacccgcaccgcacggcccgcacccggctccggtacgtggtcaatgccacgtcgcgcgccacctctcgtcgtcgtcgtcacgtcacgcgaggctccaccttcccctgtgccgccgtgctcccgtgtacagacgcagtgattggtgaaggttgatagggagggcaaaaatatctccgacgcgaacgcgacgcgagagcccgtgaacctgtctgcgattttctgatgtgcaagcgctgttcgagtcgtgagatgagaaatgatttttgataaacagggggcgtcgtgcagtcgtgctcgttagtactttgcttggagtggatgctgcgtttgaagactttctgggggatgaacgaactgttccaattcttcagacccaaaaaaaaaagaaaaagaaaagcagaacagaagacgtggggggtgacagctgatttattgcggttcgtgaacatcagttttgggtgtgtttagttcactctaaatttaaaattttggttgaaattgaaacagtgtgatgaaaaggttaaaagtttgtgtatagggaagttttgatacaatagaaaaattgaaagtttaaagtttgaagaaaaagtttgcaattaaactcggcctttgctttgcgagcttatcacaactgtgaacgcgtgcacgtccaagaaagaggcacgtattcggtattccatctgagccaaactatcgacgacaacaaagcaagggcgtactctgaattccggtgcaaaaaagtagtgctttcatttgccgtgcagcgggcatgtgcccaacttaatttttcgcggcgccgggatgcctggccaaatcaggaggccccgcgtacaacgcatgaagctgctaagttctctgttcttgtatggaaagcatcgtgctttcgttactgggtcaaccttcgagctatctcggagcatacagctcactctaaaccatgttcgtaccactacactttgtactagtagatagtgagagcataattgaatttgtacaatattcttcctgctgtttcggatcctatttagtatcttatttagatcctacttggttgattgagcgttaggaaaacatatccatactaatccaaaatctataaaaggaaaagaacatctcaagtaataaacatgatgatattttccaactttatgattctgcataaagaataagggagtaactatatttacgtcgccacattttttatatgaaaaacatatcaaaccaagcaatatcaccatccatctttacctgaagggtttcgttcaaattctaactaaccgataaggcccaaacatacaatacggcccactggcccattatccttacgagacaagtaaaccatcggcccatctggagatccgttatcgccaggcacacaccctgccccgtcctctcctcccccttccccccacctcgacgaaccgacggtttccccggccatggctgctccgccgccgcggcgaaccccgaaccccgagcgcggcagcaggaggaaggtgagagcaccgccgctcgccggacttactgctcccgatccctaaccccgctcgtctctctgctctcgcagggcgaggacccgtggctcgcggcgagccttcgcccggggaatttcctcccggggctcgcgattgggttcctcctcggcctactcgtcgacttgacctcctcatggaggccccaatcgagtccaccgctggctccggctgccccggcgccgcggggctccaagcggacgggtggttcgtcgtccgctggcgggggcatcggcggcgaagagcttaagatggtagcttaaaactttctaagatttcttctatactggattgcatctcaatataccaggaattgttcgaaagaactcgtgtgatatcggactgtctgctggtgtaattccgcaactgtagagctgaactttgttctgagttttggcactccttttgcaggttttggtcgtgcgtaaggacctcaagatgcgggctggaaaaatagcttctcaatgtgctcgtaagctcaacttcggaacattagtagaagcatttttgtttcctcaattcctttttttttttttacttatcctcgaagtgtaggctattgtgctttgctcaaatagaactaatttttgtttgacttatcctagaagtgtagactattgtcaacagaacagcaacaaccaaattgtaatgaaagctgctccagtttaagtcttctatcgactaaaatattcaaacatttttttttggatagacctattttcgttgcccgatcgttgaatgtttccatctcttgtactatgaatcacctacaacctacattattttgtttgcagatgcagcaactggtctgtatgcagaactgatggcaaggtgctaacgcggtttgcaatttttctcacttaggtagttctaattgaaatatgtagtagactatctgtacaaacatattgcttacctatgcatctaaaactgtattgacactgcttacaagtatcggttcatgttttggttatcatgagtttgatattttgttttatttgtatgaaagaaaatcacatagcatccatgaggtttgagttgcactggattcatatagctcttgtaagactagtctataggtgccagtatcaaggagctatgtcctgaccttagcagtgttgaagattttccaatcaccattcatctgatacatctgtttgcagcaaccggggtcttttgagacagtgggagcaatttggacaagctaagattgttttaacatgcaagaatcagcaggaaatgtaagctgttgctttgcctagcacacatgttcctttgaacaatatttactggatgatgatgtagcactccttttcttatcatgcattacaggaataggattaaggaaaccgcagaacatcgaggtatcccaacatttgttgtcgctgatgcaggacgaacacaggtctgtttatagtgcttctacaactctactttcttattcatagggtggaatttttcatacttgtagcatttgtgactttccagcataaccaataaattgtggcagctatgctatgaaactattgctacattatttcctctttttttttaggagacaatcttatttacccgtgactgtgcacatccatctggatgtagaggccgggtttttcattatctaaaagaaaaatcttatttaccctgatccttgctatttcttattcttaatgtaggtacaagctgggtctaagacagttcttgcagtagggccaggttggtttctcactcagaatgtcacgtttgtgtctcttagctgcaaatgtctcagatttgtgcgtttgaagtttgaacggtatatatgagttggaatctatctcatagttttcatgtaaaaaaaagtccatctcatagtgttcttattttgtttgttaatgcaaca

SEQ ID NO: 7284 - DNA, 12510 bp, Oryza sativa
  unsure (1)..(12510): unsure at all n locations
tcgatccagagaagaggatttctcttcctttcatctgacagtgggcccaggggcaaaacagtccacaaagtttgagaaaaaatacaaatgggattaagaaatgagaaataaatgaaaaactaagaaagtggtaccaagtagagcaattagcagtcctaatgacatattatagagggcacgcgaattgggtggtaaaaaagttaaaaggcatacgaattgaatggtaaatagtctaaattctccaccggttgccaaaatttggtactaagccatcacggcttattagcaagaaaaaaaatttgtgtgtcaaaattttaataacttcaaaagcaatgtaaaataaaaggtgcgttgaaaatatcttaaaatcatcttcaaaattaagttttaacattacttagatataatgagtacacttaattttcttttattgcaggctcctagacctatgtggtccatttgaactgttgtcccattcaaaaccacatgttaggtaatgttgcgtcgatgctaagatgtatccaacctggttaatgggttatgataatttgagatctaaattctagccaatagaaacagagggggaaagggaaaacggaaattagctcatataagatctgtttatgtaacattagtcatatgcacttgggttgcaatggggtgagatatggtgaacatgattcaatttttattttgttttctcccatttatcttctctcggttggttagtttattttgcatcattttagcatatttttataggtaaattttactatagagcacccagttttttttaatgtgcggataaacatagaaaaagcatgtcatggttaaaagacatcttaaaattggtgatttgctaatggacactttcgggccagttggagagataaaatcttaaagaaagacgagaatgccctaaaaccacatgcttcaacacatggcattagagtaaaaatttagaaatcatgtaactctaaatctatcatcaccctaaatacatcactaatatacatcatatttcattttcactttaggcttagctcaaaagttttttaccctaggggtattctcatgtttttgaataattttctctccaattgagtcgaaaatatgctccagaaaattatcaattatttaaaatgtcttttagccttgacgtgtttttataatgtgtactagcaaaattacataaattttaaatgtcaattagctatttttacttttcttttaatatgtggaattagggtaagaaggaaagaagttttaaacagtagagatatgtactaatggggagaatgatatcgcttttaaaattaaagatttttggaggtatttaaaatgaacttttgattttccgcgtttcataaaaacactaaaatctccaaaggatttactatggcatatttgacttcggacgatgtacaactcaagattttaacaacaaaaaccattggaaatttcaaaacttgcagacaaacatcccacatttcgtatcgtgccgtttaaacaaatttcagaaaataaagcattgccatccatctgatctgatgtcccggagccgcacgccgctgatgatccattatcccatccctctcattatttatttcctcgtatctccagccgcacacggaatattaaattatttcatccatcgatatcgtttcaaaatatatttattacttatatcgatttatcacaatcaaaatcaaatcaaaccgaaaagggaagtcgaaaaattcagtcaaaaaaaaaagaaagcgaaaaatacttcgccgtcgtcaagtagacgtcgccgtcttccgcagccagcctctcccccatctcatcgtcttcctcctcctcgcatcgccggaggccaccggggaccccaagaatccgaccaatccgatccccaatctgcttctccctaggcccgcgagaatcttgcgaggaaatctcgctgccggattcgaagaaaccgccggattccgtggagaatcaagaaacccccgcaaggtgttcgtccatggacacggagccgctgctgtcgccgctgtcgccgtcgccgcacctgctccacccgctgccggagcacgcggaggtgtccaccttctcgccggccctctcgccctgccctttcccggcgtcctcgtacaaggagcggatcatcttcggcgcgcacccgccgtcggcggctgcgacggcggcgccggcttcgcccccggcgcgggggaggcggtactaccggcgtgtgtccggggatgacctcgacgtgccgtcgtgttcgtcctcgccttcccctcccttcgacgaggagaacccgccgccgaacccgccgtcgctgttcgacttcatcggggggcgcacgaacctncaccgctcgcgcaccgcgccggccatggcgccgctcaacgcggcggctatcgccgcggccgccgcctcgggggacagccggaacccgccgccttccccacggcggccggccatcgtgctgcacgcgttcctcttcctgctcgcctacctcgccatgggcgtcaccttctacgccgccttgccgggcaacttcacctcctcggccggccctacccaccccgtcgccgacgcgctctacttctgcatagtgactctctgcaccatcggctacggtgacatcacaccggcgacccccgccgcgaagctcttctcaatctccttcgtcctcatcgggtttggctttgttgacatcctcctatccggcatggtgtcctatgtgcttgaccttcaggagcacctcctcatcacggcgctcaagaacccccgctctgtgcgcaagcaccggcacaattacatctttgatcttaagaagggccggatgcgtgtgcgcatgaaggttgcacttgcgctcaccgtggtggccatctgcgtgggggtcggtgccgcggtgctcaagagggtcgagaatttggggtggctcgatgccgtttaccttgctgtgatgtcggtgaccaccgtcgggtatggcgatcacgcgttccggacactggctggacggctctttgcatccgcgtggctgctcgtgtcgactcttgctgttgcaagggcattcctctacttagcggagatgaggattgacaagaggcaccgcgctatggctaactgggtgctgtcgagagacatgaccgtgtcagagtttcttgctgcggatatcgacaacaacggttatgtcacgtaagtctccgataccttagctattctttacctgcctgcatttacctgatttttagaaaatatgtgcacagatacttcttagtccttgctgatgatgatctagcaatttacaactgaaatagatgtttgaacatccaaattagagactttgcaaggtataggatttccgaacattaagcaacatgtgctagttggagaatcaatcattaacactgcttgttcactaggttgttgggtgttgacatattgtgtctgctgctctctagttcttggagtatactatggttcattttagtatgatgcaattttgttacaactaatgtaaggtggaacagaaacctaatttattggaggaacaaatggaatagtgagcaaggactttcggtttagaattaataaggtctcttaaaggaacttagcatcttagttctgtatgctttcttttgaacactatgtctcattacgtaggctttaccttatcttccttatgtatagttgtagaatactttcttttcactacaaatgtagtcttttcgatctgcgtatgcctgagattctagtatatgtgggtattgattttttttttcaggctcacaatttgcatggttgattattgggttgtgtggattgtacattgcatttgggaattcagaacgcctgttcataagataaataagaaatcagaatggggaaactgggaaagaaactcttggcttagtactggatatgtgagttttatagtattggaattttgaatttactgaaattgtaggtatgagaagtgttgaagaattttgtgcttggagactgggcactgttttagatacatggatatgtcatactacaagagaaattaaaatgtgctctgaaaagaattacctttctgaatgtaaagtagctaattctaaaattttgatcatgtgcatttaactggcatgtattcgggaacacgggacagaagcagtaccatttatgttgatcatgaattcatgcaacttcttttctgatggcatacaaaatgaatgactaacaaattcgttgtgtagcccatcagtggaatggaatcttctttttcttgtttcttgatacatctcagtatgagcaatgaaaatatattgtgcaattatatggctattaaaacttaaaatatgccaaatcgaaagagcttgacaatttgtcaatacaggattatgacattcgatgattagaaattctaacatctgaagttgtaagaatgtgttgtgtaggagagcatttgaattaataaataataaggtagaacctgcttctttcatgatcttatatttctcctctgtgtccagaaggtggctggacaaatattgtgaaacagatggaacactttttggctcattgatttgaactgtattttgttggtcttttgcttgatgtgttaacaatactctattgagtttatggatattaataagatatgtgcattaaatcgatttgtgtttacaaatacctcgaaaaagcaaaccttttactgtggtttcataaaagaaaatgtggggactttgccttctctagcaacccaggatttcagttgctattccaacacaacattttagaccacaataataaatcagttgcatgtacagctagcctctgatgcctgaatagctactgttataaagactttttagctcattgatttgaaccgtatttagctgctactccctccgtccctaaatataagggattttggttggatatgacacatcctatgttcagatttgttgtactagaatacatcacatccgaccaaaatcccttatatttagggacggagggagtattttgcttgatgtgttagattgagtttctggagattaatgaaatatttgcatcaaactaatttgtatttacaaatatccagaaaacaaaaagtttttagtgtggtttcacaaaaaggttggcacttagccttgtttagcaacccaagataacaataatacatcagttgcacatagcctgtgagaactaaatataagctaataaaaaaacattttcatagtacattgattgtgccagactgatcagctctcttaaagtggcatttgattacatatgttgacagcatgtgcttttaatttagtgcggatgcaaaaggcagtttttttttcttgaaatgcttacgaggttatctgcacaaatttatctcacttagaatgatcactctaatctccactaccagacttattagggagtagctacagcatgcaaccacaagcctaaaaatagttcgttcacttaaattttgcatagcattttattttatagcactttttacacatattattgctacaagcctgcggtataaatgtgttcacaatccacatcgacacatagattgcaatcacttttagttagataatagcttaatagaatgttagcaatgctatgtattgatcatcactgaatttgccacaatagttgagtgctatcttcttgtaatagcatggaattttattgcttgtcataatctctgaagaatacagcttcttctagctgtatggattattgttctaaccatcactttttctgttcaggaaatcggaatttgtagtttacaagctcaaggagatgggcaaaatttcagaaaaagacataatgatgatctgtgaccaattccaaagaatggactcaggaaactgtgggaagattacactttcagatcttctcgagagtcatcagctggtcactgaccttaacgagaagaaaaaggggaagaaatcataatacatcacaagacgcagaaaaaaaaatcgtagggtagtagcattttgctcatgaatcaatggtagaagagctaggaggctttctcctacgctgaattcagaaagcatccattgatggtaggatagcttcaggaaaagtagtttactgctctccagctatgattgtaccctagaaagggtgagaagatcactgctgtgaatagaagctgtaaataggaaggataatacaaggacatttattcagattctttataaatatatattatatggaggggttggctggtggccatttggcttttcaagttcttctgaaaattatcatggccaaagttgtggttggttggtgagacaagaaagatgagcacgccatttctgtttatatgcatacaatatagtagacaccacacattttttttctttatgatttgattaagtcgtttctgctgctgacactaggaaggcgacattagcctttgtcatcaaacctgttttgtattcttttgctctgattgacaattctttcggactctctgaattcaatgtattcttttgctctgattgagaattctttcggactttccctgaattcatggacatgaaattaatagcataataatttatttgtttgtggacattatattggacgtagaattatggggctttctgccacgccacgtggcatgaaaggattaggtaattaattggaaagtgaagtgttaattgagtgaaattttggatgacagtttccgacatctagtggccagtgggtacgagagcaggtacaaaagcaggtataaataagctagctgcaaatatattttaagaagataaataagccagctgtaaatatattttaagaagataaatgaggagagagaaaagcagcgggctacagatttatagccagttggagcacggacttcaagacacagtgtgtgtatgacatgtgggaccaggtgttaatagtatagtatgtaactattgtatgaatgagctattaaattagctatagatcaattggagctagtactcggctatactattaaacttgctctgattaggatcgtctggtccatgatcgagaatttcatcgacagcaaatcgtgattctgaagctaacatcgacaacaaggtaacaatcataaatcaccacgtaggatgagaaatcggacgatgatattatcgtttcagttttgggatgcgcttcaaagaaacagagagaggcatatggtacagagaaagaacgatcacaatgctaatccaaagattgatttcccaagaacacaaacttagaaccataatgactagtgtaccattcaccctaaatctgcagcagcagcagcagcaaaggcgactgttttcattgatcttgaattcttgatcgcatcggcgtcaggtggacaggtgctacgatgattggggtggtggcgccgccgccggcgccggtagcggcagagtcttcttctccttcacctgcggttctgtaaaaaaaaaaaagaaaaaaaaagaaatcaacttccatcaatattgagtcgtatgcatcgaatagtcctctagtttggaatcaaaatggactataatcattatttaattgcgtactagtcagaattcgaactcaagacctctggttgtaataccatgttgagttgtgttgcatgcacgattagtcctacccagaagcttaagttgatgataaaagacggaaaattcaatttatattccaacgctcaaaatggatcgaaggattagtagtagatcgattacttgagatgagagccttgggccggtccttgaagaggatcttgtgccggatcacgccgatcaccttcagctccgtctccgccgccaccgccgtcgtcttcttcttcctcagcacgaggagaggcttcttgagcgccaccttggtgccggcgagctcatggtaccccacggtgaaggtgaacgccgcctgcacatccgaatcaatcgaaacgtgagatggccgggaccgggagggagtggggtggaagaccgccgccggcggaggtgggttcttgccttggaagacggggcggcggcggcgcaaaggcggccgatgtggaggccctggatgcggccggagaagcacggctgtggctgcaccacgccctgcacctccacgatggcccactccgggcaccccgcctcgccgcacccgcaccgcacgcggatctgcatcgcccgccggcccgccgccttcttctctccgccggccgcgggtggaggcgaaggcgaaggcgaaagcgaaggaggaagagaggagagattttttttttctgggcgattggcgccaaaatggcgtgctaagttggtcccttcccgccatttctccccccggaaaacaatatttctttgcttcgcgccaaaacaagaaaaataggatttcttaggagaattcgaattgggctccggagtttaggatagccagcccagaaatggtattcaatatctctactcctccattctaaaataaatcaacttagaataagatacattagtagtaaggacatgtacaatgatctttattagcggtctttctttattgtcatgcaagcatatttggtgatgttgaagagagagaaagaagaaaagagaaagatggttgctacgcatgacaacagcatagagtcgactcttagcatttattaggaaattttttattgcattgagtctaataaaggaaagatgactagtaagaaagtattttggtacattaatgattagagaccgtattgtcttaactattgtaacgtgatagcctctaattaacgtagagaccatatcggtatctacctttgtacttgccctaagaatctgaacaacgttacttatgctaagtaatattttgttttattttaggttggtttattttaggatgtaaagaatatcttttgtttctcttttctcgaataccccatcatatctctatctagattcgtaatattggaatgtgtcatattatatactagatttgttttttagggacgaaaagaagtacatgccatcagcacataatagaagcttccagtaatcacacagaaattatggacagaacacaagaaattatggagaaaagtaaccatgatagtaacatccaagtgtaacagcataacatcaacagcttgtgcttctgaccactgaccattacaagtttacaacaaattacacgcgaaaaattgttcatgttaaacacttttgtcaataaagatttacccagatgagcagaagtcgacgccgcgacaaagcgcaaccttcaaacttcccaactcaacagctgataataaaatttacaggccacgaaattacaagcttaaatagctgtcatatgtagtatcatgtaaacaatcatctgaacacctacaacatttttgtctaccaacatctccattgggacttagaaatatactactgagagctacaacacggatcttagatcattacttcgtctcgaacaagctagcgaagatgctgtgaggagtatcaccagatgctaatgacctgagtaggacatggaacattgttggaactctgaccccgaactcgactcgaagatagaatgaggaagggcgaagtcagtttccgagaactctgcaccattacctcgttgcctctttgctgccctctcatgctttggactagcggtaggagaaccaggctgacagttggaatcaggggttagtggttcatggcgggacagagaatcatcgcgctgggggctcttggttgcttcgttttgtcctccattgtccctattcgaaggtacaccttgagttggagattcagatgtaggtgcaggagtcgaggggtcagttctttcggaatcagggaactgatcgcttggcaatgtgacggaagcaccagcagcaggtgtttcagatttcactccaccgagacgctgctgctcctcaatgatcttcttgaggtacttgccctgcgcctcaatgcgcaactgcagctgcctttgtacctgaagagaatgtttatcatatcattagggcctgctctttgctggatatttcacaaagatttgaagaatatgtgcatccagaacaatttctttgcatagatttggaatattttagtaacttcggaataggcttaataaatatataaggatggagtacaaatgttagaagctaacaattttatgctgaaaggaacttccacaaaaacttacttctaactgttcatgtagacgcttttggacctccatctgcagcttcagagcttcagatatctgtaagccactgtacaaaaaaaatatcacgatgaatattgactattgaggtggagaacagcaccaatcgaacagtaacataatggaactgtccattgaaaagataaataggcattgaaatcttacagaagataaatagaaagcacaataacaaatgacttaattttttcaactaaaaggaaaaagcatattaatcagacttaagttatttcacatattttgttgttttctagtatctaggatttatgttcttgaggatgttgaaagccaaaaatggtgggcagaagaaattatgtgtaaaatactagtagtagtttcaatctcaatccagcagcagcctattattccttgatactttcaactacagagggactacaatctagaaagcgatatttgccgagcagcatggcagcatgcaaacaacaatggtaataatttcaatagttggtcatggtagatttactggtaaatggtaaaatgtggcaaaccagcatacttccatttcataccataacagtatgtcagtagcatttcttttttctttttacaaaacgactgatatgatatcggagaaataattaggcttatgtatacttacgaggatccctcaagtccagcaagcaaatctccagggtctttgttttcagccttgttacctaccaaggagacaaaaattaggataagctaaaagaatgccagagtactaaaaaatgcaatgcatgatgaagagattgtccgcgtaccatcagctgaagagtcgggaatgtactttgcaagcctgtatttctagaaacaggaggggaattaaataggataaaaaaaatactagctacaaaaaatattaaagggaaagtgacacactgtaacaagatgtacctgcaaatgacttttcacatggtatatcgtcaacccttgtacacccataattcttagaactcctttcggagttgctcctgttgcatttgaggaattcaagtgttagcagaagcagaaatttacagttaataagttcaatggtaagagagcatgattacatgcatgcagtaaagttattgtctccaagaaaagcatcatacagaacagtctctatataagtttgataaaatcaaataaatgaataaatgaaaacataattgcaacaattgcagtatgaatacatactatcaggaccaccaagttgagtaacagcctcaacaaatcgttcgtgcagctcatttgtccaccgtaagcgttgccttgcagccaagttggaattgttgtttgctccattatctgggcccatattgttgccacctaattccatatgctgctgataagtgactgaattattacagtagggccaacactaggttcaggttttggttaatacaatgatcatcacctgggaaaaaatacatcagagagccagatatcagttttacaaacagcgatcacaaacaatgtttgccggtgataaaagtacaaaaacacaactaatcagtgcaaagttgcagtggcagttttctgtccatctctaagacagtcacaagtgtttctagaatttgtgagcttaactacatagggaagttttcattgttgcagaggaaagaactactagtactagtatagacaaggaaaatgccatttgtaccaagaaaactagcgtgtgcaacgctgtccaatacatctatccaatttgattcatcataccatactgctttacatggaaggttaggcaaatagagtgacccataaaaatggtagatgcaaagctctaacagaaaaccagccagcatacatagttaaggcgaatacttgcatccacagcttgcatggtgcatcaatcgaattatcatccattagtatttatttattttgctctcaatttataaccaggcaaaaaaaaggtaaagagctccatgggagcaacccacacaacctatcgccagacatatgaaattagctttgatacatgatgttcttgatgcccttcaattgcacagtagaaaaagatgaaatcaaagcaaagcgaattgcagctccatgctcaaagcaaagagcaccccgtatatgccaacctactaccaccagagaactcatcacaaacagcgcaagccacacgccatctccggcggaggtgggcccgacctgtcagcctcaggaagcccttttttttttcctctcctcgcttgcattttttcccttttccattgggggaacaaaagcgagagcaataacatctcaacacggaaagcaaaaaaacacgcacaaatttaccgggaattctctctacagaggcaaagtaaattttggggggggggggggggg

SEQ ID NO: 7285 - DNA, 2964 bp, Oryza sativa
ggggggaaggcaggcgaagtcggaggaggattccttgcggctgtggcctcaactgcggttaaatcgccgttttttttgacaaattgacccttttggaaaacttatttcgaaactaacccctgccaaaaacttcaaccaaaaataggccgtcgcttcagcgccaaacacattggcgctgacgttggccgtgtcagcgccaacgggactggcgctgacattgtgccaccgtggcggccgggccgatccccagctgacgtggcagctacctcagcgccaaccggactggcgctgaggtgggacttggccgcaacccccaaggcccagaccagcaagccttctggatggcttgcgggctgggacctctgcgccagccataatggcgctgaccgtgggacactcagcgccagcccacctggcgctgaggtgggacttggccgcaacccccaaggcccagaccagcaagcctgctggatggcttgcgggctgggacctcagcgccagccataatggcgctgactgtgggaaactcagcgccagcccacctggcgctgaggttggacttggccgtttcggccgtggcccagcccagcaagccttctggatggttgggctgggacctcagcgccaggtgcactggcgctgagtttggacatgtcagcgccatttagcatggcgctgacgtcccagccctgctaaactttagcaaaactttgcacacaacagaggcaaacatcaaatcacagaaatttacaggcagtaatatatccagagaaccatacaaaacatacatccatccatcaatcccaacatcattccatacatccatagaatccatcaatacatccatatatgaagtccatatatataagaaataaaaacatcccatcgatcctcgtctatacatccagtcgagtccatacatccagtccatacatccatcgaaccatgcatcaagtccatccatctatccatccatccattgaaccatgcactcacctcctcctacctctagtgcgaggacgaggcacgtcgggggtgtacctccagtcctgcgaaggagcccgccggcgtcgtggtcgagacgggccgggctgcgagatatccggctgtgacgactctggtgcgtcctctagctgcgagggaccgagctcatccgcctcctcttctctgtcctcatccccttcttcctcctcatctccttcctccgcctctttgtcttgctcgccctcctcgtcacccacctccccttcttcatccccctcttggtgggcatgagcatgttcgaccacatcagtcgacctgcagccgagccttgctgccaacttccgacatcgctgccgtagtctctgcataaaaaataatccatgttaagttatcgcttttggaagaaaacaccgtagtttcatctctttccaacgattacctgtagggcgtttgcggagggtgccgccctctccttcggagccaggagccgtgcctagcgccactcccgcgtcgttgacggtccgcaagagctctcgagcctgtaggattgaaatgaagtaagtcacaacatatatggcattgaaatgaaataatatacaacattaatgctagaaactaaccactctgtcgcgaacaggtcccgtctcgaccgtggtacctagacgggtacgagtatcgtactcgttctgctcctcaacatcctcggggtcatccgctatgtcggctagtgtccaagccggacgtaggacaagacggtaggtcctgtggagccacgccaagtacaagtcgaactccgtcccgttgtgctgaccctggtctggtactccattctcctcgaacttctcccattgcgtgatatgatcctgatggtagtaagcccaatcagtcaccttcttgttcttccgacggtccaccctgcacgtatgcaaaatgtccaactcaaatatgtagtaaatgttgaagtgactgattgggcaagcaaaataaattgttaagtgaaattactaacttgtgtaggtcgatactcgtggagaaacggtgcgggattgtttgaagcctcccgaattgccgcatcacgcggtggcacatctggaactccactgcatagaagcagatcagtgggcaccgtagggtcttcaacgcatcctctatatggcacatgggattcagttctagctcgagcacttcctgtgcctgatatggcatccacaccacctgcagcaacaaaaataaaacacattgaagcacatttagtactatatagtaagaaaccatctttatgtgtgatagaaccccgaatagcttacatgttctggctgtaggtagtccatctcgtttgtgtagtggtagtacgccaaattcctgcggcctactactggagatgggaccgattcccacaggtgagctacagtgggacgtcggtctgcatcctggtgcggccaagcctgatgggtcctccacatgggccgaccaactggaagcatcatccacatccaaacctgcgtcacatacgttagcttccaacatgttagcaagaaattgaaatgttatgaaacataacatgcgtgaacttacctgtagcaaccaaacacagcctgctaggttcgcgtccccgccttgccttcggcaagcatcacagagttgccggtacaaccaggctagggcagccgacccccagctgaaggtacccgcctcgtcccagtccgcgagcaacggcagccacatccaagaagccatgtctccaccagagtcagggaacagaatactgccgaagatgtacagcacgtacgccctgcagtatcgctgtactgtagcctcgtctgcctcagcgggacactgaccgaagttggctcgcaaccaactcaaaggaacccctgatgtcttcgtctgcctctgaccatcaggtgccactggaggctccagaccaaggtactcctcgaccctctccctccagttccccgacgctgtgtcacctgtacc

SEQ ID NO: 7286 - DNA, 18809 bp, Oryza sativa
caatgctagaaagtcttataacctgaaacggagatagtattagtttaaaaacacaaaaaaatgatgtgcacaatttatttctcaaaaaaacttattataacatcataaacttattctattatcaaagttttacaagtgtgacagaacttttctaaaaaaaaagggttaaaatatcaggtacagagttcaatagtggtttgcaacataaaacaaaagagaaacacagtgtgcatcacatgagcaacagttaccaaaaatagccttattattattaacaggcaaatcaccgaatcacagccgccggccaccaaaccggccatttccgcttccctattccgccccccttcctccgctcccaaccgagtccccggcgccgccgccggctacatcctcgccctgcgtcgagggccacggcgccgcgcccaccgcccgtcgcagcgcccccgctgctcggccacggctcgcacgaccgcgcgggtgagagaacagccggcgctgccttggcctcggctcggcggcgcgacgcccccacccactccaggctccacgtatggttcaatcctatgcaacttcttttttttttgttgattcgggaattcatgcctatccttgggtgtcgattgcgcatgtagtttcgaatttggattttgtcagtttttctagaatcgaatttggccatctgtagaatggcgctatgacaatgggtgtctgatgcatgaaccatcctagcgtcgtagtatttggcaagaattgggttcggtgagaagatgtcatgtaaagttggggaaaggaatgccaacgttttgagtttggaggtggggtttctcgttgaggacatatgctcggtgccgtttctggtgacaaaatcctgcatctgatagggagagaacaagatgctccaacccccattcggtttggtttctgcacggtgaactgccgtttgctgttcagaaattttggaggttcctttcaattgaacatccatgtcccatgttaggtcattcctgcttacacgtgcagctaaataggcatagcattatgacctgctatagagttctatgcagatctcaataggtttcccatacccccatcaatattctgattccgtcggtgttgttgatcaatggttctccacattttagttcgtctctcatatgtgcggaccagtatatgtgacggagctattttcctatatatggtaatctgtaggacttataaacttgtgaaagtaagttcgtgtgttatgccttcctaaaattttgcagacattcactctacattgttgttcaaagcttcctctcttaccatgtatgtaaggactccttcaccggtgtataaccaaggataatagttgttgtatattgtttgctacaatcttatcgtagatgtgtataaaatagttttatctcttaaatgttaatgatttgtatgtgccatggtgcatcagtgtttgaatgtatcagaatcaaatgaacttagtacaatgtgaggggcacatttatagatgtgagactatgggactatatgctatgtaaacaaatcattggcagaatatgtattaaacattttagtcttatcaccctaagagtatccttctaactaactgtatatctgagatgtccgctattaaaagcataagtacttctgaaaagcctgcaatgcaaaatgaaaattcaattgctatttgcttttttaatcacatgaaattagaaactatttactgaactccttgcaatatgttctcatatggaacagtatttaacgccttctgtttgaactatgaaatgtttgtatgcttttgtaagcacacttttggtgtaactgtggaaattcgatgtatggtccaatccaactgtatcaaatttgctttattttatatggcatcgcgttaaaaaaattaacagattagagttgtatctatttttaattcattttgttaatttacaataggtgaggaatttttaatgcttgaaatgactgaaagttggatagaaggctcaaaaaacacttcagctccagaatcagtttcttgttcagtttctagatatgaatcatcaccgccaagaagactggggaaaaggtaattaaatgctaatgtaccattattttttatttattttaggttgtggggcatgatgtagagtgtgacttttattttctttactatccccagaaatatttatcatctattagctcaacgggagatctctcctcggacaaaacaccaagctaaaaatatttggtctggatctccagaatgtgctactggttcaattgagttagcattttgggttacagatgctagacatgatcttttttcttggtaaggcagatttcttttttaaccaagatgagtactttatatttaaagataaacttgaaccgttgattttactactactatctgattgagcatgcatcctaaaccttacctttttacagggctgaatcacaatccttgcatcggtggtctgccaggtattgtcttctcctgcctgctccaaggtcaaccattgcagctgcattcagtccggatgggagaacacttgcatccacacagtaagctaaaggatatgctgaatatatgttctgaacggaaaaaaacttagactaactacacttttctctagtggtgaccatactgttaaaataatcgattgccaaactgggaaatgtttgaaagtgttgcttggacattggcgcactccatgggtggtatgtctattaaaactggcaattgtttttcctagtgtacttcattttctgagatgctctttaagcacttctaaaagaattaacactaatactagtttggtttttagtgtttccttaacgatcacttgcttaaataacaacagtttgttatctatgtgtccttgctgttttccccctatgtacaaactgttaattcagaaaaatgttttacaaaaaaaaacaatgttgaattttgtttcacttttttattacttgccataagaaattattgttgcaatgtaggttagatatcatccattacatcctgatatcgttgctagcggaagtttggataatgaagtttgtctatgggatgctaaaacctcccgttgcattggatcacacttcttctgtaatatctcttaatggactcattgtttttcttctctattcgtgagcatttctaaagcaacaattgtaattattttttacattatgttggcagataagcaaattgcatcaattgcatttcatgcaaagggggagcttctggcggttgcttcagggcacaaagtgagatgtttaaacaaatgaactttctatggatcgttctgatctgtacttcatcagtaactgttaaagtttaaattttgaaatacatttcagctgttcatatgggactacaataaacgagatgaagcttctgacccaccaatgatattaagaactcgccgttcactgagagctgttcaatttcatcccaatggggctccgtatctactgactgcagaggtagaatttgtctctctgaattgatgatttatttatattagttttctaattttctccgtgtctccctgtcctagtgttgatgtttaatctcaccccaaggttcacttgcaggttaacaatcttgattctgctgattcagaactgacccatgcaacatcttctggctattcaaactcgccttcggctgtattttttgcaatcatgaactccgcatgttgtccatactctgagtctaggttttcatcaccgtgcttgatctggcctgcatatgtcagagatgatggaagcatatgtctgcttcgcaatgactgggttagtggttcatccgatgtgcagcagccatcagattctgaaactcaacaggctggccatatggttacacctatggatgtatgccctggagaacctggggtgaataattatgatgatgaagattctgcatctttatcaaatagaatagaaatgcatactcccagttggcagaatagctcaagatttcacaacagtagtgctgctactgatcttcacaggattgatataagacaagtttctgacctgagcagtgatacgccaaatccagaaatgcctgcacattcaagaattgatgttccaaatagtatgccaatggatttgttcgccttttcaaatacaatagatgttcaaatgttcctaagagacgtagaggccggacatcaccataataattacactggtggatcacatagctgggaactgccttttctccagggttggttgatggcacaaaaccgtacaggattgcgtgcaacacttcctaacaatgaggttataggagacttacctatcggtggcactgctgggactgataatgtgatgaatgaatcatcaaacatgtacagttttgaacgtgtagggccttcatcatcaattccaattactacggacagtttgagagggctaagtaaacatcgtcatatgctggcctctgtacctggtggagcagggacttcgcttcaaggtgctcaaaatggtgaagctcatgttaatgttgtctcattaggtgttgggtcagaatttgctacgtcactgtttgctggtgacggtactgaattaccctgtacagtgaaacttagaatatggcggcataacattgacaacccttgtgctgtgttagcacctgaggcatgctgcttgacaatctctcatgctgttctttgcaggtacactttggcattcctcctctttcctctgctttattgtgtagtacaaattgccaatcttttcctgttgttatttgctaatgattttgatgtattaaactaaaaatcgttgctattttcttgtgctagtggtaggcagcaacaaccatgtgacagtaactaataaaacaattaatgcacaaatgtatatttatctgaattggtgcatttgagttgcgcttttatcatggttgataaattttgtgctgctgctgagatttgagactctgaacttattaattgctgcagtgaaatgggcacccatttttccccctgtgggcgttttttggtggcttgtgttgcatgcttactgcctcaaacagaagttggtgagcatgtaagccaatcgcctgtacagtatgattcaactggggctggaacatcaccaactcgccaccctctcccctctcgtcgagttatttatgagcttcgtgtttattctcttgaggaggaaacgtatgttttctcgatgctattttttttattatttgatttttatctgccagtgtctgtaaattgactagtgaagtcatttattgcttttgtgatttccttgtaggtttgggacagttcttgtgtcccgggcaataagggcagcccattgcttaacttccattcaggttattttctttccaattttttttgtaggtgtgaccattaatacttttgaggtagttgtgtacttgcttgtgtgaggcggcaaatatgagtttccgcagtcacttccattctgagagcattaacactttgtatcgaacttaagtgtgttcagtgaagacgtgttctctaacccttttggtggacaattctgtagttctgatcatttaattttggactgatgtgatatgaaatctgttctgcatgatgatatttttattcgctgcagttttcacctacatcagagcacatactactggcatatggtcgtcgtcataactcacttctgaggggcattttcatggatggcaagaccacaatccctgtgtacactgtcttggaggtagatatgatttacaacttaacattaaacattttacaggaaggctgatacagatgctctcatgatacttgtttctgtgttttgtattggatgtaatatacttcttgttttttactctactacacataagtttgacaaagcttaattgtgaccactagcttctattgtaattctttttgtaggacttaataaaattataatatcgtgaaaatatatttttcatatgaacgaagtattaccattgtgttataaatctaatctgaacattgctaaagatattattagttgacgttaaaatagtttataatggaaccaaactgtggggttacgatttatgtgcagtaatgactaatgacctcatactttcaggatataaggctatgggctaatactatttctttattgcacttccataggtgtatagagtttcagacatggagcttgtaagagttatccctagtgctgaagatgaagtcaatgtcgcatgttttcatccttcccctggtgcaggtcttgtttatgggactaaggtgagtgacaagttaggtcaatatcaaagatggaatgaatattggtatatctgatgcttatgttgaatcacaggaaggaaagctcaggataattcaacacaatgttgcagactactaggggaaatattcttgaggtactacttacccgttatttacttttaggtctttaatgtgctcaaactggtacctagtctgccaagcataagcagaatttttttttttttggtattgtcctgaatacaagtttgagataccgtgcatttggtcttgatcgaaccgtttaacatcgtttattttttgaagcacactgccaatcgtattaatagaaaatggactggctttcagatttttagagaggatcaacccttttggcttgagcttccttgtgtccaaattccaatctacctttgctgggggtctcgctcattctagataattctaaggctacagatggtgttttatattaatcatttttctgtataatgtgaggttctggtattcaacttttccattactggtaatgaattcatactgagctaggatccactagggttcaatgcttaagaaaatgttgtgccgaggattctaatctattgtttgattggtatagccagttaggccagtttgattggttctacttctgagtgaacccaatgctaattcttttcgcaggaacttatctccacagattcatatgcccaatgaatcatatcccatcccagctaaatcatggtggtcaattttgaaggaccaacatgcagatgttcgccttcctgagtaatccacaacatgattgcactgagactccggaaaacattttgtgacgatcatgaagacttcgctctgcacctaggtaacagtgacgcgggtaagaactaagaagcaagctgtgagagaacagtcaaggaaaccgctcccggtggcagcatatgtgactaagttagtggttgactaatttcattgctagaggtagagcaggaggatgctggtgtattgatgctgccttagccagaaaatggggtagcagatgaaatctagcaattggcatacatgtcaatgtgtcatgttgctctgcatgacgttgtcctaatggactgtaacaatgggatgttgctgcaatcagaagcacatacgctcttattaacatgatttgctgttatgcaaatcttttttctgccggtatatggactggggttggtgtatgttgggcaaatgaatcccaaaaccacattagtaaatgcgagaaaatgggtatcatgatgtcatcgcatatcacttcaagattaattagaaaggctcgtttgacaaataggatagggaaataatatcccatccattaaagggtaatattgtattctaaccattcattctttatacctcatttaatcttagtcattcatccttttttttctttcccaatcccacatctcataaccatttgccaaacaggccttgaggattttgttgtcttattcctcacttgtgaatgactatgattagcgagtgatgaatttgaggctcctttggatataagaaatttaagaaaaaaaaaatactccctctgttccttgatatagggtgcaactggtatagggtgcaactggttttttaagtgtaccagaatataaggcatccatacacatgcaagcaagcagcattaaaacaaaaagtatgaaatctggtcgacttccgtgcgcatgcatgcaaaggctttcaatgcgtggagttagctcttcgtttcttgcgttcgcggggtcgttcacccaccaaatagcaggttgtttgcggggaaggatgcgaagagctgcatgcatgagcaaaggccgatgcacacggagaagcgaagcgtcgcaggcgtcaccctgagaaaatcagttaagcctccttggtattgccgtccagagcatttgcgccctatattaaggaatggagggagtacaggattatagtgttctagccccttaaatcatatggatagaaaaacgtaaaaagaaaaaaaaagtaagaatgataatttgaatggagtgcaacgagaaagaagagaggtagacacaaatgacccattttcccaataggttgatggttatgttataatttttctaaaagttcttatgttttgagtcaatcaaaagaaaattataggacttttgatagctattctttttaatccaaaaggctgcatagtaaaaaaaattataggattaaactccaaaattccaccccctttatttttgtcaaaatggccattttaaaaacttatttcgaaactaaccatacaaaagaattcatccaaaaataggatgggggcttagcgccaaagcagttggcgctgaggttagccgtctaccagtgtggtggccgagccgatcccccgtcaacgtggaacaactaacctcagccttggtgctaagacaactaacctcagcgctacatgcgttgatattgaggtagtggccataacctcgcttagggaacaaccttagcgctagcgtaaatggtgccgagctatacgaccttagtgccattacgctagcgctgaaccctcaccgcttggatatcgctatgtacggacctcagcgccattccatcttgcattgacctatgccggctcagtgcttgcaggctgcctaacacaggagaagtgttgggcgacccaggcacgagtgcttagtgctgaagatcagcgtgggaaggaaaggcgctgataagggttcaacgtgagggtaattggcgctgacatccttgccatgtcggcggggggaacggctcggccgccgcgccgatagggtgtcagcgccaaggcggttggctccgagacggcttatattagcgctaagaacattggcgctgagtccgtgatttatttttggatgaagttttttttacacggtctttcgaaataattttttgaaaatggctaatttgtcaagaaaaaccgtggccatagccatctgcgtgcttcgttctttgcgaagctcttcatggatgctttgagattagtgccagatcgtgggaggtaggtgtgtgcctgtgcgctgcgtcttttgaccaacccagtcgttgacccaagacgaagcgaagcaggcgaccattttgtttttttccttttaatttattatttccaaccaagaaacggaggcgtggcagttggttgggcaacgaatgcgaacctacttctcctagtatactgcttttactttagccatcgccaccaccgccattcctggaacccccttccctcttcctccctcggatctctcctcgctcgcgcgttcgcgccgccgccttcccccttcccccgttgattgattggttcgtgtttttcttcttttttttttccttctgaggggtttcttgatgtttcctgccgtgtgatttgatttgatttgactttccccttcttcttgttttctttttcttgcagggaggaggatcaatggagtgcgtccgctccggctccggggttcttgatcccaggtgctctccgcggttcctggggaagaagggtggttcgctcacgtgagtgcttcttgatcccaagcgctctctgccttttccccctgtttctttccttctttgtgagtggtggtgatctgtgatctctcggtggggggtttggtgcggactggatcttgctggggtttttatttattcaggcgtgttgttgagatcactgctttttttttgggtgacgattaaattttcagtgaaagcaaattagtatatctaccagtctgtagtcagtatgatggagaatgattttttttagttcaaaaacattgcaatgaatccgtggactaatcagttatttggatctcctcaacgaacaattatgttagctcaattttgttctcaacaaatacagttttcccttgtgagttctgagcatctggtgcacacaaaacttagtatatttgtactggactaagattactgtctacagctccaaaatcaaaatgtattttttttttgagttgataccatttagagacagtaagacatagtactatgggtttgcctatcaaatggttgggtgggaggaacactgaatgttcaatttgtcttgaagaaagttaattgcatatgtgatttcccccctttttttattgggagtgttgatttgtaatctcaacggagggataggtgctgtagaggctggtgttttattcagacgtcgttgcaatgactagttctctttttgtgatgatttggtaggaaatattcagaaaacgaaaattaattctagaatttaattggtgtgccatgtaccatagcatatcaccttgatatctaccagtctgtagttaacatgatgcataatgtttttcttttagttgaaaaaaatattgtaacgaatccatggactaatgaactatttggatctcctgaacgagcagttccattccttacaaatctggcaaagacaaaactcaaaaaaactaaatgtgttattgagttagtgattttgtctgtcaaatggttgagaggaatgccaaaggtacaaatggtctggaagaagggacatatcttttattgactgtatacaacactgaaggatgtgaagctcaatctaggcactttactgttatatatatcaataaagttataaatcaaattttctgtcagttgagatttgacgcgaattcacaatacatttgatgttgttattgctaagttaaccaggctttctgatatgtgttgattccactgttattaagttgcccgactagtcacgattagttgtaaactagtcgtaaagtcggtcaagctagtcgactagagggctatgactcaaccaaatagcaagtcgcatgactagtcgtggttactcgtagattagttgtgattagtcatagcaaatcaccaattcactatgccaattggcttattgtgtttagtacttcagttttgtttcttgttgacttattgtcttgcttgctacttcatagtccacagtttatactataaacagtgcttaatgcagtataatagtagtaaagactatatattgtatatcctgtttttgcatgaccaagtcatggactagtcgaccaaatcgataagtaggtccaggggtacctcgactttacaacttgacaaccatggtttgttatatgtttctatgagaatatcattaggttttttaaccatcaaaccatacatcttgttattgattttgatagctgctaccattgacaggtcatgtggtaaagccacttctacaaatcttgccatttgtaccaaacacgagcaaaacttgcatgggaatgttaaaccctcacagttagcagcaagtggatcctcttattctgttcacagaagtccagtgcttaagcagagacagaatctttctgctaggtctacctctgcagatgtatatactacttttgatgaaaatgtcagagctgtatcttcacatgctgctgaagaaaaggttggagtactcttattaaaccttggtggcccagagacactggatgatgttcagccatttctattcaacctgtttgctgacccagtaagtgatcataccacatgctttatacttgttcattactgactatttgtagccgatttgtcaatgctattcggcaattttcactatttgtatattggtatgtgtgtgttccttttagtttatcattatgtagtcccgtaacgttgactaaaatggtctagtaattcttgaccattaaaaaatggttcagtttattatatcatactatttgaaccaaacaaaaacatgtcaatttgattttattgtgtatgccactatgatatgatgtctggattcagaatttgtctcctatctgttccttatttagtatataatgatttacttatatttgtactgttcaggatatcatccgtttgccaaggctgttcaggtttcttcaaagaccattggccaagcttatctccacttttagagctccaaagagtaaggaggggtacgcttcaatcggtggaggatcacctttgcggaaaattactgatgagcaggtaaaatcttgccatcctaatcacaaacatgtgtggtttgtcaaaacaaatttatcagcttagttaaatattagctttgcctactcataagttttgtgatatgaaaaaaaaaatgtattgttgagtttcctaactcagttaactgtgttacaggcaaatgctttgaaggtggcactgaaaaagaagaatttgaatgctaatatatatgttggaatgcgatactggtacccttttacagaagaagccattgatcaggtgaaacttcctgtctctagaagtcctttaaatccttcatttctttgttaagtctcaaaaacagtgccttgccatttttgttcaattcgttttccatggtaattactttattgtttttcttctaacttacttagatattgctactcaatgttattttaagtatcttcttttcatctgttgttgagtattcagcactcaacagcatatgctgcatcgtaaactttagatatttctgttgttccctgatttttgttgttagtttccaattgattataactgcttctaagttttggttgatcatagattaagaaggataagattacaaagcttgtcgttcttccactgtaccctcaatactccatatcgacaagtggatcaagcatccgtgttctccaaaacattgtcaagtaggctgctttctcatttgaattctcatctagtcatcttccatattactagatctttaaattctaatctttcagacgctgtagatcattaaattataatatttcagatgctgtagatcattaaatattaatatgatggcatcatgcagggaggattcatattttgctggattgccaatttccattatcgaatcatggtaccaacgtgacggttatgtgaaatcaatggctgacttaattgaaaaggaactgtcaattttttccaatcctgaagaggtttgaccattcccttttccttctatttttctccctacagtttcccacctttggattgcagactgtgaacacaatcatagtataccttttttggtagaaatttccttagggatacagtttgacatagttcttgtatttacctgtggacaaaattcgacattagatacatccttaatcttgtctacaactaattttcagtatcactgtttattcaattatgtatgagtacgttgtgacaaccacatcagagaaactaaattatttaatgccaactacttttaagaaaatgcactgtccattttcagctaactttttgtactagactgtggatatagggagtataccatgaaacttgaaccacaaaaatgcattttctgaaatgctacattgtagtgcttacctgcctactgtatatttgactatccagttatccactctagttacgtcaattgatgaagggaaattaacactataattttgtaaatgagtattaatgtatgattcagggtgattcaatagacagtgcaagtatctagttactttgttgtttactcagtctgttataggtacatgtcattttagaatgatacacgtaaacgtaagtctgaccagaattatacaaaaagttggaaattgaatagatagaataagtctgatatactaatcatgattgcaaatttgtaatctttaggttatgatattcttcagtgcacatggagtaccacttacctatgttacggatgctggagatccttacagagatcagatggaggactgcattgctttgatcatgggagagttaaaatccagaggaatcttaaacagccatactctggcttaccaggtataagacaaattaatacttatttttatgaggccatcttgtttagaatgaggaaagcatcttaggatatttctaggatatataaagtgttcgtttcatctctttttaaatggctatttttactttgaatgtatcaactgaactttcaccatctagaaaattttgtactagtgtgttttattcctttgctttactggttaacacatcattaacctttgtgtgcacacatggcagagtcgagtggggccagttcagtggctgaaaccatatactgatgaagttctagttgaactaggtcaacagggtgtaaagagcctcctggctgttccagtaaggtaataataactgcacatatttcatattttggcgattcagcgttttcttttttttctttggtatttccttaagaacagcaacttaaacctgtatctctttatgatagtttaatcttctgcctgcacttatctcttgatgcacatatattattgtaacccagcaatattttctggtataaaatcattatcaacgtagaaattttgtttcatatggcataagtttcttgttgatggaaggcatatgccattgcttgtgtgtgtgtgtgtgtgtgtgtgtgttgtgttttattttgaatttttctcatgttcactatttactgcatggttaatttgcttatccatcaagtacttacaacgtaaaactggaaactgccctttaggttcatctcattaaccattcaagaatggcttgttcagtttgcatttttcttccctacatcaccttgtgattaccttctagtcctaactaatttatcatcaatcagctttgtgagcgagcacatcgagaccttggaagaaatcgacatggagtacaaggagctggctctagaatcgggcatcgagaactggggaagggttccagctcttggatgcacctcatccttcatctccgaccttgctgatgcagtggtcgaagccctgccctccgcttccgctctcgtgacgaagaaggtggacgagagcgattccgacatggacctgatgcactacctgagcaagatgttcttcggctccatcttggcgttcgtcctcctattgtcgccaaggctgatttccgctttccggaacaccctgttgtaggtgatggtggcttcttttgtttggttttttgcactaggggtttggcttgagtaagtagaaaggcaggctcgtgggatgatagtgaatagtgatggttaaagttccccttttttacagaagtaatatgcatgaagtcattgcaaggtagcttaagtggtggttttaagcaaggagcctctaggggtaaattgccagtctgtaccagttttcttgtgctggtacaaggcaagcctatccttttttttctttttttttctttttgttacatgagcacattgataaaacatcattgatatattactaatgcataaacaccataatttttcctcgtttaatcatgttttcccccttttttccaattcaacttctgccgttctgcgtatgtaaagatcgttacagccaggagatgataccggtacggtatgatgagaaaactcgcaaaaggttctctaattcgcaagaaaaatgcaaatgtttgccgagaccggctcagtacatgcgggagaatagatcatataacctccatttagattataaatcctcaatttcaatctgacgtaagggtatacgatcaaattttcgcactatacgcaggccccaatattaattaacctcaccttattatgctctaggatgctagcgcctggtactgccattgtgctttggtttaaaaagttgatcgctgcataacagtataagaagcatgaagtaaattcaggcgatatttcataccgccagcttaaagaaaagcatgcacggactatattcatgtaggcaatataaaggacctgcagttacacatttcttgacacagcatctgtttccaattttacatccctcatactgccaattttgccaaaccagatcacccttttcatccgactcatctccttaatcaacagccacccgacgaatcacgaggcgcaaagttggactcggttgttggtacacagaaagcagggcatatatcaaattgaactagaaaacaattaagcgcgggagccagataaatacaagttgatgatgttgaatctgaattctggagatgagccaggaggtaaatactcctctagaagaacgtcccttctggaggttgcaccaacttgcgattctgcggggttgccatctccttcttgagctgggtaaggatagtctccatggtgtactcgcgctgccagtttgctagaacaccaaacttcctcgagtcaacctataggatcacagcaccaaatgaatatcaatcagagggagtagcctgcacaaaataaataaacttggcatctacatttgggaggagagaataccgctccagtctcatgattaacacacgacatattgattcttgaatgaaaccggacagatggtggcttctctgggtagtccttgtcacagaacagcttcagctggtagatgcgaccttcatggacactctgccagattgaggaagaaacagacacttagtaaaagttaataatattttatataagcagtacaagaggagctaggtggactctcaaactgtcaaacatgagaaagcatctagagctaatatatgtaagttttagcttgtagtagtgattctcctgcctttatggtcaacataaggaagttgaaaagctcaagtgtgcctcttcccagaaatataattccataaccttgtcacacatatcttaatgccattcaaatagcctttttccactaataaagacatcttctccactaataaaaacccaagatgaagcacagtacgacggtaaagatataaagccacaggagaagattttccatatgagtaatatgatatattgtgagtgtatcaggatagagtccataatctcacattatgtggaccaatgatggtgccagtccaagaccgcatgtagatgtcatctgcatcatccattccatagctcacggttccatctccaatgcccttttcaccacgttcaagctcttctagcaacctgaagtttcgcggaactgcaggcattttacatattagtcaactcctcaggatataatgcagttaccctcttaaatctacttatatagaaattgcataatggtgatatcattgcacagaacaaaagaagacaaaatcaacctagaaacagcatgagaagttttcatacccatgcatcaagtactgaattacagagcaaagacggctacaaccgagataaataaaatggcaatatcgattcccagtttcagaatttagtggatttgtagatgattactattttctgaagaaaaaaaaagaataacaccaatgtatcattctcccgaatgagggacaagagcactgcagctcagctgttgttttcttgtgaagcaaaacaaaattgaatatatctgccattggcgtggggggttaacaacaatgcaaaaaaaaaaaaatgtattgttctgtttgcaagacgatgaagaatcttgtgactcgaataccatacacccagaacagatatgtcggcatttgttaaacgcaagtcattgttttatctagtgcacagacactcagagtgcagtggctctaaaacgggcaatcatggttttgacttctcagattgaagcctgaactttgacttgagattgattatacaatgtattatctcaaaacagaatagtagacagaaatagtgtaacttcacacacaaagttcatcagtggaatataatgaacaaataacatgatctttggcaagtagtctgaatcacaaggccgccgaggtgaaacaatttcagtacaattgtttgaatggtgcaaagttccaacttgtgattagaacacaaaaaggcattacgttcaaacctccaaaccggagacgctaaaagctatttaattccatctaggaaagaaaatattaagagaagaccgaacttaacactgcaagaaaaacgcaatatagcattcaatacccaggtttttataaagcacacaacctgcatgcccacacgaaaaaacagatccagcaaaaagaaaccaacacagtctcatccagccgcgatgaggcctatacaacagctatctaaggaaaccatgatcagaagagcatatctatcttcattaaaaacatttccacttaaagtcaagtgatacaactaataatcccgctgataattatgcctcatagtccacttagagctaatggtcccaggcacttctcagctctccccttgtaacacccaagcagctaaaggaccacttgttagcaaagggaacaatttcatcctctaaggataccacaaatttactgccaaagccaaaccatcatcaacatgccgtaaataaattcgcaaaccgagcaaaccaggccatctagagagatcccatgaccgctgcacgcatgcaaaccaagctaaatcaccagatggatggaacccatatggtacaaaaaccgcagatcgctaattccaacaaacaaaccaacgcgtcggcgtctcgcctgatcaccaaccacatcgagcacagcacagccatggcgggacacagcgccaaagttacgaggcgcggaacggagcgaaacccgcgtggattctcctcctcagcctcctccgatccgaaggccctaggcactcgcgagaaaagggggggaagggaagaagggaaggggggattcgatcgatcgctcacc

SEQ ID NO: 7287 - DNA, 46957 bp, Oryza sativa
gtagcaaccaaacacagcctgctaggttcgcgtccccgccttgccttcggcaagcatcacagagttgccggtacaaccaggctagggcagccgacccccagctgaaggtacccgcctcgtcccagtccgcgagcaacggcagccacatccaagaagccatgtctccaccagagtcagggaacagaatactgccgaagatgtacagcacgtacgccctgcagtatcgctgtactgtagcctcgtctgcctcagcgggacactgaccgaagttggctcgcaaccaactcaaaggaacccctgatgtcttcgtctgcctctgaccatcaggtgccactggaggctccagaccaaggtactcctcgaccctctccctccagttccccgacgctgtgtcacctgtaaccggaaattaaatggaatcattagtaattgcaaaaaaattaacaaatgaatacgaagactcgttagtaattccctgacgctgtgtcacctgtgaccgcctgaccccggataggaagacccaggatcatggcgacgtcctccagagtgaccgtcagctccccgcacggtaggtggaaggtgtgtgtctctggacgccaccggtccactagggccgtcagagcagcggcgttgtacagaggcaccggtcgctgcgccatggtcacgaacgccaagagcttcgcccgccgtaggtacgggacgtaccggtcgtcgaacagtatgtgcgccgtgtgacctctgactcgaagggtcttcaagcgctgcatcaatagacaaacataatatgtgcaccggcctcaagtgcttgaatgcttctatggactggccaaatatccaatatgcacgtccaaatactcgcctctgtactccatccaccatcctggacttctcgggatgagcctcaacacggaaatgcatggtagggttctttgctttgatggcacgcatcagtgtaggcaagcgaacatacgcctcgtcccaatctccccaaatgaccttcatagcaacttgcttagcacgccatgctttgccatacgtaggccgatagtgccatatttgctcaactgcctcgacaatcgctgctggagataaagttggttcagctcgcacaaatgcctgtaacctgtttccaataaaccttgaagtaagttgcaaatgcttgccggttacttccgcactacagcatgtgtggtcttcgcccaccctagtcacccgccacctatctcctccactcttccttgcattaatctgccatttgcaatggcgatcgagacaagccacagtatactttactgacgcgttagattccttcacatggtacggccggtggacacggatagaataactctgtagccatatttttagatcatccatcgatcgaaactccaaccccttccttggttcatcacacattggttcgaaggcaccgtcatattgtggatccccatcagcaattgctagcccagatctggtaagatcctcgaattgtgttatttccgggtttctacccaccagtttcgcaaacacagtcctttcatgctctgacatcttacgcactggacgatcatcatcggagtcggaagcggactcatccaattcatcctctgtatcatactccaaccagcctgggttcaatccactgcgtatcatagcctcctcacactcctctcgggtatagaatttcagcctagccaactcccttaggcccatacttacattcttagcattcgcttcttcctcaggcaactccacatcatctcctacctcccgaccatcctcaacatctccttcctctcttaccggcacattctcctccacattaacttcctcccttaacggcacattgtcctctgcatgtacttcttcccttaacggcacattctcctctgcatgtacttcctcccttaccgggtcattctcttccctgacctccacatccgccatatcatttactccctcgcccccctccacgtcttcctcaatcaattcttccttcctactacacctctccgacagttcgtgacagctaatgggtgattctatgagtggactttcattaaggtctataagttctttcttccctatcctaccatatttcttccatgcaaacacctcaagagatttgaaatgtgaccccaatactatatctatatatgtttgccattcgatctctccattcaagtctaacataaatttatgtgacatgacaccgccgcccacatcgtatctcccttgcataccaaccgactcatcattccaatccaattcatgcttgatgcgagacattaactcctcaaaggtaggcttcgcaaaaaacactaattgtctaactgtcattccctcaaattggcttccatgtgtactttcatctaccacacaaccaccataatgaagccggaccaatctatccatctacaatttttaacccatgcataaacattaattacttgaaaataatatgtaattaccattgcaataccaatacttcaaaagctaacaacatgtctaatttttccaataaataagtacattactcaaatactacacattattgataaaaaaaaactctactcctacaaattacctacccttcaccacacatcaaccccttttcaaaccctctcaatcaccacaaatccatcccacatcctaggccatcaccacacatccatctcccatcaaaccctagtgcatcaccaaacatccatcccaaatatattttgtcaaatgtatcaataacaaccaaatggataaagatatgccacttccacacttcatccccacccatattatccatctaataatccatccttagccaactattatcaaaccacgtctacaaccaaaacaatgcaaaatatccaataaaactttggggaacttagggtttatagaggggtttaccttctcttccgatcccaaactcaatgccgcacaaatcaccttcgattagagaggtttttgggggagattgggcgaggagaacgcggtggcgaccgaaccctaggcgggcggctggggaaaaaacggaggaagaactggctggggcgacctcggccgggctctaagtagccaaggtcagcgccaacttacttggcactgaggttgggcacctcagcgccgaagcggttggcgctgaggtagctgccacgtcagctaggggatcggcccggccgccacggtggcacaatgtcagcgccagtctcgttggcgctgacacggccaacctcagcgccaatgcgattggcgctgagccgatggcctagttttggttgaagtttatggcaggggttagtttcgaattaagtttttgaaaagggtcaatttgtcaaaaaaaacgggttaaatcggacactatatacggatgaaataatgtcgatattatatttgttttcatattcctttttaaaatattgtattacagttttgacccatttttattgccaaagtttttactttgagccaccgttaaatcaacttttttttttattttggattgggtaacttgtggttattttttcggtttgaatcacccaactctctttattattcatgtttacccttcattttggtgattttggtgaatatatggctttgcacgtagatggagaagtttaacggtgtaccaaaaccgatttaattagggttgttgatgggtgctaaagaagttatttgggatagtctaaactggaaaaaaaaccgagacaaagttatgcagtccaaagtgaaaagattggtttaaaggtgatttaaagtgaaactttaacaataaaatatgttccaagctgtaattcgctctattgtttatataggtaaataagtatattcaatatgaaaccaatataaattaattttaacatagatatgaattgaataagcctaaatggggaggtctaatgagcaccgctcaagcgtgacaagaggcacaacccatcacacgtggatctagccattcacttttctaaaataaaaaaagacttcatatatgtaaacttcgtacataaactttaaatccgaatcgacatatatattagcttgttgttgtacaaacttttagaactctaggtatataaagctttggtgtatttttttttaaaaaaggaaagatgcaaatgtaaaaaagaaaaaaaatgtaggtgtttgcgcgagtataccatgtgcgaacatttggtaggtagtagcattttcacatcgaaatcgctcactgcgacaaacactatcacgattaacacataattagctcatttaatggatcaaactatgttcattgagtccaacaatacaatatgacctgtataaatgcatgttgttttatactctaattagtaaatatgcttatagcactgagtaatgttggactgttggcaagccagactataattaaaggaccgaagaagtagactggacgcacagacttaagagggcataaatgatgtatagttgtttggcagggattcgcctagcaacaattcctaaatatatgtaaatatttttttatctatttatgacttatacatcgtacttaaatttgtagtcgggaaacattattcatattcaaatttgtattcacactatttgaagattgttcacttcaattgtatctatattcatttatgtctaagagtggacaaaacctatccgctctatataagatcccgacaaatcgcggaaaaattcaaacaatttttaccataaaaaattgaaatttggttgaacttagccggtttatttcacatattgcaacacatctatatatatgtccgataaccgtcggttatcgtcgatagtgaaagtttcaaatgtatcatctccatttcataatacatgtatatattcacgtattttttaaaaaaaaactagaaaggtagcccacgtacatgcgcgggcacattgctgacaccttgtttaatgttgcttgaatttttatgaataatattaacatgtgggtcattttttggtaatatttttttattatattctaaatctgtttttgtccatgatttgtttaggattgctttgaatgctggtcatgattttcttctaactaccatatcaacatataaattctacactaaaattatttgaattcgtaaaatgttgagtttatgagaaaatatcgtatcgtggaaatggagttgattcacatggacctatcatttgtactatacgtgtttttaatatttagtataacttatttttggagtttctaaactttaagtaatagcttttcttgtgtactatagatatctttattgaatttaggatattttaatggaagaaacgttcaattaagatatatggtaagaggaaaattgtatccaattatgacaaatttatatttacttctactacctccttttttcatatgcttactatgttcttggaaaaatgaatttaaaattgaaataagagagtaattatataaataaaattagtatgtgtagagtatttataaataaaattgttgatgacatttgttgaaattgggcattggtcaatagcatttttggattttgtcatcctatttggtcgtaaatatttgtcaactgataacagatatataatgatatactttctactgtcatttgttatataattttcatgtatgtttggattacatgaaaagaatcaaaatgtgacctaaaatataattttattttataagttgaaatatattcaaaacagatagtaaaatataatttaatggtaaataatatgatggtctaaacttcattttcaattgtagagcaaatttagttatgtatgtttgtaaaagtgatatatgataaaataatatatgtcgccatttgtttgtcatatatgatgaaaagggtcaatatacgacccaaaaaacatttatttatttattataatttaaaatatgtcagcaccagtttaatcatgtctcaactattacattatatgtatgtaaaaattgtatgcgtaattttgaatttatagttgtttagaatttattatgataaataacaaatattatctcaactactataaaatagattaaaaagattaaaggaaaaggaagagaaggtgaggagggtcggttgcgtgcatgcattatgaggatattttataagggttaatggaatccatgccactacaaatatgccattttagaaaaataacattactattcacgatattggctacgtgccactggaatttgagaaaattagaaccatgtcactccatcacattatctgtcaaaaatctccgttagccccaactgcacgtgggacctaagtgtctgtttcatcttcacctccctcccatcttttctctttcctcttcctctctctccaccactgtcgtcgaccaccactgtcactgccgccgtcatcgaccacctccgtgaaggcctcgggagccacagccgtcgccgatatcatcggccctatccacggcaggaggcttgggagccgtcgccgccgctgccatctgtagcaggaggctcgggagcagccgtcctcaacgccatccacgcgggagggctcggaacatgcagccgccgctatccttgacgccatccgcgtgggagggctcgggagccgccaccgccatctctgtcctcgatcgcatccacgatgggaggtcttgggtgccgtcgccgccaccatccttgacgccatccgcaatatcgtgaatagtagtggcatttttctaaaatggcatatttgtagtggcacaaaatataagtgattttggttgaattggatatcctattactacgaatctaaatccatgtccatgcatccaacaaaaatatcttatattttgggacgggggaatatgtattttctaattaagttcttattattttaatcttattaattagttttatgtgttttatattgtctagtgtaaactacgtgttgttaattacatggtttaaaaatctatgtgtttttccaattcaaaatgtgtgttgagtggccaatagctggtccaaagcaatgtatttcttttacttgttaaatacagttaatttgggatttgaattataagttttgttataaatgatctaatagtatacatggataaaaaaaattagctatatatatgatgtagatgttatagttgttcaagaaaaaatttacaacaaaatatgtttcaatctaataaggcatgaaaatagaaaagaggagatgcaccggccggttatgggtgtacgtatgtgcagtttgcagcacatgtacctgtacagggccttttcttttattattaaagtaaatgcaatgaaggaaaatagtgggtcctttgttaaataaaaaaattggtgggtccaccttatttaaaagtgccacgtgttgaatcaagagcgtttgtagaaagatatgtggcggcttaggagtgtttatatgaagtttaatgaacttttagtatataatagatagatgtatgtggacaatttttacatacaaatatattttagaaaacaaacaaatgcctttacattttgcgaaatggcctgtagcctagtggttacaagagcctcggtagcacctgaggtcttgggttcgactccccatgggagcgaattgactccccatgggagcgaattttctaggatttaacggcgctgtgctttcagtggtagacgaggcgctgtgctttcagtggtagacgaagcgaggcgcatgtggtgactttgtcaatctctccaggatttgccgatccagtcttcgaagatactcataaggttcatgggggtgagtgcgcgtgcgcatgtggtgactttgtcaatctctccaggatttgccgatccagtcttcgaagatactcataggattcataggggtgagtgcgcgtgcgttgtgagtgtctgcattgtactgtgtaattctaaaaaaaaaggcctttacattttagaatactgtcatacagcaacagagcgagaaaaaaccgggtcacttgcacacctttcaggccgagcccgatcgagacaccggagtgtctgcaaatgcgtctccgaatacgaatacgattacgaaatacgacgaaatggactcggaataccttctccgagacagacttgtacacgcacacacgtagtgcaagtcgaagtagacgaagtgaccgtatcgctataaattcaacgctcttccgcgcctcgtctcctcaacacaaaaccaaccacgtcctacgaattcgatcgcttcacaccaagaaaacctcgctagctagcttgtagctcgccatgccgggcggcggcgcgatggtggcggcgagcggcgccggccggcctgagtacccgggcgggctcaccatgttcgtgtccatggcgtgcctcgtggcggccaccggcggcctcatcttcggctacgacatcggcgtctccggcggcgtcacctccatggacccgttcctcagcaggttcttcccgtcggtgtaccgcgcgcagtcggcggcggctgcggcggccggcgggaaccagtactgcaggttcgacagccagctgctgaccatgttcacctcgtcgctctacctcgccgcgctcgcctcgtcgctcggcgccgccacggtgacgcgcgtggcgggtcgcaagtggtccatgttcgccggcgggctagtgttcctcgccgggtgcgcgctcaacggcgcggcggcgaacgtggcgatgctcatcgtcggccgcgtcctgctcggcgtcggcatcgggttcgccaaccagagcgtgccggtgtacctgtcggagatggcgccggcgaggatgcgcgggatgctcaacaacgggttccagatgatgatcaccaccggcgtgctcgccgccaacctcatcaactacggcaccgcgaggatcgccggcgggtgggggtggcgcctcagcctggcgctcgcggcggtcccggccgccgtcatgaccgccggcgcgctgttcctcccggagacgcccaactccctcctggagcgcgggaggcgcggcgaggccaggcggatgctccagcgcgtgcgcggcgagggcgtggacatggaggacgagtacaacgacctggtcgccgccggcgaggcgtcccacgccgtggcgagcccgtggcgcgacatcctgcgccgccgcaaccggccgccgctggtgatggcggtggcgatcccgctgttccagcagctgaccggcatcaacgtgatcatgttctacgcgccggtgctgttcaggacgctggggttcggcggcggcgcgtcgctgatgtcggcggtgatcaccggcggcgtgaacatggcggcgacgctggtgtccgtgctcgccgtggaccgggtggggcggcgggcgctgttcctggagggcggcgcgcagatggtagcgagccaggcggcggtgggggcgctgatcggggcgaggctggggtggtcggggacggcggcgatcccggcggggtacgcggcggctgtggtggcggccatgtgcgtgtacgtggcggcgttcgcgtggtcatgggggccattggcgtggctggtgccgagcgaggtgatgccgctggaggtgaggccggcggggcagagcatcacggtggcggtgaacatggccatgacgttcgccgtcgcgcaggccttcctgccgctgctctgccgcctcaggttcgtgctcttcttcttcttcgccgggtgggtcgccgccatgaccgccttcgtcgcgctcttcgtgccggagaccaagggcgtccccatcgaggacatggccgccgtctggagcgaccactggtactggaagcgcttcgtcgacggcgacggcgacggcgcacgacgccggggagacattgagatgggacacaagtagtagtagaatttactcactgcaccgtactacacttcatgtttttcttttgttgttattcagctattattagatgcggattttctttaattactactaaatttcaatgagtgaagatgttgtaacaaggattacatatttgtgttgagttgagtatgccaagtacatatgaagttatgggatcataaacgagttaacacgtttaaactttaaccattaatatctcttggaataattttgatttaagtttttgaaaacaataagaccgaaagaaaccaccaccgaaatagaacctttacgacactctttttccttctcttgtttgtcattaacatacaccaacattttaacttgatctcgagatgcgtgcaatgataagaagtgtatgatttcaactccaatatctcgtgttaaatctccaacacgctcataattttccttttttaattacacggcagacgcatacgcacacacaccactacatacgtaacaccacactcatacccctacaaatgcatatcccaacacatgctctaagagacggaaactaacagcacattcctaatctcactaaagtcctattaaaaatccacttgcatatgcgtagtatttgtgggcaccaggatttaaatcctagtgagtgaattcatgcacccacgactccatcactacaccgctggtgcttccccaacatgctcataatttctttttaaaagaatatttggagagatatctctcggcttcaaatctcattctcggtttatgagctgacttatgcttccatcttcattgcacctctgttgctggcatagtatttcctaactgcattctccaaatctgcctctgcaaccctggccaatatcgaacaacaaacaaatacaaacacacaatttcagtaagagtattggtaattttaactcaaagcaagttttcttacgttctaaatggcctaataaactgcaatcgagccgactatataaaccttcttatagttaggccgataaatgcatatccaaccaaaatattgaccaaaattaatcgggcagcaacctactccaatagcagttccgaattccaactacacaaacaaaaacggaaggcacgtattcaaataaaacaccctcatgttgttgacagaagcgatacactaagtctgcattccatctatttttcaaaaaattatacttaaacaccctccccagtccccaccctggttcaaaaataagtcacataaagactttgctttaaaagtgatttttgccttctccaaactttgcaatggacaaattgttaagtgatcttacacaaacaattacaaagggctctaacagtgtacctaaaagatttttcccatttccaacgcatcatcaacaatggtccaactctaataatttaatttagagtaaattttacaaaactatagatttagcattgaatttattatgatcctacagatttaagataagacgaagtaccataaatctacatgttcagtcacaaaattatcacaaagctacaaatttagcaccaatttaatcacaaaaccacaacacttatagctccaacacaatggtagtactagggactataatttcaatataaaatctatctgcggttttatgataaattactaaatctgtagttttgggtttgcatacatcttaaatgatagtttgatcaagatatctatagttttatgaaatttactttttaatttataatacaaggatagtaatacttccataaagaaacagagataatataacgttatattgcacgaaatttattgatacaacaaaataattgactgttcaagcataaggtggtaaagaagacacaaaaaccttgccacgattagcacgctagtaactcaactacaaacgatacacacagcagcatcagttcactggatggagcttctccaaggatcattctaagctaaggcactcattccgatggcgtgtggcaatgcttctacggttcttcacgatagataccaagacacaatcaggcagtcttgggcttgggtttaagccgcttcaattgtgagtacaggaaaactccggcaagagcgactccggttcctgcagggcgcaaatatttggatatgtaaaggaggtgcgatgcagtcaatttgatacagaagtgaacagaaaatgattcttacccagagagttgataggcgaaacaggggtgcggaagaacagaacggatgtcacaatgaccaccactcgcttgacacagttacccaccgagtgagtaacaggggacactcttgccaggatcatgtacgacaccttcaagaaattatgtgagatcagcaagacatgggctttgcacatgtatgatgattcatcaatgtaacaactgtaatgtattcagcacatagaatctatctgaaatgaacaagcgcatccagagatttcaaaaggccaagctatttttagaaaatcaattagatggctgacctgttggtatgcatggaaacagaacgcagcaatcagtgaccttgtgtatatctgttttaagttcagaccctacataagaaagaaaatagtcaaaaattgcaccaaacaatatgtaaggagcaatttgtctataattaaatatcaaggtgctcacagcagactgcagaactgtcggagtgactttgacaccctctgttagcaaggttactggggccaagaggaagaatgacatcactgtaatgattgagaagagggtaatgttgtccagagattcctgatcagaaattgggaaagaagatcattagaattaagttatgtaagagccatggtgacaaacaatagaggttcaaggaaaaagccacagataggcaagtgtggacataaataaaaagctctgttaaaatacaaattttatcttgaaacagaacattatgaagtgacacatcctaaaataactgatgaatattactaaagcagactattcaagagaaacacacacttgtactaattctgcaattcagttgccaatatctatgatgaccgcactctaattattcagttacctccttcttcaccataagcttcttgctcaacacattccttgactggaaggtgacatttgaggccattgcactccaaaatccagccctgatatcatataaattacagacgaatcaagcatatagcactttgttagctctgctatcagcaggcttatgttatatttgcagtttccacagcgaagacaaaaatagctagctatatcccttaccagttaaatgaagcttcagtaagagatgccaatgccacaccaccaacaattggaacaagagacaatacaacaaaaggagtaggcatctgcaaagtgattatgtatgagaaccaaaccaagaaacagatggtttttctaagattatatgcggttgcatagttatcactgggcaccagtgcagaacattaaaaaattacctctccgaggaaaagtgctgaaagcagaactgaaaagaaaggctccatagccttgatagtatgtgtaaatgacactgcaacctttccaaggctcatgttcgtgaaaagattgcccatggtgtggaccatagcgagaggaaggatagcagcaagctgaaataaggacagttacaatagttggcttcatagtgcaatacatgtgtatcgaatgttgtcacgatgtatcttatagagaaatataattacctgcgcaccggagatctttggtcttttaaggataccggtaatccacatgaacagagcaatgacagtgccgacagcaaactggacatttgtgatgtttatggggtatggaaaaaccttcaaaacctgtcacacataggaacaataaaggaaagttgttttatctacacgaagccaatgaggagatcaagaaatttcaacagattaaccataagtgacaccatatataatgaacgaaaacaaacttccatccctagcacaatttgttttggtagaacattggatatactcactataagacatggatacatatgagtctggacaactttgaagaaatgtttgttctttttccttctatattctatatttctaccagaagacatgggaaattgtctactgcactcactagaagacatgattttagcaatattacccgttcgacatcttataccagatacaaacataaactatccacaaatgtaccttttagaaagttgtgacaaaagtttgatagaaaaggtgtaacgtgggggaacatctctaaaagcccaacgaaataaactaaatcgctcttctttccacaatatacattttgagtttgtactaatccaagatctagacgagcttgagcaaattcttgcacccattcagtaagtgggttagaaacatttacagaaaacgacatataccagcatatggaggcaaaaaaggttataattagaagtgattcacaagacaaataaaatcaatttcaaaatagttccctcttttgctcaacaatctcaacggagcgagtagatctttgctgaatctaaaaggcgaatgcccgatccaagatcagattgccatcagcgaaccattcaccactaacagaatcacatgtaataaatcccaaatgaaacatcctagtctcccccaaatctccgccaaattggcgacggcaatggatcaaagttaaagccgcctcacctgcttgttgtagatgttgaagtagatgttgaagaggtaccacagcccgaagagcgcgccgagctgcagcgtcttcgcgagccctccaccctcctccgcccctgcctcacccgccgccgccgctgtcgccgccacggccacgtcgcgtgcgccccgccgccgctcatcctcctgctccggggaggccggcacgagcccgatgcgccgggcggagatgcccgcgcgcggggccacggcggagaggcggagccccctcggcgggagcagcggctgcccgactccgacgccgaagccccgggggctagggttgcggagctggagcggggcggcggcggtggtggcgccgcatggccggaggagcccgacggccgccgcgctctgcattgccgcccgtgggagccgcggcctcgaaggttctagaagcttcggctcgcgtggggggaagcggatgcgtcgaggcggcggcggcggcggcggcggagtgctcgaggatggcgagagcgtgagagtgggagagaggttttaagcagcgacgcggccgagctgagctggcaccggccgagtctgcatgctcaatgacacgtgggccccgctgattttgtggaccaacatgtcagtgtgttggtggctgtgacgttggctgggcccgcgcttgccagctgctgggtggaccgggagcacggtggtccagcgaggggcagttgtaggtaatggctgcggggcccacttgtcggtgacagtgtggttgtcagatgggtggtggagcaagctcagcgacgagtacgagggtgagactgtgaggtggggcccaagtttggcataggtgcggcgacggcgatgaccagctagctcatcgtggaatgcagattcgggcagaatattcttgacgccgatgctataacagatcttaaatgaaggttgagtaattattcatttggaaatcctgttagtatataagccaaactaatccccttttgtaattttattgagttcatgtgctacactgctctaaagttgtactatgcactaattttgtagtttaactaaaaatgtctgtgcgttgaaatgagcaagactttttccaatgctataacagctattaagagctaagcaacgaattaaaacattggtatcactatacactttaattggaaaaaattaactaaaatcattcattggttttgggtcgaaagcattccttcattccttttcaacccccggcccctagcctaatccgttgcttcctacctccttccgctcgacctaacccattatgtgacattctggcctaattaagatatagcatgtgtggtccatgagagctgtgtgtatgtttagtaccaccttattgtttagcaatagtggagccaacttatagggcatcttccctccaaccatattattcctgagttaaccctttaacacgaaacgatgacaaaaagtgtaaatgtgatggtatgtgtaagtgagcccgcccgtcgaatgagctggctacgtggactagtgacacctataatattagtgtctaaataaaaaccgacacctataatattagtgtcggtcttttcagaagaactgacaccgataattaagatcccaatttttttaagaaccaacacttatatttatactataggtgctggttttttaaaaactaatgcctatgaaaaaaccgatcgaagccaatcaaccttatctccgattccccacacctcctccaccaccatctcctcctcctccatagttgctcccactgccccactctcacccaccccaccaccactgcacagattgaggtccagtgcagttgctattgtgactgcacaatagcaactacatataattagccctctatttcttgatccaatgttccaaatcgcttgctatagtgaattcagaaatatatatattttttatagtaaagcgctacaatacttgctacagtcatccatttcaagcccagtagtgcttgtgtgactgcttaacttgcagtcacactagctactgcacatgaaccagatcccagttgcacgcccacttcctcaccaccacccccaccacctgccgcatccgcctcccccccacccccccacctacctccgccagcctcctcggccttgtcgtcattgccttcctcatccctttccctctcaacatctccctggtgcagtggccgcacggtggctcgggatctagctcttccctctccctctcggcatctccccggcgcagcagcgagtcggtggcttcctgacacaatggcgagttaggatctggccctgatctcgagacctccatgccggtgaggcagcgaggagcaacgacggcctcccactcacccctccctctcctatcatctcttttgtgatttattttgtcatttctgcttctactctcatcttctgtgtgacttattttgtgattttcaattgaattctcatatcctgtgatctatccggatgattttgtgatgatttcgattggattgggatttagtttttgagtttgatttgtgatggtttgggatttgaagaggtgtatgcgatgtggatgatggactaagacggacgaaaatcctctaccagaatccttattatgtagtatttttttattatactagcaaatatgcccgtgcgttgcaacgggtgaaaaaaatataatgataatatatgtttttcatgcataaccatatatgacaatcagaaaatcagaaaattggaacatcttaaatgtaatatcccaacctcgatgatggcaaccttacgatgtttgttttacctaaaataattagattattcatgtgacaacatgcatataatctaaaatattcttttaatctcattattgcaaccaatcaaatcctaatcactgtgcactcttctctaaataacaattaaaatatgtttattttctaagattatttccatataatatgttatcaagaataatagctatacttcacaaaatagtatgataattgcctataaagatgtgcagggtctccaatacgggagaataggggtggaaacgagccgagccgagttggctcggctcagctcgtgaaagcttgctcaactacaggctcggcttggctcggcttgattagttgaacgagcaaaaagtgcagctcggctcggctcgtttcaaagctcgagccggctcgagccagcttgtgatgtacagcagcaagtaaatacttcaacaatagagcaatcaattagcaagccaaatcaacatgtacgatcaacaagacagcaacaacatattatacatttcacaagctgacaagatcacaacttcacaagaccacaattccacaatctccatcattcattcacagcctcacactcacaggacatgccccaacatgacacacataatcttaatagtcatgaccacaccataatagaagcatagagtaatatagttatagtcttatagagagtacataacttagagtagaccacattccaaaagtccaaagtctccattctcaaattcacaaaataattatagaacatctaattattatttcgcaaaatattaaaaggaactctccaaatctccaactcctagactttctccacactccacagcaacatgttccagccatgagccatccatttgcctacataaatgataaatcatcatgtaattgaataatatactacacaaaacacatggctcaaagcctcaaactatagtattggtacaacatttttgatttatttgcctcattctttctgtaattgaatcattgacagtttgacactgacacacacacacacgctactccactgaccacaacaatctacagctacatgcctacatgtacatgcatcacaaaaatgagaaaatacatcacgaacctcttcatcctaggctcgtcgttgcggcgtgatgcatgaattgtcgtcgatcggttggcgacatggcgtctcggcgaggtcatgatggacggcgtcgagtcagggacgccggcgacgcagggggcgtcgagctcggctcgagcggcactggggacggtggacggaggccggaggtggtgcagggaactagggaagggaggcggcgccgcggcgggccgacggcacagggggcgtcgccggggagggaggacggagccgacgcagccacagacccacagtaggggaggtaggcggcgcaaggagcgaggcggcaggaagggaggtggcgggccggcggcggcggcatagagggggcttcgaagttcgaacggcgctgccggcctgccgctggcggtctggcgctggggaggggatggatgcggcggccggcaactcctcttgccagtcgccgccagcgccagtggctgaggaacggaggaaggggattaggggagggatcggatctggggcgtcaggcgctcacgggccacggctcgcgctcggctcagctcaggacttagggtttctctctttcatgggccagacaattgttaatgggcttgggctcgcttagggaactcagttttccataggcttgacaagcctaccgagcagcttgcgagctagctcgggctcggctcggtttggaaacgagctgtggagggagctcgggcttggctcgtttagtcttcgagccgagccgagcttcgcgagctcaagccaagcccgagccgagctcgcgagcctgagctttttgtccacccctacgggagaatagatgacgaaacaaaagtcgtgtaggagatggaaaaaaaatcgatggagcctatccgaccaagtatccatcaatttagtcttttattctagcagttttttcctcatatgctttttttatttttacagacgatggaaatatttttttctcgcgtgtttttttactgactacggaacttttttttctagcgcgttttcttttgcgcttttttctggcatttttttcctcatgcgttttttaaaccgtttttattttctcgcgcaattttttttcttttttaatatacggtagaaacttctctttttaaatatttagattagattagattagagataaagaagatatataaaagaactactaaaacgacgaatagaaattagacttttttccgccgctcttttttccgtcctttttattttttttctcttgtattttttttacgaatggttttttggccactttattagtgtcggacctttcataggattcgatttttttatcgagtcacatataattcctttttctttggaatcagatattttttattttttcgcccttttttttaccgcggcgacggagtcggattagtttctatttttccttttttttatcggacagatttgtttttttttcacccctctttttatcggattttttttattttttcgcttggttttttcgttcggtttttttcgtccagtcgatttttttaccatgtcatatataatttctttttctttggaatcggacagttttttaaaatttttttcgccctttttttaccgattcgtttcgtttttttccttttttttgccccgtattttttttgatcggactgatttgttttttcgctcggttttttggatcggacttttttctcccgtttttttcgctcccttttttttatcggacttttgtttcacccggtatttttcgctcggttttttccgcccgatttttttttgacagacgaaggaatcatcttttatttttttaagtagtagagagtagagatagagatagagatagagaagagatatagatataaatatatagatatatatatatatatatatatatatatatatatatatatatatatatatatatatatatatatatatatatatatatatagattaaaaccaaaacataaaattgaaaccgattcaaatacggatgacgtaccaaacttccggtaaaaacatccttaatttataacagtagagataggtaatagagatcagatggtattttttccttttcttttgactttttttggacggtgtttctttttcttttcttttttgcatcctgaacggactttagcgtttttctgtttttttccgtttattttgactttttttagggtgtttgttttcttttcggttgcatcagatcagactttttttccgtctttttagtttcttttacagccggcatttttttccacagtttttttcgcacggtttgtttttcgcccggtttttgatcggacaatttgttttttttttaattttatttttttcgcccttttttaccgtgttgacggagtcggattcgtttttctttttcttttttttttgtcctttttagatcggacagatttttttttcttttctttttccggttttttcgcccggtttttttatcggacatatttggttttttttcatccggtttttttacggacgatggaagcatcttttatttttttaagaggatagagaatagagatagagagaatagagatagagataggtacatagatatggtttcttatatggattgaaattggaaatgaatttttaaaacatgcatgttaatggtggcaatcttctgggatctctagcatataatgataaacacatgcattcggattacaggagctccgaatttgactaccacatccacaagcaactgcaagagcggaaataacaggttaattaattaattaattagattaattacgtcgtaccaccctgtgcagtgcagaaattaattaatttcagatatacatatgatcgatggggtcgatcattcaggacacgataagcatcaagaacgcggacacggcggcgagcacgggccgcgcgacggcggcgacaatggcggcggcggaggaggcggccttgtcctctccgggcttcatctggggggtgtcctcggggcactcgaggccattggcgccctccttgcaggtgttggcgaagaggcccggcgggtacttgccgtagaggttgatgtagctgaacatggaggcggcgcaggtggtctgggcgtcgttgatgtaggcggtgaaggggcacgccaggtccttgagcgcctggcagcacagcgccggcgggtacatcggccccttgcacctgctcgtgatcaccgtgtagttcgcctcctcgaagttcaccgggcaatccttcttcgcctgcagcaagctccgccccgcgccgccgctcgccgccgacgacgcgcccaccgcctcatctgcacacatacatgcatatagtgttcgtcagatctccagatgttgcgtttgacgacggtgaggaggacggacttgagatgaagccggcggtggaggcggcgaggacggcggcgagcgcggcggcgaagagcgcgacgcgagcgtgcagagacatggcgcgcgccctggcgggatgactagtggccgcgcgccgcgccggccgcctctcccgttttctcgcgtgcagagagacgacgacgacgacgacgtgcaggaggaggagaggagttaatcgctcggcggcggcggcggtggcggcggaggtggaggtggtggtggctcgtgcgggaaatgggaggaggcggtggcggtggcgggagagatggagaggagagcggaagcggcggcggcgggcgcgcgcggccgagccaaatttggcgggaagagcgctcaaaatagccaacggtttttggacggtcacgaggaccacacctcacagtaatctaatgatagagttattatgagtttcatcagtttcagagtttgaaatttgagacatgtcgagtgtttgaattttgaatttttgaacatgagtgtcctcgatctcctatgtttctattgctccatcttggccgatttatgaagaactgcagttcaggtttcctatgaaatgtagagaattttttttgttgttcttcgaagaattgaactggtttttgcgagaatcgtaaaaatatttctgatagaatttttattcgcttgaaattttgtgacggtgtagtaaaattttgagcaaatttgaattggcaattggattaattcaacgggttgttcgtttcttgtttcattggtactccctccgtttcataatgtaagtcattatagcatttcccacattcatattgatgctaatgaatctacgcatatatacttatttagattcattagcattagtatgaatgtgggaaatattagaatgacttacattgtgaaacggaggaagtagcaagatttcggcgtgcgcgcatgattgcaagattcatggagaatgccagatttgccagcaaaaaaaaggcaccaaaatccatacgaaattggttgatttatctcgcaaacatcgacaccttgggatgcttctgatctaaatcctaacaaaactaatcagaaatttattacaaaaaaaaatctgatcagtccgtcagattcttcagacggcgaagaactccaaggcgttgcggaggagccggccggcgtacgggtttgggtggtcggggtacgtgcacccggtgctgaacagcagccagtgtcgccggcagcgcttcaccggcaggtcgccgacgacgcgccgctcgccgccgggcgccacgacggacaccgcgtcgtcctcgaacacgaggcggcacagctcgccgccgctcgccgccgggtcctggcacgccgccgcctccggccactcggtgtcgaacagcttcaggttggcgaggtagttcccctcgtagccccagctgcagagcacccaagcgacccgctcgggccccggctcgatgaggacctcggcgacgcgcgcgccgccgcggggaacgcggccgcgcggcaccacgctgagctccgggtagacgtcgaatcccgggccgagcgcgcggcagacgagctccatgccggccgcggcagggaggcggttctccaccgaggcgtagtaggacacggcgctgcggcgggcgggcaccgtggccgtcgccggcgacggcgccaatgcgaggaggaggatgaggacgccgatcgccggcacggtcgtcgtcgccgcggcgaggcggcggcgcgccatggtcgacgatcggtcgccgccctcgcttgggcgcgaacgtgatgtggtggcttggcgcgttgcgtgggccatgcctccgcgcgttttttaagatgcaaacttagctcgcacgtgctgtgcgttgcaacggaagaaaccgcatggaagaggatactcacccctctctgtttagtttaggcatcaatcgaaaacatgtgaactttttcttttttttttttgctactaccttcgttttaggttattttacgttttgagtttggttaaagtcaatctgttttaagtttgactaattttatagacaaatatattaatatttataatactaaattggttacatcaaatcaataattaaatatattttcataataaatttgtcctgggttgacaacgttactatttttcaacatacttggttaaacttaaagcagtttgactttaaccaaagttaaaacgtcttataacctgagatgagggagtatttgatattaaactgttggtctgtttttgcctctaactctgaccgaagattatctgaaattcttgcattccgtacggggtgctagtaatatttttttcgcatattagaaaccgaggaacacaatctcgatccattttcaaaattttgaatcaacttttggggaaaaaatattgaactttcatacgaatttgacagttttaattataaatgttgcctgttttagagcatagctcttagagcatcttcaacagaaactccaaatctcactcttcaaatgactatttgtccaacttgccaaaccaaatggaaagtctaatttgcatttcacttcaacagactctctattacactatcgaatctaaatgtgggtctcacctattagcctctctactatttcaccgcttcttcaccctctctctcctctctctctcccccctctcctcttctctgtcgtgccactggccaaatccccgcgggaccgtaggcggtggcaatggtcactgtcgccaccaccatcctcgtcgtctcgggcataagcggtgaggttgtgcatgggcgtgatgatgacgaagcggtgacgcagatttgggcaaacggcgacgacgtggattcagccaaatgggtggtgcaggacctcttgctcgcaccggcaagggcggtagcggcactgggccaacaaacaaaggcggtggtcctgtagggcgttgcttcttcttcggattctcctgcagggtgccgccgcctacggagatcttgccattggcttgccactccgaggggaccaggtcccgtgcctccgtatggtcatcggagatctcgccatcctcaagcttccgccgtcagccactacctctcccttttggccactctgctcccgaacggagaaaaagtgaatagaaggttgtgggacccatggatggcaagtgggataggttggccaagtttggcaagtgagggaaggagtttggccatccgaatggcttagagagtggaatggagaggctgttggagtacgattttctttcaaaataaagttgctaaattttgacttggagagtgagatggagaggctattggagatactcttaggcttggttcgaacctattggttcgcaactcattccccgcatggaaaacaaggtagcccattagcgtatgattaattaagttagctaaaaaaattgaaaaatgaattgataaaatttttaaaacatttttctatcgatttcttttttacaaatgccacaccatttagcagttggggaaacacgtgtgtagaaaataagagtgtagaagatgagaaaggagagtgtcaaatacaccctttgacgaatatagaatcactcatacttctttgttaaaaaaattcggacctacctatgtaataaccaacatttcaaacttcaaaaataaggaaaaataaaataaaattactcatagaaaagaaatattttggcacaattttggatagagctaggcgttagtcgttgtttcgtaagttggagaaaattgtttcatccctggattaaatgtttcagctcagttcatcaattgttttaaaggatgcaacatttaataaatattggttgcaacaccaacaaaccattgtatgaaatgttgagcgccaaccacactcatccaaaaatattacaaaatcaaaacttaaaatgtgcaatagatgtatgaaacatcaaattttatttgttaaaacatatatatttatcaatcggaatataattacatgagatcttattgtaaatatttaattacaatgaactcgttagcagatcatatatcagataaataatttagaagagaaaattgttttaaaaatatatttggagagatgcatccatgcatagtcctccttggaggcggtgttgaggtatgccctctttccttctctgacgagtttccccgaggaaaaacctcgctcaagagtccttgggcgggtgatggtgatgctcccgtgtcgcaacctccttggaggcgtcgtccgtggagatacctatgcctttttcgctttgaattgttggtcctcaactgcaacggtgcttggttgtcatgatggtggcgagtctgtgtgggggaagagcgcatctttcttctctctcacatttttcctccaaagctctaaattgtgatgatgttcgggagtcctcacttttggtgattagctgcctagcaaggcttatgctggttgggcggtttgcggtgctcttggctctatgttgacgggtgggtctatagggggatgggaagatctttctactctctcaccctctccctatgcaatctaatatcaggatgtcatttgcgagcgcttgtgtccttcagttgtttggctctatcagctttgagcggtgtcgcgatgttgtaggcctagcagcgactggtctcgcatagcagtagctagcttggtgcaaggttttctccctagtgatgtgtggtggtaccgtcggcatgtggttggcttgtgggtgagctggctgagtttttcttttcagttttcttttgcttttccttgattttagtctccccaaggttttaatctaactgcaggtgtgcgcgcagtctgagtggcgaggctacggcagtctgatcggcggcttgggagcggatcgaccgatggcaacaggggttcgtcatctactatgttcgaggaaaatcttttattccgcaaaagattttgggtttttggtttacctaccattaacaccccctcccccggtagctttgtttggtcttgttcaatcctggggctgtttggttcccagccacactttaccattacttgccaacaaaagttgccacactttgcctaaggtggggtgatcaaattgttagccacaacttactaagcctaagggaatcttgccacacttttttgagccattgacacgtgggacccaatttgttggaggggaatcttgccacaactgtggctacaaccaaatacctgttaaatttgcctaaccttaggcgtggcaaactgtggcatagtgtggcttgcaaccaaacacacccagcattcctgcactcctaattaatatatataaattcattagccataaattattttccagctcgtgatacacgccataatctgaaactcagatagttaatttgcagaaaacgaaaaggaacattagaatgagatggcaaagccaatttgctttgttgtgacaaagaaaaaagagaaaaagaaagatggccaaggaatgtcttgccgagagatgtaatccaatgtatttattgttgaaagaactttcaggcaggggcgttcttacgttattctacctggatctccgaatcccgagtagaattttaatttttagttgttttagcctattaccatattattagttcaaaattatagtaatatactccatatgttatgatatgtatgtgacttctgatgatttttttctgggttggctattgctttcacatactaacaaaatgaaaaaacagacatcacatcaaattttgcattacatgaaaaataagcaacacagtaactaatcaggattcaggaggaacataatactgtttgcaatgcaaattgtttccagcctgccaagttttgagcaagcctctgtgcctgtctgcagatggaatgtggagctgagcctatgtgggctatgtgtaggcgtgtagcctgacaattctgacggcgcctagctatgcgaaatgttcccgcgacaacgacgatcgatcgtatcaacctcgatcgtccaaacccgtgggatcctagctacgaatgtcctggattcatcaatcgaatggcggaatgggaggctttcagagattctgcgcgatcatctttcctgttcaaatctaaccatatgcaggcaacacagattcttcagcgtgaagaaaaaaaaatcatcagcaaagtgagcatagctatcaactactccctctgtttcaggttataagatgttttgactttgatcagttaaactgttttagtatcaaagttaaatttattatataaatatgtttaattattaatttaataaaactaatttggtaatgtaaatattactccatccgtcccagaatataagtatttttagagttggacacggttattaagaaagtaggtagaagtgaatggtggtgggttgtgattggttgagtagtgaaagtaggtgaggaaagtaaatggtggagagttgtgataggttagaaagagaatattggtggagaagctgttatattttgggacaaatcttgatggctaaaagttgttatattttgggacgggtggagtactatatttatctaaacttagtcgactttgaccaaagttaaaacatcttataacctgaaacggagggagtagttaggtcttttgtaatgcaacgtgtttatatatctcggtccaagatataaacttaacatggatactctcgtttacagctagctgtgttttaagtggtaagagacatacccttcaacagcaagatattcatgataacttcgtcgatatcaagatgcgccagcctagtcttcggaggttatcataggggtaaaatgtgtttgtgcgcgtttataaaagtgagtgttcacgcatttatatcagcgcatgtgtctgtactgtgtattgaaaaaaaaagaagaaagaagaatcactattgtatcaaccgtcccttcgaaagtccgagttagaagacttcacatacgccggcgaaacgagtgaaaaaccacccacagagaacgcacgaaacggcgagagagcaaaaacaaggtttggttttgttgctttctttccaggaggccggcgacgtgaaagggttccaacaggtggatgctgaccaacgcaatgcgccgacgaatcgaattaatggttgtttaaattttaattaaatgggagaacagaattttagcctttgatgatggctccatggccccaattatttggcttttgcaaaaggagacaagaatttagcatcgatcacccactttaatcagttctttaattgacgcgtgaaatcgatcctaggatttgatttttttaaaaaaaggttgatggcacatagcatgtttggacttatgttgctgggattaattttgtttgtgatttaatcttttgttttttttcctccgaacatttctccaaggatggcccacagactgcacatgtcactcaccacctggttctagatggtcactccacctgaccaatcacagctctacacaaaactcttgagcatcaacagtccaacacatagaccaattcctctaaaattgtgtggaatttcgataaatgttcacaaacaaagcccaagagagggttctgtacttctgttgtgatacttattatggtcagatgtatcaaatatttttttgtgtaggcaggttgattttatttttcttaaaaaaaataaaaataaaaaggtcacctgcatcctggcaacctagaaggccactccacttgaccaatcacaattcacacagttgcacccttgaacatcaaacacacagacaaatgcaacaatggaatctggggtcaaatttctgttggtgtcatcagagggccaagaaactgcaggagcaccaaaaagtctcactttcttcttcttcttccattgtctccctacaaaaagggctgcaagaacacaaggagaaaaaaaaaaaactgcaccaagaacaaattgcaaagtaagtttgtactttgtactttctttgcagcaagaagagcaagaagggagatgtccatgaacgcggacctcggcaagccgagggagctcaccgggttgcagcagaggagggctctgtatcagccggagctgcctccatgccttgaggtttgcaagctctccttcatcctcaccacttgcaagctgcatcaagctactttttttcatcactaattatgaaaagttgcaagttttgaacacagtatgttcactttgtatttaggtccttgtatttgtattctctcaaagtttttcaaccaacatgttcagggaaaggccatcagagtggagtttggcgattcgacgacgaccatcgacccgacatgcgcaaatatggttgtgcaggaatttcccaacacctttggtcagcctctggtacatttcctgaagccgaacaagatggatgcgcaagccaacgatgaacatccaccaatcaggttcgttttcctttttcagaatggtgctaaaccccatccatttttcagttgagaaaaaaaatcagaacaaatcaagtttggcttgaacaccgaattagtgtgatagcaactagtgtcaattctttatcattgaaaacttgatatttgatctatcaacacacaattctcaggcttgatatttacttgaatctagggttggtgtggtgttctctgggaggcaatcgccaggggggcacaatgtgatatggggcatctatgatgctatgaaaactcaaaatctacaaagtgttttgcttggatttattggtgagtaattgagcatactttcaatttctagattttaaatggactaacaagaagcagtgtgatatttacattattggattgcttgttgtgacatttattggcttagtatatatatattgatttcctgcaaaaagatatgataaaaataagtctcatgaagaactttgtatttctaaataggtggcacagaaggcctatttgcaaatcagacattggagatcacagatgatgttctttcagcatatagaaaccaaggtttaaatttattgatcttgattgctagctttctaaatatattatggcctatataacaagaaagtctttaccttcttgaaggtggttttgattttctcggcagaactgttgatcaaatccacacaactgagcaagtgaatgctgcaatgtcaacatgctgtgatcttgacttggatggcctcgtcatcattggaggtactaataggttataccagcaaatttgctgatgaaaaaaaaaaacatcacaatggattttacatgagcacttccatgccatttcaatctagagtgaataaagagctgtgaaaaaattggggttacatgaaaataaggaccaagcaatcaaccttatttcaaaaacattctctgccttaaggacttgtgtaattcttgatgttatcttgtcttcaggggtgacctccaattcagatgctgctcagcttgcagaaacatttgccaatcacaactgcaagacaaaggtatatacacattgttaattccacatcctcacattggaatataactcccattttcagatctttatcctgtttgacaggttgtaggcgtgcctgtttcattaaatggtgatctcaagaatcagtttgttgagacaactgttgggtttgatacagtgtgcaaggtgagtcttgcaggctatgcagcaaataaaattccaatttaaagctaagacagtatctacagttccccaaaaaaaattaaatgaaggatacaagtgtacgattcccccaaaaaaattaaataaaggatacaaagtgttacatcatgacatgtttttttaatgtaaatgtcttctatgaaaatgtcttttcaggtgaattcccagcttataagtaatgtttgcctcgatgcaatctcagctgggaaggtacactctattatagtctatcataataaattggacttattaggatcacttattatttatctaatttatataatttccctgcagtactaccattttgtccgtgtgatgggttggaaagcatctcatgttgccttggagtgtgcacttcaatcacaaccaaatatggtctgccttgtcgccttgatcaaatgcatcgtaaaatctagcataagtgaacagttgtagaattatttttataattgtacattttcacatgcaggttattttaggggaagaagtggcattttccaagctcactttgaaggaaattataagcaagatatgtgatggagtgcaagcaagggcagcacaaggtctctacaattcattggctgtcttaagttgatgaattctcactaaagactgaattgtgcatatatcaattaaatagaaacatgaggtaactttgtgacaatctaatatattggatataatttttcagagaagtaccatggtgtattacttatttcggagggactaatcgaaagcattccagaaatgtttgcacttattcaggtttatacttgttactacaataaaatgcagtgacatctcatttctatgaaatcttattggtttcctttatgcgtattgtaggaaattaatattctccacagcaataaagttcctgagaacaacattccatctcaactttctccatgggctactgccttgtataattacttgcctcctttcataagaagagaggtattggtgtattaaattactaacataatttattttattaataaaaattgtggtctgaagatttggaactttctgttatagttgctgctacatcaagactccgataactcagcacaattgtcccaggtttgtgttttctggaatgctcagcagtcagttattcatggaaatgcaatttttgatgtcaaactttttattgaaattttcagattgatactgagcaactcttagctcatttagtagaagcagaaatgaacaagcgaatggtaagttcagttaaaacttgagctttatgtgcccagttcagtattcagttctttttttttttaatttgattgtgcttgattctcagaaagaggggaaatacattggaaggaaattcagctccgtttgccactttttcgggtatcaagcgcgaggatccttaccatcaaacttcgattgtgattacgcctatgtaagtagtaaacctgaactatgttcgtcacaaataaaagatatatatatatatatatatatatatatatatatatatatatatatacacacacacacacacacacacacacacacatgctataggctctaaaccttgaagaatgcaggttcttggtcatatctgcatgcacatactagcagctgggctgaatggttacatggcttttgcaacaaatctgaaggaaccaacaaacaaatggcgatgcgctgccgttcctctaacagtatgctttttagttgactgtattgttttcattaattatgctcatttaaaatgttcgagtttgtgacgtgatacactgtttctaaatcttaccaggcaatgatgagtgtgaagaggcactcacgcagtcctggagctgttcctactggaaagccagttatccatccttctccagttgacctgcaagggaaggcttatgcgtaagtccatagttaacagccttaaaactattaatttgctgcttcaggcaaaagactgaacactgacatccatgaatctcattcagtggcttgtcataaaaaaatcatgtgttgattcctccggtaaaatgttaataatattgccacaaaagtttttagttaatgaggcaacagtaagatgatatagaattagtttagattaactctgcataatatgtagacacataaatgcatcattttttgtgttaatatcattgatcttttacagtgactcttcagattataaggcagaggaaaactataaactaattcttgtttctctcattactctaggctcctgagagagaaagcctcgagcttcctattagatgatttctacagaactccagggggcattcaatttgatggatctggaacaaatgttaagccaatcacactgactgtcgaagaccaagactacctgggtgacattgagctactgcaagactacttggagaaggtttgtcaacaaaatctgaacctgttaacttcataagagctaaaaaaaaaattcagtacctgtagttgaagcttgtcaaactgatatcccaggtgaggaacattgtgaagcccggatgctcgagggagatcctgaaggcggcgataagctcgatgtcatcagtgaaggatgtgctgaaggttatgtcggctcccttctatgcagagctccctctgttcaatctgaactgaaagttaccttcatcagacaagaaatttttgtcagttagtcattgggttcatcatatgacatcagtccatctagtagaattggatcagaatcatgagtgagtagtggttactgatcttaggtaggctgttttgtttgctgttctgttctgtttgtgatatgaacagaacccagctattcatttttattttgttttgaggggaagaaccctaccattcatgtcagtaaacactgcacagccgtgcatatgaccagctagtggatatgaataagtacaaattgcagtggcttcctagccaataatcatgacatgtcattcctacatgttagctgctttcaacatctgtaaatttgatccaacaaagagagggcttagcgaaacaaactataaaatgatttacaatcaaatgttcatttgactgatagctcaactgtagaaaatcagtattgtgttattttgcatatccatcttgatgtttctattttcaatatgggcatgaatagttcctgccagatcaaatcacacactggaaaatataaattctgatttctgaagtgcatgctaatggtcaacagcatcatgcaccaagataccaaaatctgagactgcaggccacacttaaacctctaaatcacaccatcatattcaggcgatcccttagatctaggttgcttatgtagcattttggtttgatatatgtgaatatcaaggacaaaatccatgacacaaattagctcctctttcatcagcaatgcatggaacattcaagcattaaaaagaaatggcatctaagcagaagaggtagaaataaacacaggatatttaaatctgatcatgcaaaaggacaaagattatacacatcaaaatacccacatttcagacacggttttcggacttacaacacctctaagctctagagcggttgctcatactagtaacagtaaaatggtgcctttaagtggcacctgtttttattttttattttttttatgatatccttgcaagttgatgcagagcttggtgaactggcagcatggaataaaccacagcgttaaaagttgattgcttgatgtgcactggagatcagatcaccatatgctgcaaggcccaacctgcattacagaacaaaagaatcacttatttaagcataaatatgaggcttaccagctactaagcaaattctagcattaagcaaggcagtcgatccaattttggtagaaattgtttgtaagagggaaaataaaagacgcttcccatttcatggtgaattggtgatgtccaaacgctctaaatagaataaatatgagaatttgagagaaccttatgtacagtggtgattggttgcctttatatgactgttccgctagggattaaggcgtccttgatcacagtgacaatgccacttttgatgaagtatccatcagtctcccttgaagcttcttggatattgtcgacattgattatctgtacaagcaacagatcatataagattgatcattaattaatgcaataaacattgcacatcattttgttcagttcagtatcaactggtcatctctggaaaagtgagagaaacaatatgtaaatcgatccatatgggttgcctggattttttcagtttgtgcttagtaagtaaataattaaagatccatactcaacaaggcaaaaacccatggcaagaaaagacatatagcatttgaaaagaaagataatttagggggaaaaagtatgatgacatagtagtattttttaatgataaagggctttcaaaccagtgatgcaagatgcacatttgcaaaaggccacctttaacaaaaagcatgagaaagtaccaagtttgtattcaaacaaatatgcttgtccctctcttttctttcaagtaatgaatagttgatcagttaatacagaaggcacacttcatcagattgacaaccaaaagtataaatatatatgaaataccttaacattttctccaatacgagcattcttgtcaattattgcttttctgatgtgtgcattctttccaataccaatgggaatgccaccagtctcagaaagggctttcttgtccgtctccgtctgaacaaaaagcacaattaagttcccacaacaccaatacaccataatatagtatagttttgttttattttacctcataatagtctgcacccattagcagagagtcctctatcactgcgccttcagatatacaggaccggagtccaaccacagaatggttgattgtgcaatgctagccaaaataaagggggaaaggcatgtcaacaaatttagggtctctgttttgaagcaatgaaaaagaaatgttcgactaacaagtaataactcaaggtcctaatatgttatgatctaatactatccacagatcatagaaggaagcgctatgataattcatctgaaaaggatacttactctaataacacaaccttcaccaataacactgtctgtcacatcagcatcaagaacttttgatggaggcaagtatcgaggttgcgtataaattgcggcagaacggtcatagaagctgcacacaataatgtttgctcaaaaataggaagaaaattcagcagaaatgcacccttttaaaagtaacttgttttcaccatgcaaaatgtaaaccttacctaaaatctggcacaggtttcttggttatccccaagttggcattgtagaatgcctctatagtaccaatatcttcccagtaaccatcatataagtaagcttgcacctatcaaatacattagcagcataagcaaacatgcaaagtaaaaattaagtaaagaagtaacatttcacaataaatgatgtaactgcagtttacataccaaacttcacaaaacctacagcatgaactgagagaaggataaaaattccctacatgctacaagtttcaagagcatagcgtaccctcattccaatttctgttgctccaggaataacctcgcttccaaagtcatttgcagcagggaaattttgacggagaagcttaagcatcacatctttgctaaaaacatagattcccatactagcaatgtaaggcaattcctttgccctctcagtatcaaggccaagtatggtagtgtcaacctgcaagatcaaaacatgcagacaatcactgaaatgtatgcttcaacagatcaggttgcatatggtctcaacggatgactcatcaattaccatcattgatttcaacttctctccttttggcttttctgcaaattcaatgatcctcccttcatcatcaatcttcataaggccaaatgctgtagcacgttcttcatccatgggcagcgcagcaacggttatatcagcatttgtttctctgtgggcctgaatgaacttttggtagtccatacggtacaggtgatctccagccaaaatgagaaactccataacattgtgttcctcaaatagccataagtattgtcgcacagcatctgcagtaccctgagacagaaagaaacaaaataaattaggcagcgtccttaaggtattgtcatacagaaaccatataacatgaaagttggtaacctaagagctcatctatcaatgttaactctagtttgcaattccaaagaaatcattggaacatctaaactagtgaacagtttcacttaactataaatgtgagaaaatatggaagagtgaatcaacaggagtacattaaccctaatatttcttttgttccgtaaaacagggtgtatgttcatattaattatgtatccccttcttttctttgtaccctataaagtataaactttaactggcattcatgcatctttgcagctaaacgagaccattcaataatacacagaagcagaaacatccagtacctgcatagtacaaaaattaccacttaccgagtcaattcaaactaatacagtactactataaaaaatttggcaagttaatacagattaaccaagatacctgaaaccagttaggattctctgggctctgctgcgcagcaagaacttcaacaaacccctcgttcttgtaaccaccaatgttgtttccataggccctcgagaggtgacgattgagcgacgcggagttgaactgtgtcaggacatagatcttcgacacattgctgttcagacagttgctgaccgggatatctatgagcctgtaattagcacccaacggcaccgccggcttcgccctcttctttgtcagcggatacagccttgtcccagcaccacctccaaggatgatcccaagaacactctgcaggattaaaaattggatgtaaaaataataatacaaatcatcatcagactatatatagataacagatgaaatgctcttgagttccaagttctgtacttctagttctaccacagaatctaataaattataaactcaaaagtactacaacagatctggagccaattattaaattcaagccatggaccacgatagatcctccactaattaattattatggggttctcactaacaatcacctttccaccgttaaagatatgtcaatatttcatccaacaactaaactagagatactgtcaccatcatctttccaccgtttcttgaatcacagagagtactgaacgcaacagctgatagaatcaccgagaaatcgacaccaaaacactctaaaaaaacaaacacttcgcactcgcaggaatccccacaagaaacatatcaaacacatttcgctcatccaaatgtgtcgagtaaaataaccgcaacacatcgaatcccaagaacgacccttcgattttcccaacccaaaaggatccgaacttttctccctcgtgaacgcaaagaaaaaagcgagcgctggaagagtagaatttttttgggcaccggcggcgagatcgcggcgtaccgtgctggcgtccggatcgaggcacgtctgcgagctccgggagtccgacacggcacgcggcgtgaacacgaacggcctcctcgccgccgccccacgccgccgcctcgccgccgcaagatcgcggccgggatagaatgcggccgccgccctcgccggcgccgggatcggggcccaggacgccgcgcccatcgccatcatcgccatgggagagcaacggccgagagaggtggccggagtactgacacactacagtggagtgtcagaggcttcagcggccgtgaaaagttccctctttttttctctttttttttctttttctttggttgtcccagtgatgatgtgtgcaggtgcagaggacgatttttgtctgaatttatagagcactttctgggcttccacagagatggtactatgtgtgtgtcgaatgaccataatgcccttaagaattttcttggaaaactttgggtgtgtttagaggtgcttttcgcagctgcaacttctcttagaatcttcggttgctaaaaacccttttaaacaatctagatcttgagatgttgtaattttagaatctagaccagctgtttattagaatattaagcgagtgattatggatcaaggatcaatcatgtaggggtatttcggggtttattaggttggagggctgagaatagacaggtgtaatgtcacattgatatcacgtgaagcactagatgttgaaacagagtgagttgtttatcaagtgattaagctgttaattagctagatggatgtatggatgacaggtgtctatgcagtgagagatggtgtgctctcctcaccgttggtttggctatttgttactagtaaactttgtttgttaccagcacaagtaggaaaagaattttgtgtttagtgaattgcatcaagggagatggaaacgtgcttgagtggaccacacaatgtcatcagaattggatctatatatagacaatgacaaatgattgatatgcaaatttcacgtttcggccggtcgccctgaacgagaaataaaagtaaggaaaagtagaaatgatcttgcacggctagcgaatttttgtgctgtgagttaggtgcaatttgtttttgttattagctaatgtgtgacagatgacatgatttgcaatgattgaacataatcaaacatgtttgttggattccatagttgtgaaatagactcgtcggtaactaaccaaaagtttaaaatttaagtatataactttagtcgacatcctttaccattaccaactcgtgttatgaatgataattaactataactattgtcacatgctttctcggaaaacccattcttagatagagcctttccaagatataacatccatataaattttatgttctttgtagcttattttacaaaatcaaccaaataagataagtgacatagccatatgtaatctttaaacgtgttgcatgtatcgattatcttattatcaccatcatgctgacatgtctatagatcacttaaagttacaagaatataatagtcctgagtacactgttgacactagcaccaaaaccgcaatacggtggattttcgctatgctatggatacactcgactatgataactatattattttattacataggagtatatattcctccttgttttttaggtgttagaacttaatgtgccatgaattaatgcataaaaatgattatatctatattattattatatattgaaagttactaatttcactaagtatagatattgcaactatttaggtatccttaaaattattacgcctcttagagcaagtaccatattgaaacaaagagcttaaggagagatatcttgagcgggcgactatactaatcccggttgtacgcaacctccaggaaacggatcgtctactgtacagttaatactgcacaggtgctgtagcgatcaaatcaagctatcagattacattggatggctctgattctgctcaatctgcccaccacttacttgacagttacatggctaaggccatgaaagcttcggactctgtttatacatatgtcatgtgttgttcatcaaacgatatgcctgccatttcacatcttctacaaatatcataagcagagcatcgcctcactgtgaagcctacacttattccaaagtgtaacactaaaaatgttgcatcgttcatttacaccttctacaaaatagtgctatgatgaaaaggtttcaggaagattaaacacaatgctctaatggaaacatgtacaaaggtaacttcatgtgtgcaaatagttcagtactaaacactgacagaaactgacagaagaatgcatagcataaattttctgtggcattgcaaaaaaaaaaaaagaatggatgttctcaaaagtaaatgttcaatggcctgatttgttaatctcaatttgatacctaggcatctagctatctcccatccaaatttgcattgaacccaaaattccaggtagtatcaaatatgttatgctccatgccatcaccctatgtttcatcatacaaaagagcggctccaaaaatgactctctctaaaatggttgaatccaacaaagacaccaaaggacctgtattctttgtttgtcccaaatgttgtgtcaaaagtaacaacatctccaaactgagcatagtcgattatcatcttagcatcagcccaaaaaatatttgttatttgttcttcacaatccaactgaagggcataatgaaatgaagtgttctctgcaactttgtcctgaaagtacttcaacatacttccggcttcgccatacatcaactccctttgacgcttggtttgtaaatggttcttgagaccacgacgtgtataaccaaggtttactgaaccaccaacttgccgactagcaagctcatgtgcagcttttggtccaatgcccgaatcatccattgtttcaatttcaaatgcttgcaatgacgatatctttctttgtgatggcatcaaatggcatgttgaaggcaattaaagttcatggttatgttcaagaactaaatcatatactgaataatcgcccacttctctatctactgtgattccgatccgagctttgcaacctgttcttgtttcagcacgaggacgcttggtgttgtgatctcttttgtctattgcccggtatccctcattggaacaaacatatcttgcagaagtaattactccatcaactttactcttattttcataatttatcctaacatcaaaaccagtatgacctccataataagtccaaaattcccatgcctcttttgtagatttaaatttcacgccaaattgaggaatccaactaggaatcatatttgtgctgtaaaaagaaacagggatcaactctttttttttacaacaaagaaatacagtgttaaatatggattgctatgtggtcattattaagatcctattcagtaatgagatcaacaacatagtcagagaaaagaaaaatgtagatgataaaactatgttgacccctgaatgaaattgatcttacctatttgaattatgatggttggagtttgagtcgttcgccataaggcctcagatttgtatgtatactctgtttagcactacacgagtgtagagtgtatccactccaatcataagaatcccacaacaatgcttttggttttttttgtgaggacatgatcacaaaaagggtacaagacatggcatacatacctgttcgttggagactgatggcttactttatttgatcatcaaagtttctggacagaacaaggcaaagtgaaacctctgtatctccttttggcaccaagtcccaaggaggaagaaagcaaaaggagaacctgtattattttggcgccaagtactctggaggattcgtgattttccctccatcaaggttatcttgacttttcctccttaaaatcagtttgttagtttccaaattatcaaaaatattttcggtgtttaaggacagaatcagagccgcttaatctaatcggatggcttgatttgatcgctacagcacctgtgcagtattagctctacaatagaggatttgtttcccaacctccaagactagatgaagttgttgcaattgtgctagactcttgcttgcgcacaacgattagggttctagatgttcaagatgaatggtgagagtcttggaataaatggggtaggcccaatttaattcaattaaaatctcaagagcccacaagtaatgttagagacaataatactgccttgaaaatttaggtggaagaacctcaacttaaatagggtgatattggagattccctattgaccggttgaggtgatggttggacttccacacacgcgcgcgtgccaagttggcctcggctgtgggcgtggcgaggcgagacggccggccgagccgagcctgcttgttgctctttcattttgtaacagacgagaataaagtcactattaacaaatcaaattcattgtgttgtaacctccaaagcaaatgagagatttatttgttgtaacctccacaacaaatgagagattcattgtgttgtaacatccacaacaaatgagagatttatttgttgtaacctccacaacaaatgagagattcattgtgtggtaatcttcgcaacaaatgagatttattttgtggtaatcttcacaacaaatgagatttatttgtgtggtaatggagatctctctctatatataatgcaaggcagaggctctcaaagatcgagtcttcctcctgctgctgttcctaggcgatactctccttatgttcctgcgttgtctctccatttccccggttctgttcatcccgcacgcacgggtgatcggaacaagcaggtgcctccggaactccgtctgcttgagaacctgcacgggtaggtgggcgatcaagtttttagggagcgctatgcgtgactgcttttgttcgtcttcctctgcatcgtcttcgccaatatgtcgaatatcagcgacaacaataacactggagacaaggagaaggaggcacccatcaacaccaacggaggcaatactacctcaaactccagcggagggccattctcggggtataataatttactattaccgttcgttcttaattttctactactgtcagtcgcaatgttattgggcgttgccttatctatgttggtgcttattttatattaagtacgctcatgttgtacacatctagcactgtcactagatctactcaaattataaatgtcatgtttattgtcttaatattttggattaaaatataccgaattatgaacaaatttccaacagagaggacaacaagctgtctgtgcatgcaaattttggcctgcccaaggagcaaaaagctacaactacataccatagcccactagatgatatgacaaatttttcagccatcaatgtgtcacaccccaatctggtaccgccgtacaacggcacctgacaggagcatgtcatagggaaaacggcgcaaaccgcttcctacgaaaccgcgatctcagtaccagtcccaggacacagcgctggtacccacggtgacaaatatgaatcattgcaatccttaaaataaatagaggacttatttaccttaacttaggttgcaactcagaacagcctgagaatgcaaccgacgacgcggacgaggaaacaccaacaacagcagcagcagcggaaccaatggtctaacacccaacaccacaggcgacggctggggaccaggacgataccctaatcttcacttcacttcatcttcacttcaagacagaggaactatatatatatttatatagagcaagggtgagtactttcgtactcagcaagtcatgggaatttaggtgtttaatgcaagcttggaagagaggcaaggttgttttgcaaatcctttgtttgaaatcatttttgaagtcactaagtgatttatttctttttgagtttggatcgaaaagagacttgcgtctcgatttgacttaagagatacttatcaacaattcaaatggtaatgtaccgacctcccgggtcagatcattacttatcggctcccaaagccatttcacttgattaatcggctcccagagcctttttcattttctcggactcccagagtccagctgcccagcagcacaacaatccgcttctactcaggaagcctagtctatgatgcccgcagacatcccgaatcacacagattcgtttccaaccactcaggtcatccatctgccacataggctaattctggtaacgattcccacaccacaaaaacttttcacaaagcacaggtaatcaaatctacgcaacgggaaccacctcacatctgcccatgaccgtaggcatggctgttcgaacagttagttaacctctgcagaggggtacactttacccacaagacacgaacttaccccagacactagccggtgtcagaagttcgcgacaaagcctttcccaagccgacccagggttacctcatgccacatagaaggatcaaatcctcacataaatataggacattttaggcattcacaaatcaactccaaccaccttgatcggtaagtgagcaagcttctcgtccttgccttaccaggaacccagtttgtccgaccccgccctggcgttcccaactattggcatgcgaggtttccctgaaccgactagttacttagccagggtgtcccattccaccttgtggttgcactttgattatgttcgatgagtttcccacaggaatcggtccttatatgcgaatacaggacagtgccacataggcacaacccccgcatcacgagttttcacaattcattttattttcaaacacaccgacaccacatgtcgggttttcaaggcttctcaaacccatttcccaaatttttgacaaacaacggtgtatgtgggataattggtatacgcgctcagagagcacggataccaaagtaccacaatggtggagcgacaagggatcaaggtatgtcagcctacaggaagtagtgcgactacttggtaggtccgtcggtttagcatgcaaaccgaggccaagcaagttaagtgtgtgattctaataatgcaagttgcaaacaaaataataattatttttcaattataggagcaattgatcaaagggtgacttgccttgctgaaggtcttcactgatcttcacgaatcttcgagaaatccacgatcgacgaaaatccggtaaccgtaactatacgcaaacaatcaaaaacctagacaaaagaccaagaaaaagaccctatttagactaaataatagtgccattaaatagatctcaattttacggaattatgggaagtggaacggagtcaatcgaatgaacggttgagaagatatgaatttcggaagcttaattggaatttctggaataggagaaatggtttatggaatttttggaataaataaatgatctattgaatttatggaaaagagtattcccaagaatattctttaattactcattgatatgtggggccaacaagggggaaagatggacttttgtgtatgagaattgatttggtggagggaggaaatatagactttttaggccgagcgtgaggcacggcccaaaggagattggcccattagggcttgggtggggagagggaggcggtctggtggaccggatccaccgcgtgggggtcctaggacgggggccacttggcggcgacctggttcacggtgggggaggagtgcacgtggggtgcggtgctagggttagtaggctcggctcatgccgcatgcgccggatggaccgggaagaggcgggcccacgcgtcggcggctggcgcaccgtggaccgcgcgcaccgggatgggggagggaggccgacgggttgactcggcctagccgacgtggtgcctacgtggcggctgcgtcgaatggcgagaggaggaagacgaaggccggccggatggacggcgggcggcggcgcgcgtcggcggagcggcgcgaggcacggcggaaggaggggagaccaccggagcgaagatagacgcgagaggaggcgagccaacggctcggatttcgccgggagaggtcaagggcggcggatagcgacggcggcggccggcggcgagcaaaaggggaaatcgtggcggggcgatgagaggtcgattcaaggtggcgagagtatctccggggtgcaaggaattcatttccggtgccggatgggacggaggggccccgagggaggccggcgatgagcggcggctccccggaacgggcggcaata

SEQ ID NO: 7288 - DNA, 72425 bp, Oryza sativa
aggcaagatcgaagctgtgcggcgccagtgaagtgttgggggggaaggggggaaggattggtgggttcttggagaggcgaggagagggggagagaattccacgagattctcttctctcctctcctcttcttgtctcgtcttctcttccccgcgtaggcgtaggtgtgtgtggccctctgctgctgggtgcctgtgccagcctttctacctgggcctactacgctatagaatgacctgcccatagttaaaaaacatgatacaccttttttttcggtttggaccctgggtttttgtatattatcattgggtcggcaaatctactcctcccaaaatagaatttgttatattttagaacgggggtagtagtattttttttataaaagaaatagggtataacgcaggtgctcacatgagtacacacctacctctatgaacacgtatgtgcatgctctatctctatgagcatctctaataggctggaccatcatattttaagattgacgaaggaactatagacgtcttactgtcatgtcatcgcattgacggattcatcgcctacaagtcgtaaatgcgagcacttatgccaagtcgaattgtttatagagtaaattttaccttgagccatatttttattttctatgttttcactttggaccacttgtctctcttctcaaccatatgaacgatctcaggtatgtcgacacctactcatcaatgaactctcatagttatatgtaagacattttttagcatacgacgagttggatgtaaatgaataaaaaagttgagggtggtctaaaataccacaaaggtaaaaatatctggttcaaagtaaaaaatattggttaaaaggtgatccatagcgaaacatcggtaataaatgtgatataaagttgcattaaactctaatattagctataagctcatagttatctctactattaaacttgctctaagtagattaacaatggtttaaaggctggcctcgagctgctcaactcaacagaccaacaaataaggtcaagcttttgacattgtataagtttaaacctgatatgatgcctcatgaacatagacatgttcataacctgatgcatcatgaacatagacaaacctgatgcaacgagaggccttccatgaacctggacatgattaatcatccatgttcataatatggcgattttagtgggtgcaagctgaattttcatacgcaggaaggagacaacgagcacacctgctctcgagtctcgactcgctggccaatgggccatggcgtctcctctcggcgtgcaggccgttggattgtgccacgtggaagatttctatacgtccaaagtagtaaatggtcaaagcttgctgctaggaagggtaccgactaccgagtggcttttctatgaacactttcaagagaacgcgcactttgaatgggagtttttattttttgaacatatttaataaaattttaaaatggattctctactatttttaaataaatgttttagccataatgttgacaaacaccgcatatattattaaaccttagccacaaatagtattttactagtgtcgtagtattattttatcacaccagtaatattggaaataatataatataacaagattatttcacattttttaggaaaaacttatttattaaaagaactcatttcaacgacttgctggccaccgtaaatcgcttttccttaatggcagagccatggcctttttagagttcatacaaatttaagtttgttggagtagttattagggaaattctattttcaattttaatattaacattaaaaaaattatattgtgcatttgctgacaagcctaggctgttgccaaggatagccgagcaatcgctccacaactgtttttcctcatatgtgctatttacatataagaaaactaaaaggcatcttcaatggctgtaagaattggggaaatttcttcttttctaatataggctaaatggtcagctgaatcatagcattttcttttcaaaataggagcacaacatggttgctcgatggaagatccatagtttttttgcacatgtgttccgagctacaattctctaccacttttatggttacgttttcttttctgccatgataatgatgttatggatttttattcaactaaagaaaaggtcgatgcaaatattagggataaatgagttatatgttgttcctcataaaagttttgcgttctgaaatggcccatgatcaagttgattttgtttattttcccttttaatttccatgtcagcagattttaatatggagaacatgtatactgaagtacatcatatccatatgtgtagaatattgcttcacgagagaaatttgaaaatatactttattttctcatattttgcgtttatatacctggctgtgattaatttccaaaaatatacccaatccgcggaacggttgcgcgggagtgaggacgaaccagccggtcccgcaggctggggatgcagtaccgcgccggtcccatggactgggtgagcgcggcaatgctcccgcatgccagatgtgcgggaccggctctcccacatgccgccccctatctcggttcccgaattggatctgatctcctatgcacggaaaacggagcagaccattaccacataattaattaagtattagcttttttttcaaaaatatattaatatgattttttaaacaactttcgtatagaaactttttttaaaaaatacaccatttaggagtttgaaaagcgtgcgcgtggatgagtaggaaaaattagaggaagaacacatctcaaacaacacgcggcctgctcggttccgcgtgttggaaacacgggacagcgtcagtcccgcgccaccgttctgcggcaccgccgcgttcactcgctatcccacatgctccatcgctcccgcacatcagagccgcggtaccgactcagtcccgcagtccagtcatgtgggaccggctcggttgcgcatcccagttccgcgcgaccggctcggattccgctcccacatccccagtatgcggttcgtcctcgctcccacccatccgttccgcgaattaggtatatttttacaaattaatcacaggtaggtatataaacgcaagatatgaaaaaataaagtatattttcaaatttctttcatggcttcacaatagtcatgtaggaattctgcgttaaaaaaatcacgtaggatcataaagcttccaaaaaaattcaaaccatatatccaggaaatttaaaggattttcctttttgcacaattccgataaaaatcctcaaattccgagcattccagcaaagcccttatcgtctattgatgcacatgccagcactcgaaagtagttagaatcgagaaagtcgtacaaatgcgaaaccctcaacaaggttggagaggaacaagaattggaactgtccatgcaaaatcttgaaactaaggtatatccggtgcaatattaatttctagttttctactatcttgtactgctcgttggagccatgcatgacatctgttgcaagctataaagagatcacttgcatgggagaggcatcgatttcatctttaaatcttagacacctaattcactactggtttgcaaattgtaaatgagctggtcgttgtcgaaagttgcccgaaattatagtattttttggatttggaggcatccgttgcaggaatctttagaaaaagatgcccggaatattccttcgaggttgtccctagggctagtcatcacttgtgagaaatggtttctctgtctcttcttcgtttctgtaatgcttagtatgtgctggaaggggttaattgggcattagggcataaacaaatggggattaaggtgaagacgaggtgtcacgcccggaatttctatccaaaattccaaacgcttacatgtgtgtaaaccctcgtctaggaatcagccgaggcacacaataacaaattgataatagagtacaattattactctaattaataagcgaatataaagtcattatagaggtagatagttcctctcaaacaataaagttctaagcagtggaaaataaaagaaatagcgcaggcgactcctctccacaggcagcttgaccagggctacgcctaatcatccacaccatcagcatcactgtagaactcctcctctgatgaatgattgcaagatgagtatatgacatactcagcaagccacgcagcaaatatgcaagtgcaatggataacaaatgatggcataatataggctcatttgcataaacagcatttaataagcaattgagagaatagtaaaacagttgagtaattaaacaatattaaatcaacactatacaacacacccgtgttgcatagggccaaccattctgaacaaccaatcccggctgcacagttctatctccaaaccaggaatataccattccaaaccaggagctaaacaagttattaacatcatcatttaatatagtgagaagtgtgagactaatcactaaagacattgttagacccgctcataacctcgggcacggctattcgaatagtttaaactctgatcagaggtgtaccactgtacccacaagacacaacctcaacatcatgtcaaccatgcgtcgcgatacttgacaagtacccgaatagagattgtgacaatacctcctgcataacacaattcaaagcagtgcaccgttcccggatcataatcacccccttaaacaaggcatggactccccagcgacccccgtggccttatctccgccacttcacagtctggtgctctactatgaaccatactatacagaaagtaaagccgttgcccacgctggcttgtggttggcacgattaatgtttcacaactaaaaatcgtgaaccggtccttaattgtcatgagcacgaccatcaaaaccatgtgctcacaacccaccattatcagattttagttggcaaattaattaattaaccaatcatgattaaccatcatgagctatcattaagccatcattaagtagtagtaaatcataagttatcccatttatgtgagctagtgtctctaagcatggctaagcatcctaatcactttagctaaaaccatataatgttctagctaatcaaattattaaccaagtgacaaagaatagggaatcaatagcaaaagggctataacaaggcaataggttatttcgacccaatgacattcgaaaataaatgcaatagttgaatagaaacaatagctttaaacgggatcaatatgctcaaagggtcgtttgggatctgtgtgacttgccttgctagccttggaactctttaaagtcttctcctgcaaattcggactctccgggaacgtcggaatctaaagagaaaagaacaaaatcaccaaaacagcacataaacaagcatgaacagtacatgtggatatttttaacatgtaggtctcaattttagaaaaatttagagacttgaaccaactaaattcgagctaagatgaattagttatgaattttcaaagatttaatcggattaaatcatttatatagattttaattgaattatgatgcaataatgaattatttttgaaaagaaaaaggggattattgcgtcagcggctagggttcacggcggtccacgggacacggcgacgatgacgtcagcggtgacgtcatcaccgacgacggctcgggcggcgcatgctcgccggcgaacgacggcgcggcggcgcgaacggacagcacctacgggttgcgggcgacgcggcgaactcaccggtgaccaaaacggcggcggaagatcaacggacggcgacggcggcgaggaagaagcggcggcgaccttcggcttgacgacgacggcggtgctccggtgacctaaggcgacgacggaggggcggacgaggtcggcgacgacttgacgatcacgacggcggcttccctgagcgacgatgacgaccggagcgggggcgacgcacggttggacaaacggcggcgacggcagcgctaggctgcacggtgctagggctctaccggcggcgagaggcgaaggcgagggtggcggcgggtagcgaagggcttgggggtccttttaaagcggctagggggcggcgacgaaggcccacggtgaccggcgacggcgatggaaagttagggctcgggagaagaaaacgaatccgaatcaaactcgaatccgatgatttccaaaccgaattaggcgatgattccaaaagagaaaagatagaggagatcaaggcgatcatttcccctctattgatttcaccggagaaggaaaggcgcggtcgaattggaagggcggcggcggcgctgcacggttagggttcgggcgcgaggaggacgacgggtccgataggtgggccccacctgtcagcggcggacgcgcgcacgcacacgagcggcgctcggctgcgggtcgacttgggccagggaggagagagagagggttttgggctgacttttggcccaaagccaaaagagagatttttaaaactttttcaatttaaattattcatgaaatgcaattctatttattaaaaatacttccttggctcaaataaatcccagaaaaatctaggaactatagaatcaagagaagtatttaataaaaatttatctggcccacttttatattggaatttattatttaaaattagatcttctcttctaggcttttaaaatcaaattctaataattccaattaaacaacaatttatatatttaagatttttagggtgtgacacgaggacaaagctttccttgttggaaccttttgtattgtttttgttttagtgagtgtgagaccatgattctctaactttggcctgatgatataatatgtagaaggtagtagcaactttcagctctgcatgggtgttccaagaagtgtttagattggtcgtgtgcaaataatgtttataaattgtaatttgcaaaaaaaaaaaaaactccagtatacttttctgtgtatttattccaacatgttatgattcaaagtagtatggtttcatcttggagatcatgtaggtgaccaaacacagcaatataccaagtgaaaatgatgatggtgatgtacaacttacgactgaaattttgaggaagaaatgaaatttagaaggacaataattgaatataccaagtggcaagagccattcaatttgcaagtcatgtttaagaaagatgatgtagcctacgaaatgctactgctttcaactataaaagaaataatttgttcctgttgacttacaaattcaaatattttttttattattgatggtgcatacagtatttggatattgatcaaattttatttgctgattctaagaaatgaagtgttttctgaagcagtttagacaatgaggactctatgtggtacatgtgtagacaaaaacgacaggagcattttgcattcccctatttgcatagaaagctaggaactgatattcgaaattgtttcagatggatatatcagttaatcatgtcagaacccaaatctcacggtaataatattatttatcaaggaaggcacttgatctagcacattaggcattttatataagatatgctgattggattgataacataagagagaaaaccttgctacttgacaatgttggcatgcattagccagagaacaagatggcctctacaagattggcagagcatccccccttcttaccgaaattcgaattccgaaattcgacatgactacccccatgacaagaaaactggtgtttgcacatccagattgcgtcgaacgacacggctcagcaagacttgcgcttaagctcaggtgacttctggaggatcatttggccttcgatgcccgagggcgtcggcttgccctcaggactatgcaggttgattgggctgacagagagctggtggaagatggaggagctcaatgtgtcagcggagccgcacatgacaccaccagagagctccgggagatcattgtccgagatgctgaagccgcttgaggcaagctgctcggagacgatcttgcatgccttctctagtaaagtgtcgatgtacttctggtaggcttccattctgatctgcacatgcttctggacctgatcatgggaaaatgaaatagtcaactattgtgtgttggacaatgtattcctgattacaatgaaaatcttaaaactaacagatcttcaatagagcttttcatgttgacatattgtgtggcatgctaagtgttaaaagtgcagttgtagaaatgataatgaacaagtgtgttccacatttttcggtaacacgagatgcagcgcacaaatcctgaaggaccggctgttctgaatattggtgaagtatcagcctcacggtatatcatttgttttaaagcttgagggctttattcttatgtagcaaatactgaagttggtgagcactagctcttctttcttgctaatggcatgtataaaaaccaaagaatattatgacggatcaagctttcaaagttacctccacttgttcatgcagtcttcgttgcatttccatctgagctcgcaatgcttccttgacctcttgatttctgtaacaagtacatgtgacattttaactctttttaaactagcacaacacgagcactattattaaaatattcgtatttgccagaatggagaaacaaatgtccaggatgagtatcccatggagcttactctttaacatcttgagtagaaactctaggcgacacactcattccaccttgggcatctagaagataggatgctgcaaaccatagcagaggtcagaggttagtaaaaggtcaaaagaactcttaaaagtgtggttttcaagtcaaaaagacatatctgcataacaaagtccagaatttgactagatgagcaaattcaatctacaaacgtttccatttgaaacaattacaataaactgcaattcaacgatacatgtaccaacactacgcttaatattgccaacattttgtgtataatttctcttccatttcccactgatgaaccttgatgtgattattcatgttagtactcctacttagcaatatgcaattattactggggctaaatttaactcaagactgaactttttctacacaaggcaaaagtacaacccacaaattctccctactggacaggacctatagcttctggatcagcatgtgtgccactacgaatttgcatatacccatatggaatcgctatatttgtggcgacacaaatattgatagatttcagtcagttttttatgcatggagtctttggtatttgtacacagcgcacctgttagtgctagttttgcaggtacatgggtgtttacctatcagtcgatttctggtttgcttctactacactgtaaatcctatataaaaattatggtgtaaatattggaatttacaatgtaagttttgaaaactacagtgtaaatttgtgtaatacagtgtaaatatatgtaatttacaatgtaaaaaacaattgactattttatggtgaaaaatgtgaagtcaaaaatatagctagtccctgaaaaagaaaagcttgtccactgacgtaaaatactcctccacatacagattccctctcaccattcagtccttggttgcctgcagaccactcaactacgaatcctcccattatttcccacatcaggtccactctattccttcatgtccctacagactggtgccccagaacagagatttatggtaagcttaaaggaaattcataacactgttaacatagctgccatctccaatccatacgatttccagcaatccctggtcttttaagaagttgctaccaattgattcctcccaagatgcatccaaacttaacaccagtaaacccaagctaccatctccaaatcatataacttcaagcaatctccaatcttttcaagaagttagctacatagtgattccttgcaatacatcaatattgatcaaattgcaatcgatgatcaaccaacttcataagacaccagttcatgagcagagccgtatttaacatgtccacagatcaatggtaggatagttgcatgacttcagaatgaacttccacaatgtgaacaaattggaattgttgcagcaagacttggaagttggaatattaatcgaaattaacagtgaggtcagtagattgctttgtgtaacttaccatctttagattgctccgatgcctcttttccagattgtttccccagtctatatttctggtcgaggaagatcaaacttaaatagctgtatttcaaactttgcaagacatgcaaaagtattatgaattacctgaagatgactcttcaagtggaaaagagtgagccccttcacacccattgtcctcaagatagttttaggtgttgcttctgcaagataatcatgcattgagtactcaatttaaaaatatataatgaaatcaaatcttaaactgttttactggattcccctggatttttcacattttagaccttttgggaaacttattttacaaatagaccccaaaaaaaacttactccaggaatagaccctttttgcggtgccaacatcattgacgctgtagtccaacatgatggcgccaatgacattggcaccgtccccctagcatccccacagaagctaactcactaatgtaaagggggacggcggtaatatctttggcatcattatgttggaccacggcgccaatgacattggtgtcgcgaaaagggtctattcctggaataagttttttaggggtctatttgtaaaataagtttttagaaaggtctaaaatgtaaaaaaaatccatcttgattcccttagcaattgactaatgataaaccagcaatttagagtgccaacatttactttttttagataatggaataattatcccaggcactgcaccagcaatttagagtgccaacatttactttttttagataatggaataattgtcccagggactgcactagaaggtgcacaaagccacaggcacaaccttttttagactacctacatgattcaattaagatttagaattttgatctagtgtgagtttcgctgtgctactgattatacctcctacaagaaaataaggaacagtacaatacacgcttttctttgtatagacagttgtccaggtgcatagctaaaactaaggccttttatggacggaggtagtaatcacagaagcacttgtaatgttggtctgagatttaaatggttcatcaaaataattagaacctaaaggtaaaagtgaatccttgaatttttataaagaaaatagagtaaattacagaaaactacaggccaaaatttgtgataaatttggtgttaaatctatagtttggtgatattgtggcttaaatatgtaaatttgcatagttctgtgaaatttgaaacaagtcccaagaaaattgacagtagtaaattgaactaaactcatgtcaacaaaattgagtaagacctcaaaggagaaaaatacagccacttctattcactgtatgtccttaataaattttaatgattgaatcaaagacttcttgcagacaccacagtccactaaaatcaaagcatcaagctaaactaaatcagtatagaactattatagctctataccataagttaagcattttggcatgtaagcaccagattctaagaaatacaccaaaaatgcctagactgcgcccaagaaaaatcaaacagtatcatctttgaacaactatgttgtttttaagataaatgaatgcctttattccggcctctgcataagtcatgcatcaaccattagtgattagtcattacaaagttttaggcatagactagcacagacaatgcatagcacccatctcacaaaattcaaacatgaacgaaaaacttatgcacaaaccctatcagtcaactatgtaatatagtcaggttaaaaatatgatgtgtgcagggattactgttcactagtgcaaacagctccatggttacgtgttgaaccaagattcatacatcagatgctagagtaatcaatcctttataacttctgcttctgaataccctttgccaccaaaaacatgattatatgataaaacattcaatgcatactctaggttgattatatacggtggcaagcgcctaacgcctaatcaccaatcaggtggctctaggtggaacgattggctatacaggtgaggcgggagttgcacacctatgcaagctaggcagatgtctttctgaagtactaagcatagcaggtgaaccgtgttggtggcaacaatcaagccgctaccttagggcttattcggttcataggaattccaaatcaaaggaataggtaaagttaagaggtctcacctcatgctaagaatcctacagaattagcttgaaagactacaatccttaggaatttggtaggatccattcctatgaaacgaatgatgcatataggaaaaattcctaaggattcaattcctacaataatcctatgaaaatcctttaaaccgaatgagccattttctccaaatactgatctgctctatgcctgtgccaatgtgagatactgcacctcatcatgtgggaaattgcgaaatcgctgtatttatcccactgcgttcacttacaaaccactgaaataaacccaaaatgagcagaaacttctccctcatccttgtcccaattctaacacccgaaaccaccaccaatttcgtattaacaaaacactcttgattgctaccggtgcagaattcgttaaagtacaggacaagcaagcagctcaaatcagtagccgacctcgatttttcacctccaatcagtaaactccccaaacttgtaatttgtaaacaactaatgggtacaagtttcccctccaaatcacaccaaaaccagcctagagcgggctaaatccgcttccctaagcgctggccaagcgggcatttctctccttgccaaaatcgaagacttattataaccaaacgaaaagatccaaagcatttcctgaatctccgaacaaacaaaacaatgccccccaaatcccgcgccgaaatctccgctcccaatccgagctttggcgcgaaccaccaccaccaccaccaagaacgaaggagcaacccacccacccaccaaccaaccgcgcaagcgcaacgccaatgcgccgcctctccaatgggggagctaagctaccggagatcggagagaatgggggggagagaagcaagggggaaatctcactctcggggccgccgagctgggcgacggcgtcgacgaagcgctcgtggaggtcggccgtccaccggaggcggggcttgggatcggcggtcagcaccaggctgggccctccccccgccgcacgccccgcctcgccgccgtccggccggtggtggatcagcccaggcgggaacatctcctcctctttcttcttcctcctcgccggcaacaaggaagagaagaagagaggaaagacgagacctttgctgctcctcccaaaagcggaggatccaatgaaaagtcccaacgctttctctctctttcttgcttcttgcttctcctctgctgctgcctgctgcctctcccctgctgctgctgctttccagtggcagaggcagcgattctcctctctcctcttgcttctcttcttgacctcttctcttctctctcctctattgcttctttctctctcttcaacttctgtgtttatagattggagggttgtagtataatctggagatggatgggaacagcagtggccataatgatgcgtgttactactagtgcagactgcagagcaacgtcattttcttactgttgttagattattacgccctaacttactactgtcatcagagctaggagtaggtgataattatttgtgattagcacactacagccaccctccctccctccccatcgacgtatagtagcgagtacaatagcaggctacaagtcgagtcgactgtaagcacatgtgaaagagacgtgaaagagagaagataagagagagaaggaaagcaggatttatagccagctgcagcacagaatccaatgcattgtgtgtgtatgagatgtaggatcatacattaatggtgtattatataactattgataaactattagattggatatatacgaattagagctattagttggctatactattaaacttgctctaattgagttcaactcttaggctctgttcgtttactggagttcccaactcccccatctcattttccgcgcgcacgcttttcaaactgctaaacggtgtgttttttgcaaaaagtttatatacgaaagttgcttaaaaaaattatattgatccatttttgaaaaaaaaattagcaaataattaattaatcacgtgctaatagactgcttcgttttccgtaccggagggatgggttcccaactcaaccaaaagaacagagccttattaattaactcgtttagtatggaattaaagtacaacgtctcaattatgctctcctagctcggcttaaatcatgaaaacattagaatctggtcgtttgcttgctgttttagagcacgctctaaaaattaacgcgtcattttcaaccagtttaatagtctatccatgttataaatatatgatatattgtaacctgattttcatcttaaatctataacctgattttttttctctctcctcttctccattcttaacctaagcataaatttgatttggtaatttttagagtctgctttcatcatttattatactcgcttttaaaacttaatttttaaagttaattttgagattttttttatcaacttatttttagtcttcttggcttttaaatcgatagcagcacacatagatgttttatccatgataatttataggtgtttagtttatttttccactgacttgttagcactatatcaaactatcatagcattaagagcaagtttagtagtatagcccactacttactataagccaatgttaaagctaacatgtataatagcttatgctttcatcataagatactccctccatctacttttgatagtcatatttccaaatctaaaaattttatttttgataagcatatttcacttcaacaacttatcattttaatgactttctcagatttaatgcatgactctccattcttccacacatgattggctacatgggcattgagaaacgtaaatataaatgaatcgcttgtttacgaggaatgactagtagcatgtttatatggatgataagtagaattacttatccttggtctgtgtgccaagatgaaatatgactatcaaaagtagatggagggagtaggatttatttttttcatcatctctctttatctctttatgaatttaatgcttatttcttggagcttgtgtggagctagctcttgcatgagagccaacactccctattttttttatctctctttttcacataagcatttagcttgcttatagctcacttagctcactgtaatccttgctctaacacaaacacaagtcaattaattgtagaaaatatataataattgggtttcttgcactttggtgctgaggtaggtattgggagctgggcaaatgattggtgcatggaaaattcagcctggcctctcttatctgtctaccatctcccaatctctatctctgtgtgtgtgtgtgtgtgtgtgtggcgtttggtgatgctagcaaattgacaaatgggattagtttaattggggtttttttgtgccctttttgcttagaaaaaaagctagtgggtggaggatcatgtgagagctgaacagacagctgagtggcccttctccatttgtttaattttctttcgcgtgttatttaatttgtaaaaacccttgcttacatcggctttgcacatgctcaatgtccatatccagacgtcatgtgtgtttcaacgcgtacaaatgcaggaaatgtggtgcttcaaatggtctctttcaccttgctaagagtgtatatacaatagacctaaattagtaataaagctatcagcctgattacatcggaatttgtttgtcgtgtcgactaaaagctgtgttgcgctggggttttcaacttatctctctcattttcgcacgcacgcttttcaaactgctaaacggtaaataatgtgtgacaaacaacgtgtaagcttccgattgtgttctcttaatttgtgttgggtacttgggtgttggggtcaaaccatgagaaaagaatcaagtatatgattgttgggaggatgtatgtagtccgggtgagactggtatgaaaatggaaaatgtacaaaatgcaaattatgtatattttgttagggaccactattttgtgaagattgcttgtacggtgatgcctctagctatatatgatagaggtggtatgtagacaattgaggatgggagctaagctccaaattaagttcgatgggctgactctacggctatattcttctcgatgagttgggaactcatctcccaggcacacagaacagaacgactcattagcacatgattaattaaatattaactattttttttaaaaaaatagattaatatgatttttaaagcaacttttttataggaaacttaaaaaaaactgtttagctgtttgaaaaacgtgcacgcggaaaaaagagataggtgagttggaaaagaagggaagaacacaaactacgtatatatagagctaaagttgagttagaaatatttagaagagaatatatgccaaagatgctgatgtcatatttttttacaggagattgactcgaccagggaaatatatacaaaagacaaaataataagcttattaaaatttgatgtgttttgcatatattatccttccctatcaatacaaacgatgcaaagcttttgcccttttaaaaaagatataattaatgattgatgcatagatttttctatgaacttaacaaaccaaaaaaaccattttgtatgtcaacagtgtgacatgcagtctcctagcattgtcacgttatcaaaatcatagacagaaagagaatgtgaaagaaggtagcacactacgattttctatttatattttcttgaacctttttaattttcaattaaaaaataaaccaattctaaacttattttcaaatcttaaacttttggtcacgccacgtggtaagacaaattgctgttattgttttggggttgtgtggccaaaaagatgatttagaaataagtaatgatctattttgtaaattaaatcattaaaaagtttaaaaataataaaaattcgtaccctacaagatcctaatttttacctaggtgtttataccatcggccacctataaaaaccgtcggccttgtatatttctaagcgtatatcatcggccactactccctctctgtttcaaagtagttacttatgatcatctatgcgtatagcgtagaagatatgtttttcaaatgtaaaaattgctttgttttaggatccctttgaatcgtagggttgaaaaaatagagaaaaagggagaaacacatgattctgataggaattgaagtgtaaaacagaggattgtaaaacacataaaaaaactcaggaatgatcatttgattagaccgcaagaaaaaacgcaggaattagatgcgggagatagactcaaaggaaattttccaagaggttggagctcttgctaagtttcctctaaaatccacatgcaatgtgtcattacataggatttgaaaaacttcaatcctttgaatctgtgtcattacataggatttgaaaaacttcaatcctttgaatcaaagggctaatagaaaaatttcctataggatttaaatcatatgaaattcctacgtaagtcctttatttactttagagcagagataatatttctctcttgatacagaggataaaatattcttacgaacgaccggtatttagcaaatatcctatatttagcaaaataggatggacgctaattctaatagcgtccaaaaaaaggacgttgctttccatagcgaccaggtctggacgtcgttcacctcagcgtccagctatgttgtgcagcctaactatcccaaagccatatccattctatatacgagaaatagaagcgaggaatccctgcagggagaactggtgcggcatcgaggattcgaggctagggcctagggcagttactggcttactgccgccgatccaacaggaggagactgggaagtgggaagccgctgctgtccccgccttgtcgggagcctgatatggcgatatccgccaaggacacaagaaccatatctatcagttcttttagaaacgacaagtaattttaggattagtagtggaaatctaagttataatttttgcctggggttgtagttaatggtgctgttgtagctcaaagatgtgttttagtttagaagcatatgtatgtgtattcatgagagtttcagactttctatgactcttttctgtttgattggttctatgtgtactagtactgaattacttacacgcccatagtcatatgatctattgtttggtactgttgtgatattcttctgtagtgtgaagtttggaagcatgcacgtattctgaaatccgaaatactcaattatatgaatggacttatttttcttctgcttcatgtgaatacccacaaaaatagttacatctgtatttcatctgagttgcgaggcagtgcgtgagcttcttcaataacgattaacgcacaagaactcattgtgcctgttcccagcctgggcctgccatcggcggcacaggtgaacggcggaaacgaaagcttcatggacggaagcttcatgccttcattacagcgagatgccgagggcggcaggcgacaaacggaaaatttcaagggctgccgcttagtccaatcctgcctgggaggcgagcgtcgcctaccaaatactccagttgtttgtgttaacgacgagatatatgggtatacgtagttttttctttctgtattttatgggatataggttggtaggcggcgccagacagtggacgctgagatgaacaacgtccagaggtggacgtcgaggtgaacagcgtccactcctggacgctattagagttagtgtccatcctattttactaaataagagctcttagggagtgtttgaggagaaggggattgaggagattgggaagatatgcaaaacgaggtgagccattagctcatgattaattgagtattaactattttaaattccaaaaatggattaatatgattttttaaagcaactttcctattaaaattttttgcaaaaaacgcaccgtttagtagtttgaaaagcgtgcgcgcggaaaacgagacacaatctctcctatctccacctaacgaacagagccttatttaccacatatttaatttgtaaattattaattactataaataaaaaaattggggtctacaggctacagctccaatgagcatcgaagtggtttaattaatgatcgatgcaataaaaaaaatgattatccgataatatatatcactgtatcgggacgaattatcactccaggattcatgggcttaattcatcgtaggattcttgtttgattaattaattagataaagtttggagtttcttcaagacaaaacaaaatgagatcgagtaatgataccgtaccaacaactagtggaacttagaacggactaaaagtttgcatttaaaaattttgggtgatgctgatgagtggctcagtcgtaggaggatagaaaatagagcctgtgttactaaacactgccatactacaggtaagtgctattggctgtctacactctttggggtgggtaatgtttgtaatttataatccctcattttttatatatatgtttttcgaactattaaggtttgtacatgaaagttatttaaaaatatatatttgtcatttatgtaagtttttatagctgatacttctaattaattatgcgctaataagccatactgttttaatcgcgcacgagagaaagttccattgcacattgaagaaattaaagacaaacttgttcgaaattgggctattattcttcatttctggatttagtgcagtcgcttggggagctggggttgtgagaggaacgagaagacgaggaatggaggcaagactgcaagatacgcgaggattacgtgcatactcttgtgttgactgctgccctagtctctaatgggtctcaaacaaaacatacacatatacatggtttggggggcctccgtcgcccctctcgccatggcctaggaacggccctggtctagacttaaccctagctcaaaaaagcaaatgatcaacactcagactataacaagccgattatattaaataactccctctaggaaatccaacaacttgaaaaaaattccacgcttttttattaattttttctttttactgaaaattttggtgcagctcttttctttctttcttctttttttcaccttctgccttttcttttctttttgtttctctcttttttttacaagcagctgttctgcgcaaggagaagccaacaatcggcttataaaattacaaaccaatttaaagaaaaccgaaaagaaaagcggctactcggtggacatagtggaatgcatgcgcatgtgtactgctatggaaatattcatccgttggttgatattgaaggagaggttggtaccaaattaaacgagatagcgatcaaaggaaaaaattgcatgcggaaatctcggcaggaaggaaatggtcacgcaacaatttcaagatttcagaaacaaaaccaccgtatagaaggctgatcttctatttttcatgtgcacatcatgtctggctgtcagtagagatatcaatctaatctcaatgataggcacatagatgagctcctctagaaacactgtagaacaacacccagcacataatcctcaccaagcaattgacgatctgataccaaccgatgacaccctctctcgggcccgatcttctggtgagaggataactctcgcttttatcgaatgtgatatttgcgacgtggctaccaaccagaacaggttcaggatgtcgtgcaatcactacaccacaaacgatgtcataccaaccgtgacgcgtggttgataatccctgcaatgcaaacgagagaacattgcaagaacaagataatatacgatctaaatattgcgaataggtaattaagcacaacgaagtagttgcaattgaagtggtagatataatctacccggcaaatcaacacaccaactattggggtctctgaatctatagtcgccaactaatcgaacaaggattagagacaaggtaaatagcacttggaaaaattcaactaaataaaacccaattgttttttaggtgtacaaagctatttatagatgaaaataaagctagagataggtgttggttcatggaggtggatagagacacttctgagatgggactagtatattacaaggcccaaggcacaagttcggtttcagcaataacacaatattattttgacaattcccattgatttaggatgaattttgatatgatatcagatgggtttgaaaggtgaggagataggctttccaacaagtactagatcatccaaatcggagttggcatgaaggcgctaggtccgttcgaagtcaatgttgtctctgcctttggaggccgaacaggactttgacttgttattggaacttgtgaaattatgtgtgtatccgatgaagtgatgtcctcatcagcaaacaaggctaaaactcgacaatggattcattgtaggaacactcatttgataactaagcatagcttcaaagaagaagctgcaaatttgtcaaacaagcatcgaatcatcgcggaacaaaaaagaatatccaatccgaacaaaatccagaaatagctaaacccaatccctaatctgaatcattttgatacaccatacaaacagaacccaagccacatcacgcccaaatccaacccacgacatcgtctccgttagcgattaggcactcggcgatgttgtgcaagccacggagcgcggcatgcagttgttgtagtcatgagcattcatgagcacggaatcctcctccaatagcttcatcatggcgtcggcgtcattctggtgcatatgccacatgatcagcgacgtctgcaccactagcctcttgtcgtcgaaccgccactgctccctgctgcttctcgatgactccgtcctgctcatctctgtcacgcccagaaattcatgaaccagaatttctaagctgaatgtgcaataaatccctgtccaggaccagccagggtacacaaacgacaattgttgacatacagacccatgtcttacaaaaaatagaaaagattacaaatgcagcggaaaagataaaacaaactaaacttggacgcttgacttctgcagcagggcaactccactccacaggcatcccttgacggtagcgacgaaaccaaccctaacaagacagctccaacttggaagatcttcagctctggtgtgggggaaaagagagcaagactgagtactacccactgtactcaacaagtcataccggaagagaaggtatgatgcaggatataaccaaaggaggctaagggttcttttgcaataaagcaggcatttaaaaacaaaagttgaaagcagtaaaaaaattgtagtagattaagcaatattaaccaatcactgtccaacgctacaccacgttgcaacaggcccaaccaaccacctgaactacaccagttcattaagctaaactagggtgagactaatcacggtgaatctagttgatcgcccataaccgcgggcacgactattcgaatagttttactctggccagaggtgtacaactgtacctagaagacaagattccacacatgtcgccatgccccgaagtatcaccatgatactgcaaagggggaaatcatgacaagaccctccgcataaccctcccctaaccattcacaccacgctaaggtttcacccccacccccaacgggcaatgggcggtcccctcttgcgccgcggtaaatctggcagctggacaaccggacaccccggccgacccaactccatcacgcccaccctcgccaccggtgcctaggaaagggtcaagctatacttcagatcaagcagttacccactcccgcttgtggtaagcacagtaagtctcccagggtttcccgtgaaccagttcttaattgccatgggtgcgaccagcaaaaccatgcacccacagcccaccatttagtgtattttaattaactaacaccattgcggtggcaccaatccaaaactatgctattagtcaaagtctatgtaataatgtgatccccatttgtgtactagttgaactaggcatggctaagcatttcctaaaccaacatctaatctttctgatacccaagttatcaatggcataaggtaaacaatatatgcgggatatttgtaaattaggtataatatgatcaattgtaatgcatgacttgccttgctctcgcactgatgagaccacagcaacgtcttcgagaaaccgcggatcgacgaaatggccgaaatctacgcgacaaacagagcacataagcaaaacacactataagactactgaaacaggaaacaaaaccatttttaatggattctagggatttttatgaatttactgagacttgaatggacttaaacggagctcggatgaattacttatgaattttagaagataaactgtgtttttactaataaagaaaagcctaaataacttttattgcgcaatattacctagggctgacgtcagcgagagggggcggctcggcaggcgggccccgcatgtcagcggcacaaggggagagggagggggcgccggcacatgggccccataggcagtggctaaaagtgggcggggtggtccaccggttggttggccccactggggcagcagcacaaggcgggggagggggtgccggctgctggctcggcacggctcaagccggccggccatgacgaggcggcgatggcgcacgaccgacgacgacggcaagcggcggcgcgagaggcggcgcggacggcgcgaaaggtggcggcgtcggccgaaggcgacggcgcacacgcggagggtggctgcgctcatgggagggaggaaaggaagaaggagaggggatcccttaccgaggcgatgacggcgatcggcgcgggaagagacgagcggcggcgacggtttggagaacggtggacggggtcgggcacaacctgggaaaggcgatgactaggttaggagaagggaaggatgaccacggtgactagaacggccggccggagttgggcggaaatggagagctcaccggcgtgcgagggaggcggcgcttcggcgagtttggctgcaagcgagcggtggccgaggtagcacttgcggcagcggagctaacggcggcggcggcttggcgcggcggaggccctagcggcgacggcgcgtggccggagatgggcagcggcggcggagctcgggtgtggcgtggggagagcggcggagtgcacgggcaagcgcggcaatagcggaaaaaggtcgagggggctcgagggagtgatttataggtgcggaagggggcggacgtggccggggaggtggccgatttggccggcgatgtggggtggagagaaagagagagtggggtgggattcaaaatgaatcccgcccatttttgggcgcgtgcgagggcgggaggagcggggaaggggcggcgacgtgggcgcagggcgcggagtgggcgcggggaggcgggaaaggcggtggcatgggcggttgccgccggggcgcggtcggctggaggaaggggacgaccccgacaggtggggcccacctgtcggcatcccggagggagggggaaggggaaatgggccggcccaacaaggggaggctgagcgcggggtgaggcgaggtggactgggccgatggcccaagaagagggaagatgaggaaaataaaagggaaaaaggaaaaataaattccctgggatttaaaattgcactttagtgatttttaattggtaaaaattatttacaaggctctgaaaattccactaaaaatcctgttaatatattgcaacatggggaactcaagaaaaattccaccacgccatttccgattattaattgcattgattaattagggattcaactctaggttaattaaacaatttcttcgagcaatttatttaaccaattttttttagcaagaaaagggggaaacttcagggcgtgacaatccccccctccctcccttcatgcgtgctcaaatatgagaccacatctgcggccagcccatctcctccccatctgcaaaggaagaagaagaccaaggaggaagaaagtatgttcttagatggaggttgacaaaatattcaactacaatgacatggcttcaattttacaaaattatagtgacacacataagaccaaggaggaagaaagcatgaccttagacggaggttgacaaaatattcaacggcaatgacatagtttcaattttacaaaattacaatgacatgtaacaggtatcacagatataaaagacatttttcctaattgaccaaatttgcaatgacatagatccaattaaccatttcctttttggccccctcccttttggtctcaacaatcaacatcaaggcacagccaaaactcaggtatcttgatatcattgataattgttgctatatgaagcaaagctttactagtgtatcatcacactacagttttcaaacagcccataatttcattttatcctttgccgggggcactaaattgccatatattaataaatgacatttattcctagccacctatcattttcagcatgcaaatacatacttacccaaattcatcaaacacaatgcatgtagcattcacttgtgacagctccttaatttccaaagaatcatcttctaatatcgcctgtttatttttcatgtcatttctccagacaagatataatgtggtgaaatgaatcctgtgaagtagtcatgatgtaaggaatcatgtgccttattatgtttagatatgaaaagacatgtgtttcccctcaaaaaaaatccaaaaatgaaccattatttgtgactaaagaaaaaagaaaaactgatcagttaatatggcaacaatttttgttaatatctatgattccaaagttagatgcactggcaatgacagcataagggattaaaagcaccttatctcccctcaccactgccttgtccaatgtccaaccttgcccttctttccttctctactacacgtgcatacacccttgctagcctccctacatttcccatttccatcaccatgaataggttgcagcacatcgattgaatatcacaattttaatgtgaatatatatatatgcagagtgaagcagaggaacttggatgatgcgtgctgaagttatcatggaacaggtttttgcttcaccatactcatgcaactttcttcaaaatcaattatgtttaggatttgcaaccatattcctttagatctatgatttgattaatgatttgtttgtggtattacaatcatttagagtggattcaacccgttctcttatatctattgtgtgtaaggattttacaatcacatttcttcagatccatgattttagtagactacgtgtgatataattatcatttagggtgtatacaacctatttttttagatctatcatatgtttatatcttttacaagcagattcctttaaacacttgattcaactagtaagattgtactgtactaaatgtgttgctatcatttattagggaccaaaacagattggtagtgtgtgcaatggctttatttaaaaaaaatatctcttttgtgtgtagatgattgttatatctcctcacaatacaaaatattgatcttaaagccaaacttgatttggcaagaacaaataacccttaaaacacataacacatttaattttctattaaactaagaacttactatatatcgcaagatatatgggcctcatatgaaaaggagtattatggatagtgttagaagaggtgccaaaatttagttaaaatgattaaaagagtgcagccaataaatatggactaagcaagaaagaaagctcctctaaacattttttccgaaaatgttcttttagttgcaaaacaaattgtagcatgacaataccaagcgtctaattgcgctgaatgcattcatcttatttaactatgtgtttttttatatggggttgtttgtgaatttaaccctcctagtggagttttcaccgtaggctaatggaacttgaaaatattccacctaaaatgcacccaggctgtaaaaaaaaaaatcatatcttctatataattgatgctgactagctactaaactcaatatatgagtgtaacacatcatcattcagtagcaattaatgcctaaagtattttaaatgttatacaagtatagtacatcatctatattttattatattttagaactcaacatgtaagcatggcagatcatctcacatcatttgatatacatatccatcatttctataagagctctttttccatccttgaggaagtaccatgaggtaccatgaagtactaggtaccatgaggtaccaatctaatctagccattgattaagcaggggcatgattggaaaaataagtcaatagacaagattatcgttcattggtccttccaatcggcaccacccaaatcgccaatagcgatatagagcgccgcaatccctttccgtctgtcatgagttctcgcccaaattgctaaaagcaaggtgacgccaccgctgggagtgcccgagcccaacgccgaccccttttctcagttccgctgccgccgccggcggatagatattagtaaggaattggtgaatacgcatgttgtgtttaggcaatatggtgcctgctattaataattgaagtcgtgtatctttgggtggtgattatgcgaattgattttattagtaattgaagttaaattccagtggagccgtagctgccgcctgatggtatgatgcaattagctaatttcaaaccaaacttgatactgtccattgaacagagggagatagtataacagcacaaactgctactacatatagttttgacgagattacatcaaagggaggcagtacatattaccaaacaaaataatgatgttcatcctgtcatccatcacacaaattaagaacatagaccttgagactaaaatcatcagctttacctatgtttcctcctaaaaccatcagcttcttatagctaattccatccgcagcagcaacgaaaacatgcaaaaatatgaacctgaagcttcggcggtagcctcactctccattcagtagggccctcgatctccattattcggcagcaccctagccgtagcggctcgctcgacgacttatcacgatgcagcaagtgacgttgaccacgccaaattcacacctccccaatccccaccccgcgtgcggccgattcacttccacagattgacgagaggagcaagcatgaccggatggagggatctgaccgggagtgcttgatgaagatatgctttccccctcatctgagatggatctgaacttggaacgggctccatctcttatttgcaacgtgtgttgagaaggaagagacgcagacagatgcgggcggaagagacgcggaagaggagccccttctctcgctgctgcgcgtggtgatgcactaatgcggaagagaacgcgaaagtacaattctaccctcccacctacggtaccgcctcaatctgggtatgcggtaccacgcggtatgaataaattccagtcgtccgatgctaccaaatcgatggccatgatttggtaccgcatgccctcaaggatggtaaaaaatctttttctataatattagcatgcatgtgcttaactctaaaatatatggatggatatattctaagttttataaatatgatagatagaaatgttgaaatattgtggaaatggtgttgatttgtagtattcaataaatcgtactcccttcatctcaaaacataagaagtttttgttgaatgtgacacattctaatactacgaatctggataaactagtatgtgtttcatgtaatcaaaactctttatattttgagatagatggagtatagatatgatattgtaagcttataagatttgatatgcattaattattgtccagtgataagccatgcttgcatccattttctcggcaaacgaaaaaaaacacggaatggaaaaatagtaaagggcagcaagaaaaaaaatggaaaaacaattgcagagagagagagagagagagcacccatccatctccccggaggcgaaaccctaacccacccaacccatcgccgccggcgaaaaccctaatccatccgccgccgaaccgaagtacacggtgccctctgctccctcccacgctcgatccactacccgctgctgttgacgggaatgcggtttccctgacgaaatcgcggttcggcttcttggttcttgcagatggggagacctcgaggccgcggcggaggaggaggaggagggagggggaggttcggcggcggcggggggtcccgcttctccgccgcccgcgatgacccgccgccgcggcgctcctcctccgggtggggggtggcaccgccgtcgcggcacctgtgggtgggcagcctctccccgggcgtcgccgcggccgacctctcggagctcttcctccggtgcggcgacgtcgagggcatctcccgtgaccccggccggagcttcgcgttcgtgacgttcgcgcgggaggaggacgccgtggcggcggtgcgggagctgcaggggatccacctccgcggggcgcccattaggatcgagttttccaagggggttagtgtcgatcgtcctcctcccgcccccttcgccacggtttgccacgcttttaccgaattgttcatcatattccctgtctcaaaatcaccagtatccaccaatgaattgtgcttatcttgtcatggttgcaaacacgaatcgccgaaaaataaagcaaaaactatgtttcacaacagaccaagtgtcgcgataagttaaaattggtttggagttttgctcttagtcaaaaatcagaccaaaacaggatcaacctagtatgcttgaacaatgaactataagttctccgttctcaggcatgctcggataacacagaaccttaattttgttcatttatccgcatccttgctatcatacgagtctttcatacaaagagacttgtcagacctttggtttcactgaaacggatagttcattcccactatgtttgttcatcaccgaccaataaaaggtcgaatgctctacagagaggaagactgacaactcagattgcagatagttaggactactattacatggttttcccttgttatcccactgggaactaaagttctcgaactcaatcaaagattcaaagttcactaattgtgataagcacaacagttagctgatgtctcaagtctgtgaatctacaaggagttaacttccataacaccaaagctccaaaaacagggattttagatctgatgcagtacattgctgtggcctgactgcctgagtgataaaaatttggggaaaatatattgcatatgaaactatctggatattcagttttgcgcacatataagcaaatttaaacagctcatgagacatcaatgaaggccttccgaaatcccagaacgtcaagatcatttaataatcttggcatgcccacattaatatttttgggctagtcggtaccctttctatcttctgcagcttatgttttaagtttgagatggaactcaaattctattatgaagaagataatctctccttgcttggttaaatagagaatgcatatgacaaccactttgctatggtataccggtgcaggacttggtttccataaattaccacaggcactcacaagagctttttgctattattgtgcaaccagaatagtctcatttaaatccttaggcattctattaattgacagaaaataacagcactagtttaggaaatgtgattgaaatgctcaatatttagtttggtctgaaggaccatgttgaagttgccacttgcacatggctgaatctaacagatcaatcttcacctttctcacccttcatgtcatgacaagaactaacacccaaccagaataatatcatttgaatcctgatgcattctattaaatgacagaaaatgacagtggttcagcaaatttgattgaaattatcaatgtttagtttggtctgaaggacaaggactacgagatgttgccacttgcacaggcttaatctaacagattaatcttcacctttctcaccctttatgtcgcgatacatgctaacaattgcaataatatataggttcatctatatccctattaaaagcagggtttgttactttgttagtagtgctttggtttatttgtggcatagaaatgcatacgtttgtcttgactagctttgtggcttgaattcacatagtgtatgagacagttttgcaattgatcacaggttatcaatcgagctttttgggtagttgaattgttgtaaatagctctatttccatgaagtttgatcagtgatacaccataccaccttgatgctaaaactgagccaaagattcatgtcagatgatggaactatatcttaatcaatgcagcatcaatattgaactgtctcgtgatgttgtaaatatggaactataccttcgtaaagtttgatacaccatacaatctagtttgatacaccatacaatcttatgttgttatactaatattgagccaaaggttcatttcagatgatggaactatatctcacccaatttcatcatcaatatcaaactggcttgagttttttttccccaaaaaaaagacttcatacaaaactcctagttaaaaacctgccattaaagatgacccaaaagtgccataacactataacagaagtcttgttcatgatatagaaattatagaacaaatatgatattattacagatgatattcacaacagcagaagtaccaaatttctacattgttgtccttgtgatttatgagtatcaaatgaaaaatggattctagcacttgatagagttgatcccaactctccttttgtggccttattccaagtttgaaacagcaggctgtgattgcggttctatgtggttgtttgactgattatttcttatcattcatattgttttaaactgcatctggtagggctaattgatcagaagcagcatggacataggtagagcagaccaatcttatgtcctagagcttgtcagttaaatagcaatatgagcatacaagtacttatggtatctgtgttcatcatgatccatttgctactctggacctgaaatatttgaatttacaggataaaggttcaagtagctctatggatgacagatactcacaacatgctgatcaaagacgttttactgaacgaggaaggaatcagcaatcaagtcctgaaaaatcaactgataaatccaaaagaagcaggccagcagaacctagtgaagtattatggataggttttcctgttggtctgaaggtagatgaggcaactctctgggaagccttttcaccttttggtgaggttgtcaagataactacattcccagggcgtacttatgcatttgtccagtacactactattgcagcggcatgcagggcgaaggaaacactgcagggaaatattttcaataaccctcgagttagcatttgcttttctcggagtgacagtgtttcagcagaatttggaaaaggttccttagatgccccatattccccccatttaaactctagtgttagacctatattcagggagcaagattttgaagattttcctagggctaggccttttgatagtcctccaagagatatgtacatgccatctccacattatggccctaagagactttctagagatcatgatgatgtgggtttcagcagggataattatttgcgatatggacctggagtagagcctgatcctagatctaattttgaaccttttaggatacaagggctcggtccagaaagaaggatgtctgaggacccatatgaacagcataggcgtagccctgctggtgatgcaccatggcacaacattccattcgagcgatctcagggagccttaccattagaggattctcggtatgctagggaagatccatacccattttcaaagaagttgaggactggtgaagcacatgactctgaacttcctgaataccctttctctgaatttgatcgagggaaggttggctctgcctacccaaggaggcccttctatggtgtgccagatgatgacatacaccccagaggctatcaacttgctcctatgcatggtagaaatcatgttgatcctttaaggaatccaactccacttgtagataggcatataccagggcatgcacaggacagcttttctaggcatgtagaagtggaaagatcaactcctgaataccatgaaccccttctcaaggaagaatggaaatgggatggtacaatagcaaagggaggcacaccaatttgccgagcgcgatgcttccctgttgggaaggttcttaacttcatgctgtaagtctgggttcttcactgtattttcttgttcattctgagtatcattattgacatctacaacattagctctgcttatcgtcttaataaaaatcacaaaatttccttcatggttcaagatatataatacatagcaaatatatcatagatatcgttttgccttttacatctaatttatactgcatgcttttgtttgcacctgatgaaggcttttgtagagctatgttttgttcacgttgttcttgatttaattatatctctgcaccatttgcctctactcataatcttaataaatacagacgtttgccttcacggtccaaactacataatctagttgatcaatttctatctgcattcttttggttgtatctgatgagatgcctttggtgtttatgctctgttctattgttctagatttgagcatctctaagttcaacatttagttttaaaccgctgttgatttcatactttcaggcccgaatttttggattgcactgctaggacaagcctggagatgctctctaagcactattaccaagctgccagcagctgggtggtgttttttgttccagaaaatgatgctgacatggcagcctataatgaattcatgaattaccttggtgataagcagcgtgcagcagtttgtaaacttggagaaaggagcagcttatttcttgttccaccctcagacttctctgaacaagtactgagggttccaggtaaagtcagcatatctggagtcattctgaagtttgagcagtcagatccagaagtttcctcgccaactcgcaaaccagaaacatttgtgagtcatttgaaccatgatgttcgtgctcatgaggatctagatgcattgagaagaatcaacccaccagatatcaggccacttcctcagggttcagattatctcgggttgtcgcctggaagctataatccagcaagtgcacatttggttccgccttacaagtttggaaatgctccttcatatctagaatctgaattagctcatcaaaagcatccacctgactcccacagggagatagcacatgacaagcagcagcaacacccagatgtattgccctcaagatggtcagataacatttacaatccaagtccaggttctggaaatttgaattatttggctgagagtgcgatcccacatacatcaactgataggacaccagaggcatactcatttgctcctcaaggagtaccaaaagtgagtacatcagggtatgcaccagttgcagatgaggcatcaaacatgtcctaccctcccatgcaacctgcatcacagcaggtagttagacctcaacaacctccatctctcccattatcgcttccaccagagcaacttgcacaattggccactcttcttgcacaacaaaaccaaccaggaaaagagcctgtggacagcttaaacaaagaatcaggattcatacggaatccacatggacattcttcaatgatgccacacagctcaggttctatccctgtccaaaactcattgccacctgctccgccatctgcatcacagttacaggttcatgcgccaccagttcaaggttcagtgccaccaaatccatccattatgcatacaccgaatgctcctatgccttctcacaacactttgcctttaccccctatgcatccttcgggaaatccagctcattcttccatgcctttgagatcgttcgtccctcctcttcctgaaggccctccaccccttaggcagcacacatcaagtgctctacaagcgcaacctgcacttccctctggaccacagactagccagcaaccgtctgctcaggaagaccatcacggagaccctcaaaagcgccttcaagcaacattgcaattggcagcaaccctacttcagcagatacagcaacaatctaaacctggtggccagaagtagatgcgaggtaattgtttgcctaaagatctcttttaatttctgtaccatttacacaagaatatgaatcattgtcctatttgaaccaaatcgtttatgccatcaatgtaattgctaaatggtttgtatattgtttaggagaaactcttgccttgtattgttcgtttggtcattgttttccaaacttttacatgataatcaaacatcaaggacattgcattatcatttttactcttaatgcctgtctttacacaagtgttgtatttctgtcacctgctagatagaattatgtttggaaccctggctgtcaattaaccagtgaatgaaatttcggttcaaaatttcagaaacaatttcattattttcgaaccccctggccagtcattctctcagccgaaattttccagtttttctctctttttttttaatttggtaaaagtttattcaaattcagtcaaattatgttaattttttcaaaaaaaaaaatcagtccaaaaagtgccgaaaatcctgaattttctggaatttcagtgctaccgaaatggctgagattttaagcgaaatcaaaagtgaaaaccctgttattaacatataaattttaaggggaaaagatatttgttgaagaagcaggatgcaatccctctctgtatgtgatacatttaattcgtctgagtatatatatattcgtaaactagtgggacttgggcaattatgagttggaactattttatttactttctcatgtttatgtagtaattgtggcaaaagcaggacaactttagtgagatatatttagtatgcttgatttaaactaaaaaattttcaatacatcatttgtgcttatgctgatgatattttcaaatgccatagtctgaacccgctcttcaatttcagcattccatgtcagtagtagaaacaagaaccacctttatttgctgcaatcaccacttacaacagttatattacctgtcatgacaggttaaggaaatttgcagcctgcaaggatcatatggtgatattttctccttattactgaagagcctgagagtctgaaactgctggtgggcacccatacctataccggatgttttgttaacataggttctgctatgaattagcattgcagtttaattttgaaagcttactcctaggtggcaaccacctccgttgtcttgtctgtataagattgcaccgttcatcttttctctctgtttttgtgttaatcaatgcatagacccatgaataccacttccctttttgcattcatacatcatgcattcgtctcatcgatgtgtcgtctctctgaaattccttttgcatgcttccgctgttcgcctgtatgttttttgacagtgtggtgtacgcctccattcatgaggaatactagtagtgtatactaccttcgtctcaaaataagtttactttgtacactgtctagattcatgtacaaaagcaaacttattttgggactaggtagtatatctcattgaatacaacaattttgtgggcagttattatgaactagactgtgaacagagcatcccaaaagatgtcctccgcaggtaagattgaagtgcaagaagagggaaatgcatatgccattctactgtctactgtactgaaacaagcttactgctatggaatttggagtactccctgggatgcctatccttcagattttattaaggggtttcccatgatgcaggggtgggagctttattaacctttgtgtgctgtaaattctttcactactttcagtgcacaccagctttatctctctgccatgtatggtctgtctgctaaagtgcatagcctatatatttgctgttactgcaaactttagcttgttaaaagtgttcatctgtagtatcagagttcagagttccatggaacagcattgcagcagccaatctttctcactttccttttttttatgtactattgttttaagtactcttggtctcaacccaatgatggccctatgtgtggcttcagtgctttgagatttatttaattctgctttgtttgctgaaagcaaggcaaattcgtacgggtgattcaggcgattgttgcctggtccttttttttatgagaggatttttatttatttatttcttgggtatgagaggaaacctagcagcaagccagaagttatggatataagattcttgcagaaatataaaattatggaggacatttttcgtccttcatatactgtacaaaacccttaaaaaaaaacaaggagaacgagtagacgacacatcaacgagaagctttcttgtacaaattgtgctgataatgttaggccgtttgaaacctaggaatttcatacgatgataatgcaaggaaatataaggagtagctttctatctttacaccaactataaatacatacagccatttaattttgcatatcatgatttgagccagttatacacttgcataactcaacgacggaaatggattctaatcctcgagggatgttccattgtcttccaaataattatgaaaaaaaattaaaaaaataagatagattaatgtgtcgagggatgttcactgttcttgcattgtcttccaaatattgcattgtcttccaaatagttatgaaaaaaattaaaaaaaatataagatagattaatgtgtgatatattactttacaaatatgcattcaaattcaatattcacaagttgtaacaaaaataataaattaagctctaattagtatacgtgtgctcactatcatatttgttttgcagaagtcaaatttagacgtgtacgttggcagagtgatataccatatattaatctatttatcaattttttctacttttatataaatatttgcatggagcatcaattggaatatccatgccaccctttcgaaactactacgatttcttcgtaagattatttcttaatctacattggttaggtaacttttcccaagctatttgttactctatccatcccataatataagggaccagattcatttcactataatgcgtcacatccacccaaaataccttatattatggaacagaggaagtggctttgtaatatataattttaattttaattaatttctataagcaactgtccatattttcgatcttaaaaactgcattgtaagctgaatttcgcccatcaatttaaattatatatttgtctatgatttgcctttttcaactttatatctcacattttagtgacatgtaataagtcgaagatcccaatccaattaggccattaacagcacacacatgtggcattcagcccaacccataacacgtaggagattcacgtagccaaacgaggtccatgtagccaaagctgggcgtgcattcttttgatgaaaagctatcatgcatcgcgggggagaacgatgcggccacgctgtggaagtcgtcgccttgcacttcgtggcatggtgcgacgcccccaccccacaccccgtgcgagatggtgggggtcgttgttggcgaggccaccaccctgagctcgatgggacaacgtcgacgccagagagagctgttgctgtgctggagagggagctcagggtggttggatccatgacggagatggttagatccatgccggagagtgagccttgttgtcgccgttgagctctttctcaccatcgccgacctgctgcccgtcgccccgtcagatccgttggggagagagagagagaggagagaggtgcgtgcagcggggtgagcggcgtcgataatggggaaaaggagagtggcactggttgtgggggataggggggacggcgccgcctcctgccaccgagctcccgctgtcccctgctaccgagccaccgacctcgccgtcccccgctaccgcgccaggccccgccgctggtcagaggaggagaggtggatccccgatggtgttgtcgctgctcggtccaccggtcggaggaggaggagaggtggagcctagctggcgctgttgtcgcttgggccgcgtcgctgccattctgctcagctccgtcgctagggagatgcttggcgttgccgccttgcttcctctccaccaaggaaaagacgttgagaaaggggaggaaaagtgaaggagtgatagtggtgggacccaccacaagtgatatgcattgtggagcatgtagcaaatacagttcttaggtggtgttcttttctcctgaagatgaagatgaagattaagattaagtttttaacgcaaaacgaggtggtattagcgtatgattgattgagttttaattattacaatcttgaaaatagattaatatgatattttagagcaactttcatatagaaaattttcacacaaaacgcaccgtttaacagtctgaaaagcgtaccatgaaaatcttaatttttatctaactcttattgaagagaagaacgggaccttagtctacgtggtgtgcaaggatcggtaaaaatctgtggcagactgctgttgctgagagaggccccgccgagaggagggcgtggccgcttgttgccctccatatgcaggtgggctgtcaatgtagagctccacgcgcggggaacatcacgccatgtcaccacccatgcgtgtgcatgcggaaaccggcgatggaacggcagcatctcatgcggcgtgaacgcatgatgatgcctcctgtactcctgtggccctgtgggggtggcgatcccaaacactgtaacgtctcctggttgcctaccaagtgccaactactatgtcccccctttggcagctttgttttgccttcttttttttagaagggaaaaaaatactcttcacctccatggtgggccccacatggatttgccatgaatatgatgaattttacaaaatactcaaaaatcccacatgaagtagttcgattttcatgtgaattcgcaaaaaatgtcatgcatgatatatgcttgctactccgtagaactcgctcgcaaaagtgttattgttgaggtttcgtgctgaatggttcgatggccgaatgatttctgataattatttgaaggtattaatgaataaattaaatattaggaaaaataaatttaaaaaaattctctaaaaacttgaaaaagccgtatcatttaggagctagagaattcatctatcattctattccttaaaaaaaacatggcataagatttatgcttgtcgcaaactaaacccagttcttccaacatcaaatatttttgacatgaggaagagatgcaacgttaaatatttacagcaccaacgaccctagggcaccgttcatattcatgggttattgggttatgacattgtttagcaactaggtggcattatcttatactctctccgttttctatttcaagttgtttgacttttttctaatcaaacttattttagtataactaaatttgtagaaaaatatagtattattctcaacacaaaacaaacatattatcaaactatactcaatgttagatttaatgaaactaatttcatatttaaatgttatttttttcgataaatttggtcaaacttaataaagtttgattagaaaaaaaaagtcaaacaacttataatatgaaatggagggattacaatattcggttattatggctgcacatctgcagtgcagcagcagtcctgatagaaagtttgttgggtcctatagcagaaatactcttccgaacacaaccataaattgttttgttctagaaaaatccgatataactcttattctagctacttcccttcaagtctggaacatatttttgtttgcctagaaatttaaaatgccccaaaaaaggaaatataaaccgggaatccttggcgtcgggcgctcgacgccagcaggaaaaatcgggcatctcggtcgcgtctcctccagcttacgcgttgcccccaccacgcaccctagcacatactccattgcaacaaatcatccacatattttggaaatcctcttttaaggaaatttgtttcattttttgttccaaaaaaaatatttcacctagtgtactcacaatgtttcactatgtatagatctaatgttgcagtgaattgaaatattcttttgcaacaaattacccacatattttgaaaaccctctattaatggaatttgtttcatgttttgttccacaaaaaatgtttcacctagtatacttataatgtttcactatgtatagatcaaatgttgcagtgaactgaaacattctttcgctatttgttgaaacattgtttttatataaggtgaaacaacgcccaatttaaatgaccgaaagattttcgatctaacaattccgatatacttggtggaacagcgcgcagcatataaaaataattcaataataagctaaaaaaaatttcgtcggaatatatccatgtgtgatcttgttttaaagatttaattgcaacgaatttaatggtgcaatcatatcatgatttggataaataatttaagaaaaaaaatagtttaatgtggttttgcacgtatgcgttatgctgacatcagcacccgatttttctctctcctcatcgggcgcccgatcctgagttgcctcaaaaataaactcatgaagttatctaaagggctgtttgggaaacagggacttattccaaatacctgtcacatcggatgtttggacactaatttgaagtattaaatatagactaattataaaacacattccataacattagactaattcgcgcgacgaattttttgagcctaaatacgccatgatttaataatatgatactacaataaacttttgataattatggattaattaggtttgaaaaattcgtctcgcagattagcttttatttataaaattagttttttattaatctatgcttattactctaaattacgtccaaatatccgatgtaacatgtacttaacaagttttagccccgtataaacactctcgaagggtagagcatcgattaactttctttcctgtactccatccagcaccattacaaactaaagttgatcgagtactactagtcactatagtacactactttgttgatccattagtgattgatgtaatattcaagcaaatcattaattagtactgatgcatcttatgtgtgtgcgtgagaaattaaatctctcaacgaatgtttgtatatgcaggcgcatgctgagctacctagtactggaatctgaacatgctgctccttttctttctttgattctagaatactgctcatctagttgtaacagaaaagtttgcaataactgaaatacagtaaaagttggtagatatcatcgatagtcagctgatcaatgaaggggatactaaaatttcccagatttttttttgaattaatgggtttcttttgtgtgtgtggttaatttcccagagtactgctggcttagtagtaccaaatttaatttactgactactccagaaagatcaacacttaacatactctagatcaattagctaggtagacatcaaaccatattaaccatataataataccactactttaacaaaactggcataaatacattttttgtaaggcaaaccagacgtgcctcaaatcacttttgcatgatactaggtgacaaccacaaaaaaaaattcagtgtttgcttgtgaaaacattttcacctgtataacaggtatacacctatatggcacagtgtatgtgtatgaactgttgtgtttttttcttcaaaaaggaaaaaagaactgttgtgctttgcttttccatttcataaaaaaatctaaaaagaaaatactcgtagataaccgtatttaggtattcttatatcggtaacaactactccctctgttttaggctataagacgttttgactttggtaaaagtcaaacggttttaagtttgaccaagtttatagaaaaaagtagtaacatttttaacccaagacaaatttattatgaaaatacattcaattattgatttgatgaaactaatttagtattataaatattattatatttatctataaacttagttaatcttgaaacagtttgattttgaccaaagtcaaaacatcttataacctgaaacggaggaagtcgacaacatattttgcattcaatatatattactccatccgttccaaacataagtaatttttgcatagtgtcaagttaaatatttttaactttaagtattaatgacaaaaaaataaaaaagatcaatcatgtaaaattgatattactagatctatcattaaacaaactatcatgtaactctttttatttaaaacattttattttatagacattgttggttaaagtagtatgtccaagttaaaaattacttatattttgagatggagtattttgagatggagggaggaggtcacttctattttcttgtaggcctcaacattccaacgtcgcaaagcatgcacgatgggcaatcatcaaggacagggaccttggatccaccatgcaatgtgccatgcaccttttgacctttaatttgcatgcatgattgccaagcaaatccccatatagagtttcatccgaaatagtttaaccagtgggtgaaatcatatacctacgactaattaacataaataaaaaataatttaacatagcttgtaaagtcatgtaccgataatccaatagctctgacaccacgtccaaggtgattatcctcggttcctcacaataagtgatttttgcagaactttataagattcaatttagtttctctgggaaattggaaaaaaaatataagagagtgtgtgtttagagacatgcctaatctagaagaaaaaacaacaatggcgttatatggggcctaattgttttcccaatttgtgatctcggacttgcttccacgcaagcagggtatggttaggtgggtttttccgttttcacgaaattcttccaaaattaaactatgtaagttggttagtagtatactagattatgtgaactaaagtcatttttatgggagacgcagatcagggccctactgataaactattcttggaatatgtgtcccccctgattaattataagagcaagtgagattattttagtagcaggtgcagctaagatttagccaaatctgcttgaaaaaaccgtgctttcagcaacctttctggttcaacacatgattaaaatagagaatgcatactaatttaacttttctagtaggaagatttctaaacatgacttattctgtcattaatggaacggattaaattgcttctttttcatgatgcttacaaagcaaaaggtcaggtaaagacatttattggtgcgtcacaaaatacagagttaacttaccagttaccagcaaattgccataaagaacattgaacactgaattgaccagtttttttacaggtgaacatttacttaaagcatgccaaaaagtgtactacttgtttaacataacacctaacataaacatgcagccccatcgtttagcttattcgagaaataagcgaaacaacatatttgcaaaccaaaaataatttattaataaaatttttatatatgtgttcttaatgatctaaaattaaggttgaaaaataaacttcgatgaaaaaaaaatcccaaaatcaactccaaatttaagtttaaaaattcaaattttgattaagcgaaaagataagtccgattgtgacattgttttcactgagggttatcagctccaacaactcttatctaaactcctcagcaaaatcggggaaaggctgaaagaaccacttaaactcagacagattaacacatttctatcatcgtatttccaaactaaaatccaactactgctcataagttcctatcacctttattattagtggtggagtttgagctaactttttaaagggaccaacagttaaaaggagaatgaaatacataatatttatgggaccattttacagtgtctccataatcctttgtcccgattcaacttggcctttatacattttaattttttttcacaatgcacaattgtttcatatacttgtaaaatggttgcaactaatccaacaacttcacttcaatgcctgcaccatatcttctgcaacttttaagccacttctgctgccatttgtctccttccctgtgactgaagttcttgaactgaaataaagaaaaagaaagtgttaaagatacaaacaaaaatactcctactcctaggctactcctccaagttgtagtaacagtaaaagtagaaaaataaaaaaagagaggaagaagttaaagcttgagctgaacatttggggcattgtgccaactctgactgcctgcctgagactgactgactggttaattgctctctgtgatggtatgggcggctgtgattttgccagggtcgttgatcaatcaccgtccgattgtatggtgtgtgtgattagtccaaggtagtcaagctgggcaggagtgagttgaggcttgtaaaaaaaaaaaaaggtttttaaattgttcctcccttgtccaaagtgaaaaggggagggggagggaccactttgaaagaaaaaaaagagcagctcagcaagcaatggcattttgcataaaggcccctggaggaataattggggatacacccccaagtgtgtatttatttggaaaggactctactttggatgaaatgtgcataggtttagcatacattacatctgtttttttaatatatgacgccgttgagtatttataaacgtttgtcttattcaattttttttgtgcaaatataaaaaacttaaatcatgcttaaagaacatttgatgacaaatcaagtcacaataaaataaatacttcctccgtttcatattataagattttctagcattacccacattattttttgtgtgcctagattcattaatatctatatgaatgtggacaatgctagaaagtcttataacctgaaacggaggaagtaatacttatattattttttgaataagatgaattttcaaacgtatcttaaaaatcaacgacaccatatattaaaaagggtgggagtattggttatgctcaacagaacatgcggaaataacttataatttatccattctatttgggaatttaaacttttgtttctatgagaaccatataaaattattgcaagctaaacaatgctaaattgctcagttgatcaggagttacccatgggccatgagtaagttataatccatatttcatatcatgcaatgatctaagttaattaataatataacataaattgggagctcggttggaacacatgatttccaaaacataaggattaaaaaaacataaaatttgcttgacacctcaaattctatggatgaaaaatagagaaaaaccatgaatcaaaagagagataaatatttttttctaagagattggacctcatgtttaaaaaaatcctccaaaatccctatgcttgaggcaatcttaaggaatttcataggattttggaacaagtattccattgtttcacataaacatgtacgtaaaaaaattcatagaatttgaaccctatataattcatccaaaattgctttgctccaaattagccctaaaagaaaaaaacactagcacataactacagataatgttagataaaagattatgttggcgagaaaagtcacatttacagctactagcaatatatttgtacatcacaatggaccatacagccgaggataaagccaatgcccaggagtgtgaatcgagcaaaaggttccaatccaaccgtttgttttaaccaactatttctatttagttttctatcactcaataattttcatggttttcttccgtggagacgtgttacacacctaagggaaggaagacgactacgctttttcagcacgagagaaatgacccttgtgctatcataattccttccacttggatggaccagaaaatccaaatgaggaaaatgacaagggctatactgcaaatctgctcacctcctacctagagagacagagagagagagagtccctcagctttgctgcgttgttcttacttcctcccatggagtacaaaaggcaacaagcagaaaacgttgcgttcacaccaccaccaccaaggaggccaggacagcaagaccaggcctgggctgtagctagctagctagcttgtagagaaagagagagaaacactggagctttagagagagagagagagagcaagaagagctgaagaggaggaggaagagctagctatcctatggtgctagctgtagctagctccgacgactgaggtgaggagacgcaatggcggggagatgcgccggcggcggcgacggcggcggcgagggcatgctggcgcggctgcggagggcggcagccaggcggatcgggctctcctgcgcctccttcttctcccacgccgccacctccccttccccgcctcccaagaccgtatgcattctctctctacatttcatagattttcttttcttttctaacggttcagatataatttagcagcaatttgttcttaagaaagagtccagctacccaaaatgcctcattttttttctgcattttggggtgtttcttcccagttggtagatgttcaagatacactaagaagggaaaaaaatgaggctgtttttttttcttttctgtggttaattaagttttgggattttgttttcaccatcaatgtatcggtttctggttgttcttggctttcagtttcttgctatgttttgggactgggcattttttgtctctctactaccatctgcaggtgattttcaagttcctttccttctagcagtaaaactcaatgagctgtcactgcctgtccttttcacctcccacattgcaaccctgcttgattctctccttccatttcagatgttgtttcatcaaaagcaaaaaagaaaaaaaaaggtctcccattgccacatctccttgcatttttttccaaaagagaaaaatctcctcccctagtggcctgctgcattgctgttttgcattttccaacagaaagatatgtcctggtttgttttggtgatcttggcctacaaaattttgtggttaaagttacatacgtttgaacatttaaactttgcttctcgttttttatacttttcttttgggcattctagaaatgagtatcttgcatgcccttctattttatctgtattctgtactgaagttccaaccagaatgaggtgtgtactccttttgcatttccccccttttcttgagtttgcgttgtgaacagtgtgctaacagtggctgtgtgtggcctacctggtttatttgatactgatcattcatttattggaattattgttctaggagtagctctcatccatcccatcttgtactagtatcctgagaaaaaagaattgcaatagggggggggggggtaccattcttgtggttcggtccatgtttatggtcccttcatttttctcccagagatctactttggatctacaattctagacatatatagtagtagtagtagtagtttgatgttaaaagctgtgaacaagttgtattttgggtttatttatacttgagatattttttttttgttgttgtttcagttgttggtgaaagttgtgcattctctctggtcttcgtacattttccacgtagaccgtctgttgatggttgttgcgaattgggcacatatttccacggagcttttatgtcttcccttttcctcaattttttttttaaaaatgggcatttatatttctttatcctcccgaagttgtgttttcttggaattggttatcatctttacatattgtccacttatcggtgcattgtactaccttgctaacaaactctagattaatatctttcttcagtaacttaactgttattagtgttaatgtgtaggcactaggcagtactgttactgtatgagatcagtgtgtggggactgaattgtgtgtctagattttctcgcttaacagttaccaaacattgtcgatgcccatgtgcattttatcatatcattgataggtaaataggaggggaaagtaccaaaatacactggaggagacaatcttgtttttcatttactttttctgatgtagaagcagattattctactagtcaagaacagtaggtattttgcctattagctgtattgcaatgtagtaacagattgtggtgtgtatgcagatctcatgctcagcactgaatgcgcctgcagacagcactgatgaagaccaggaaaagctggaggagcccactagcacaagaatggctgacaaggtgccatccctatgtccattttcctccttttcatgttctggaccacaactgcatggatccactatggagttttctatatgtaaatgtgtttctctaaccaagtagtataattatgtttatatttaacctcctattaacttgagaataaatcagagttatgcttgactgccatcaggaattaacaactgagcaagaagacaggctaaaaagaagaattgggttaagcggttgattgcaataggaaatattattgtttatatagattcctcagcgttgaaggttgttgatgctctagatgattacctctgaaataacctattctggttagccaaagtgtattgtcaaatgttgaatcatgatgatctagccaatgtggttagcgttttgccatttccacgactacatgttttgttttgaagaaaaaacagtgacgctattgtaagcattttcttaaaaaagtatgtaccaatttatttagtgaaaatgatgggttgcatggccatccactagcatctaccattgggccatataagcgttatgtttttttgttagtttcaataagttgggagctttagtactttttggtggcaattggtgaacaattatgtggtctcccagataacatgataattgtttccctagtgccacataaaggtacaaacaataacaggtaaataccttacgacacattgcaaccaacatgtcaatgcatcagtattacagaaatcttgaggaagacatgttctttttttatttgtctaacagagaatttggaatgtcggggctattggccatgcatattatgcatgatgccttctgcatgaattaattcatatgtaagtcatgatgcatataaatataatcagcttgtttgtttcagtagtacaagaatagttctgcaaagattgaaatgtagtttgtgaagattagcttcgattggatgcatgtttttggaattttttttgtttgctaacagaccatgaaaaattcatacaatgaataattaaaaaacaaaatatgtccgcgtcgtaataatcgatgaatagttctctgtccaggaattcgctctataatgagtagtttccattgttttataataagtgtagtgattcttttatggtaagttatttgatatgcgattttactttatactctcatctgatgtgtattctgataaataataccattaattgtaatattttattcaattcatttgcagaatctctgtgcaatatgtctggagcccctcagcaccggcagcgttgatattgacaatggtgacaggccagcaatcttcacatcacaatgctcccactccttccacttcctatgcatcgcctccaacattcggcacggcaatgttacatgtcccatctgccgtgcacagtggtctcagctgccgcgtgacttgaaggtgccaccattgctgcagaacaaccagtctgacccaatcctccgcatccttgatgacaacatcgcgacatctcgtttcaacagaaggtcatccatccgtgctgcccggtacaacgacgatgatccggttgagccttacaccttgaccgagcatgtggatccatgccttcgcttcgctctgatcccatccccagtggcggctcaccatcatgctctcggacattacccttgtggccgtgtgatgccactgcagcagcattgccagtacagcagctcctccatgctctcaccgccacagattgcttcaccaagtgggcagaggcgcgcttacctctccgtcagtctcgcgccacagccagccatggacctagttctggttgccagccctaatgggccacatctcaggctcctgaagcaggcaatggcgctggctgtcttctccatgcgcgcaattgaccggttagccattgtcacaaatgccaccactgcaacccgcgccttccccttgcgccgaatgtcatcccatggaaagcgaatggcattgcaggtcattgaacacctctgctgtgttggtggtactgatcctgtaggggcattgcagaagggcctgaagatactagaggaccgggcgcaccagaacccaagcagttgcattcttcacctgtcagaccatccaatccgaagctgtttcggggtcgacatgaaccgtttcaacatcccggttcaccagttccatgtcggcctcggtttcggggtgcagaatggctttgtgatgcacgagtttgaggagctcttagcgcggttgcttggcggtgtcataagcgacacccagctcaggattggcgagcacggtggagtggtgaggctaggtgagctgaggggtggcgaagagaggaggatcccgcttgacctggtgtcggactgcggcttcatacttgttggctatagctatctggaaggtggaagggaggatcagttcaggacaggcgaagtcgctgtcggtttcgaagagaaaggcgataaccggtactgcggggtcagggatgccggtggtctgagtatcggcggtgagaggaggagcagctgctgcgccgagagatgggactaccttgatccgttcatggcgcggcgatgggcgaagcatttcaatgtgtatagggcctgagttaaaaagagggggagcttggggctttgaagtgatcagctcagcaagtctggtttaccagtttgacagcatatgattcttgttggctctttattttttttttcctctcttaacattcctgcaagcatctcatgatcatcagaggaaatgtttgcttttttggcttttgttgtggatcagggatccatttgtaagatgtctggttttgcatcagatgtgtgcaatgtgcacaaggctttctgttctcaatctgtatgtgtgaatcggactgtgaacaaaactcagcacaaagaatgaaatatggctgcattggagtgagttattttaaaaagaaagtgacatgctgtttttcaaagaaatttaacaaatatgatgcgttatactagcaatttgcaggtttactggtctctgatatttcattgtaattattgagctgtcatttcttaaatttgattcatatttttttaagaggtttggtttcatattttcatgctcccttgtactcttacaaaacattgatgggttaatcaatcatcttaatcgagttgcccgggcgatggacgatcgactcctttggattccggattagaaggcagttatcataatttgaggaatcaattactcaaaattacatagagaattgtggcatggaaaaaggttaaaaaaaagaggtgccacgttatattattttggatttaaaagaacgtatggtcataaaactttgcgcccatagcacctgaggctcagtgccacatgatgcaaacatgcagttgttttttccctacgtagacaacaaaacatataggatttctgaaatttactctaacaaaaatatgggtctcgactctcgagtcacaaagtacaatacaattcagttcaagcggccaggacattaataaaattgaagttacaatcaggacccaaactgctgtcagaaatgcagatcagaactcggaaatcaatctacaatgaatagttggtgacggtaatctgctaaccatcagttatgtgctttcaaagccaaatattcggaaaacacctgcaaaaaaacaataaccggtaagagggttaattgaagctatttttataattaataccacttccattttggtttaactttctctcttgttgtgtactgagcagttgcagaattatatactataaatgaaacgcaagtctgaaacaagtgtatctgaagaaaatgaattcactatcttgtagcaagtcaaatgccaagctagacatttctttcatttggccgaactaaaatgagtgagcagcagcaattgtaccttcatcagcctggtacttgttcttgtcgtctcctgcgtaagccaggaggttgtacttggggttccattcaacactattcatagctgccttgcatggaatctgatgaatcgatcgtccagtttgaacattggcctgatcgaaggatagaaatgtaaaagaattattatttttggtaacagctagcttaggatcatattagaattacagtatgttgaactactcacaatgtcaatgaagggatcttcgctagcatatgcaagaaactctccagtatgattgaagctaactgttcttacaggccacctggaaaaagaacaaaaagaaaagatgaagaaagtacatgtttctaagcatcttgcaactgaaggtatactctaattaatctttgtttctttgaatgactatttccaatatgaggtgtggagaaaatagcaaaattagctaaacataactttttgtccaaatattcatggcaatattttagatacattggagagaaaaaaaaaggtatggtttaaaagcagcgaaacatactcgagtttggtaaaggttttaatgcaaaggagctctttgacatcccaaagactgacaagtgaatctgcacttccaacagcaaaatacctggcatcaacacattctgtaagtatccttgtcaaaatcattttaagctccatttagggctcaaagaaacaaaatattcaccagataattgagaacaaatgtacaatactttggcatagctacactaatgcatgaaacatgtttgtataccactatatccatgcgaacaagaacatgatacttttccacaataaattttgttgaggttcatgtagcagctcaaatctccaaacattaacatgaagacttgcaatggtgtatagcaaataatccattcttttacatggagtagaaggcaacaagtggcaaactattttgcaccctttcttttacatgctagtaaaggtgcctgttagttgcaacgggagatgggggaaggacgtgctattcagtttttctatcccagttttttaccagtggggcgtttttatatgtgggtccacttcttttggagggctgtttttttttttctgcgggtaaacaaaacttcactcctgataggaagcatgcacagacgaacgaaacttgcctttcagagtagtagagaaacactgaattcagtgtcccatttatatttaggcatgggtcatcatagaatcacttatggctaggtgctatcacaggtgagattcacttaaaggtagcttggacagaaagttcttttttttacatataccagtatcactatcaactgtcaaaagaccgagatagaatacaacattagtaatacccaaaatatagtatgtcaaataacttcactcatgcctatgctttatattaccttgaaataaaaaaaatcgttaactacataaaacaactagcatcagtataaggcattaagagaattagagttcaaagcgaagtcaaacagcatatagagaacctaatgattatagcataaagttcaaaagataatgtagttacaatgaaatgtcattggctgagatgtgagttgatgttgaacaaatgagcgaagacagaaaaaatcatcacctatcaaggggatccattccaatgcaataacaacccgctgtatgagcattcaatttgccaaccacatgaagggtgtcatcaagggaaggatcaccaaatacctcaacatttcctacataaacagcaaacaatgtaattacactgataccaactggtgtgatattgaaacttaaaacaacatatgggttttgtatcttaccaagtccagtagtgatgaagaataaatctccagttttgttccatgcaatctcatttatctgaggaacaacaaatcaataatttacttcagaaaagttaactgatctgaggagctatatgattcatttttatcagtagcaggtgtacgggcatttagctagttgaaatagaaaatttacaaaactgcaacataagtaatgcagcaaatgaaattaaagtacatcgaatagttaggtaattcacactcagtagtcagtactaattcaaataccagcaggcaattttcctgttccagacaaagatgcacatgctgccgacttatgcccactctactttttctcaaaaggtatatgactatatgtgcatgttcattcagagcagcgaaagattccaaaaggaagaagaaaattgctagaagaatgtttcaacaattcaaaccttcaagtggaaagtacctcataattaaacttaaatttgtgaagggcttttagcttccgaacatccactattgtcaactcatcctcctgcaaatcatagtgacagctgttactacacttgtacaattttataaaactagaactcacaaagtaaacacattggtgtacgcgggaccttgcgaactaacttgtaaactttataaaaataggtttactacaattattataaaatttacacaccactccccagtccccatgctcaataacactttactaactttgcatagcaaaaaaagtaaataattccatctaatttaggatcaatatgtatatattcaagtgtgtccatactgagctatgttgtattgatacttatacagagagcatgtcaaacacaagaatgaacattgcaatttagatgctaatttgccaaataactcatcactcaatctaatataaatcagattatagttacacatttctctttggaaagaattttataaattcctttcaaaatattgtaaccctcttctggcatgatatatgcaaatcaaaaccagttccttagtcataaatgactaccgttcttgaagttaacagggataacagcctaggcaatacataccttgtttccaacagctatttgagtaccaccatgtttataagtgatattgatgttttctccactaagttcgacgacttgacattttccacctggaaaagaacacgtcaaacagtttgagaaatagcgggtcaaataaataatataattttaaaaggcaaactgcaggcccaaatcttgtagagttataaatagagaatcaaaagtatgatgtacaatcctatgaaaaaaatcgaagtacaactaaaaaaattctgaaactaactttcaggtagagtcactacacaaaagaataagacatcttgtctggtaacaacaagttcattgtaaatggaacatagggattgaacaaagtgacaaaaagggattcatcaatttcagagagaagctgagaatgctgaacacaactgtggatatcttagttctttaaccttcaaagatgaagggaaccacttactccgtgcatcccagaggcgaattgacttgtcagcagctgctgtagcaactgtatcaggatgcttcggatcccagcagagctgatctacacaatctgtgtggcctttcaattcaatgtctttaaccttggactgtgcaatataaaaaccctaatcagcacagtactgacttggtacttccagggaaatagaaaccatctggggttttttcccctcctacgttccaaccaaaaatgtcttagtgttctcaaaacaatataatttagcttagaatttattttcctcaaaaccgcaggagggctgcgcttcctttcattaagaagaagaaataagtacaactgagggatccaaaagaacccctagctaagaaatcattcacaatttcacattaaatagctcaaacatatgtctcagagacacaggctatggtatgcttaagtgtgattactgtctgagtttctataattttaaattatacagcgggagatatttccaattaatcatcatgcttatctttcaaatttatagaaatgttcataaaaaaagggtgacagttattcatagtgaatgacaataaatgcgtttatctaataattccataataacaatgaaggttattttgtttgcaatcaggaaaggagagaatgtttacatggccatggggatcgatactccatacacgtgcagtatgatcaatagagcctgaagcaagcttcatgcctaggcagttccatgctacagagtgcacctaacagtaaaacaaaagatcagaattatacaaaatttaaggctgattatgtatgtaagatagataaaaaagaaggcaaaaagcgacagaaccagttaaatgctgcacctccatgtgtggaaggattatttagaaaaacaagaaacagaattcaagaaagaaacagagaaatatcgttgtactatgattctttctgcaagtaagatttttttttccctttgaattcttcccctcagaggagtagcaactttacaaagtcagacaagaagtcccttttcgtgaaaccaaattccttcaaaaattaggagtaattatgaccaggaatcatatttgacaatgcgctcattcaccagctcccagaaggaaagcaaccaaccaaagcttcattcaatctcaacatggcttagccctagagcaaaagaatcagcatatatacggcatgaacgcgaggaatcaatcactatatcctgctctagaattagaaacaaaaccgtacgtgtgaaccaaagatggatgcattttcgtcctaatttttgcttgtaacatccggattttagggcttccccctcgcaggacttttgagggtttaggacctcatgagaaaaaaacttatccccgcgtaggattggtgaggggggaatcgaaaaggttaccttcttcttgtggccgaaatactccctcgacaccaggttcttcaggttcatccccggcgtcgagcttccgccaccgccgccccgccgtctgtcgtcttctttcccctccattgtccccgcggactggggcacgggtctggttttgctattccccactcaccgcgtcacgaggcgcaaggcggcggcggcggtggcggtggcggcggcggcgggcgcgagacggaggagggagagccggggacggcgtcggcggggaagaggagagggttttcgcagaaacgtccttctacttttttgtttattcatgccacaagttcatgcgttatccttaccatggagccatggacacatcctttggtttttgtttaattgaatccatgccattgtaaatataccgataaatgttattacaattcgtcttttttaattgtgacattgaaattttataaaattagaaccatgccactatagtaatattttccatccatcttcgtcttcttagattcatctttcccctctttttttttctcatctctctccaccacctctttggaggggacagccgctgcggctgttggcaactttttgtgacaagtcgacaattacgatcgcagcacctaaacgccttgcggtgatatggagtcgccaaccacctcgatctagccaaacggccaaatcaagatgggttttgtagaaaaacagctaaaccggctagcggagccgatttagagatcaaaaatcagcctctaagccgatttagatcgatatgaggataactaacctgtctcataggcaatacggaaggttttcaggacaaatctacaaagaggtgtcgcactctcgcagcggcggcggacggtttacggcgcaaaccgacaaagatggattaaaactagggtaaaatagaaaacatggtaaaagaacgattcaagtaaattgtattcgggggttttacaatgaaccggccttgtcccttaaataggggttggtcttaccctctacaggcccttctccatatccaactcgggatagaaaccaaaggaaacacgaaacctaccttcccaggcaaggaaacccgagacccgacgaaaacaaactcggactcggaccctgacggtttgaccgcccacatacctgcggtcagaccggccctactagacggtcagaccgcccacacacctgtggtctaaccggccctgtgaaggaaacccgtcactttccaaactttggcaattttcctctatttcgtccataggtgccaaatttgggtgtaaacacatgcccccctgccttttttgtaaacatacgtgaacctaaaagcatagaacatgttatgtcagggtgataatccaattaccgcccataggacttcctaagcatcttgccaaatgctcgggaaatatttcttcaagtatttcccattaattgctctctgaaaacaccgtcttgaagtgtcttcatctccttcaaagtctttaaacgcttgtcgatgacgtctttaaaattgtttcccatcaaggtcttgtaatcttcaaccgacaagtcgtcttgcttgaaataccgaagagagccaagatttaccccaactggcaaaacgacaatttcaacaatgttttattactcaactcggcttatccattagcctgagcgtagtaaagagaagaactcatcaacttaatagcataagattcggcaaaacttctcactccgtacaagtaatattctcgagcggcacggcttcggcccacttagtgaagtaatccattgcaactagcacgaaccaacgcccttttgatgacgaaggataaatttgaccaatgaaatccaaagctcaacctcagaacggccatactttaatgataggattcaacacagcggtaggcgctaattgaacattgccgatccgttaacaagcttcactccctctataacatttgaaacaatcatcaattattttcggccaatgaaaccacactctcctaagcaaccaatttatcttacgggccgattgatgaatttcacaaatcccttcatgtactactctcctagcaactttaaactgatcattatctaagtaatactccatctatttttcggcgatataatatttgagcgcttgccgccgaatcttctgatcaaccttaagtgtaggatcttcaaatatctaatcgaaggaattctccaagctatttctaactcatgggcacaaatgtccgaattcacaattaattcggccttttaatcaattgtaacgtgccccccagctctcggcccgctatcggtcagaccggccacgcaatgccggtcagaccaccctgtctgtccggtcagaccggccatgtagagccggtcagaccggccgtgcaatgccggttagaccatcctaggtctatgactttgccaatttcgtccaaacttttgaaatcaagcatcggcctttagtatataatttttcttcacataatagccaaatgcttggtgtatcaaattattggaccaaaattccttctctctagatatatgaaaaattataacattcaactaatatgtctagatgaatactaattcaattggcttttgaaacaataatcatcatggcatcacaacacttagccaattgaagtatgatcaataatgaatcaccaaagtcatatgtgccacatgcatagattccaataaactaaaaatgtaagtaatcggcttgagcatgtatgcaaaatattaataatgccaatgttcctaaatacaataactctagaacaaatcatgacactgaccattgacattagccgaattactaataggcaaaactttcatggtgcaataaatatgaaatctatatcttatatggtgatccataaaaagacatatgatttggctttaaataaatatcaaagagtcatgagccaagtcatacttcaaacaaattatatgccaacctaccaattctactacctagaactggcattcgcaacatgtatgtataatatcaatttgataagcaaaaacacacatgtgctagatagcaagcaatgttctaacatggcataggcgtataatataacattgaacacaataaacccataccttgccttagcatctaacaaacggcggctcaaagatgtgatgttgtatccatcgccgttcatcttctcttggttccctcataaacataataatgtcttgccccctaagcaaaatcggctttctcgactgcacgatttcgaaggcaagacgaacaccgcaccaacatccacagcatcatgtgaaggagacttatctctaatgaccgatgattcttctctcatgaaattggatttatcactactatgggaaatcaccggtctcttaacttttacttctttaggtctccacactcgcttaggtgtcgttcgaggatctaaattgttatatgttttgttctccacatcttcggcctccttttccttttgacctatggcctggagacgctgtagcctcctcttttgagagcgagataggccagaaggtatccacttcggctgtggttgttttccaggagctaagcaatgattcttcatatttttggtcgaagtggaagatcctatgttgttctcaattttcccactcttctccaatgctccccggtcagaccggccacaagccgtcagtcagaccggccagtaaggtcggtcagaccggccgtagactggcggttagaccggccagctgtctcggttagaccaccaatgttgatagtcacggcgtcggcttcgatctcctttgcttgcgtggtttccaccgtatctccagtaagtacatgaacatcttgagactcctctttgacagcaatgacccccggagctttggcttctttcctcacccacaccttcttcacctttttcacctttgatccaccgaaccgattcttttgtgggaaatagtcttgtcttgaattagatgaatgatttggcactgtcctaggtgattccttccatccttgacaatacggcataggtggttgatgcatccatggcatataatacaaaaaaggataaccatatagtgacattggatatggataccatggcatcacaaccggaggtttatatggagttggtatggttgatggctccgattgctttgatgtttgaccaaatctcttcctatgagatgatcttggtcttttcgaatcactagtttagttatcaaatcgttgaccagctaatcctttcttgtatttagccataagcatctcaaaagtgagcttcggctttttagtcttttgggaactagatgactcatcttttgtaaccttacgatcttcagcctttgcattattgatcctattcttgggccgaggatccccaatagcaacacttttccctttctttttgtcaacaccaataggactagtagggagagaactattaacaattccggtcttaggcataggtgtaaccgaaatagtttcacaagtgaccgatgaagtatcattcggtctttactccatcaagcttgcatctctgaaataatcatgaaactcatactccatttgtgaccatgtagaaattgaactaggagcaagcaaactataccatgtagatgcaaagtttgacaaagaaaggggaaacaacttcaacttaagcaaatcatcactaccggccttaccacattgatcaataaagcgaccgatatgctccattgtagtcatagcattctcatctgtgaatttcgtgaagttgggcacctcaaatccttgcaggtatgggaccgaatctacgtgtttaggatacagtctttgatatgtatgcatagctactttggattctatttcaccactatcccgcaagacattgtcatcatcttttccaacatccacatgaccgatttgtgactcggtcttaggtgataatgctatttcactttcgcttgtgatataacctgaaccgtcacttagttcggctatattttcaatgatgctattttctaagctagcaacacaatccgaaccattacttggttcggctattccatcgttgtctaaactagtaacacaatccgagccaacacttggtttggctataatggttgttgcattatcatccaagctagtaagacaattcggaccaacatttgattcggctatacttgtcacgacatcattgcacaaattattaacacaacccgaaccatcgcttggttcggctatacatgatattacactttcatctaaactagcttgtaagctattgtcatccactcggctttcctgagccaaagcttcatgcaacacatgatcaacatcaagaaatatttggccattcaatctctttttaatagaatcaagcaatccatcatatgcaatgttggccaaatctttgtcaattattttcaaactaaaacatcggcttttaatatctctgaacctttcaatataatcagcgatagattcattgtatttttacctaaccgatgttaaatcagacaacctaagctcagtgttaccagtgcaaaaatgatcatgaaatttttgttctaattgagcccaagtataaatagaatttgccggtaaagaagtaaaccatgtaaaagcagtaccggacaaagataaagaaaacaagcgcaatttaaaagtatcactattagcctcaccacattgcgctaaaaattgacctacatgctcccatatggtccaactatcctcagcactaaatttggtaaattcgggaactctataaccacgaggatatggcacattatcataataattaggatacgacttttggtaaatcttagcatgattcctaatttcaatcccgaatttctccctaataatctcactaattatttcctccatattatcaggcctatattgatttggtggtggatttggtggcctaataggttgtgtttgtggcgcaatatgattatattggtcttgcctagtatcgggaggatatcccctattagtatcattgtagacattagggatatgtggagtagcatgggtaacagtattaacaggtgatgaataataattaaaatcaatactgctagtcgtggtatgaaaacctggagaaattcccagggaaccggtctgaccggctatagatagcctggtctgaccggccaatcacccggtctgaccgacccatggcccggtctgatcggtggtcaatggtgcggtcagaccggctacaggaggcccgatctggccaaaatagggcacggtttgactggctatagtagatacggtctgaccggcataaggtgcggttagaccggtgtcacgaccggtcataccattagctaggttttccatatagccgattcctatttaatcggctgtataatcacccattgacccccatagcattataagcatattgtataggagcaaaactaaaagtagcatatgcatctacacaatgattattaaccttttgaatagcaaagtatgggttgggtgaatcggaggttacctttggtgaagctacaacttgaggtagcgggacgtttcctttcacgacgccttgatcggttctaatgtattgtgtagtaatattattgaacccgttccctctcgttatagttgatgaagaaattccttgattaaatccggccatatagctcatagccaaaaatcgttgacagaatatattaatatacagtcttagttttccttgtaatgctactgtacttagcaaaagattggagaaattgaaccttcacagaaataaccgatacagtaggaatcggctttgttgttgttgtttttttttttgttgtttttatgtgaacagaagtagatcggcttagatagcctgatctttttttagcacgtgcacagtaccagctttgatcaatcaaatctttctgttgccgtgtgaagcaaaaaggaaacaatgttgctaatccggccgctgctccctgtgtgaacacagtttaacgtctagccgtgaccgaacagaacaattaagcttgaagacaaaaccaatgtcggcgacaataataattacagtgtaagttaattccggctgtttagccgaaactaattcgatgattcgacgaaagagtaattattagattaaacgaaattcggccctagtatggccgattagatcgttccccagcggagtcgccaaaaattgtgttgataactttttgtgacaagtcgacaattacgatcgcagcacctaaacgccttgcggtgatatggagtcgccaaccacctcgatctagccaaatggccaaatcaagataggttttgtagaaaaacagctaaaccggttagcggagccgatttagagatcaaaaatcagcctctaagccgatttagatcgatatgaggataactaacctgtctcataggcaaaacggaaggttttcaggacaaatctacaaagaggtgtcgcactctcgcagcggcggcggacggtttacggcgcaaaccgacaaagatggattaaaactagggtaaaataaaaaacatagtaaaagaacgattcaagtgaattgtatttgggggttttacaatgaaccggccttgtcccttaaatagaggttggtcttgccctctacaggcccttctccacgtccaactcgggatagaaaccaaaggaaacacaaaacctaccttcccgggcaaagaaacccgagacccgatgaaaacaaactcggactcagaccttgacggtctgaccgcccacatacttgcggtcagaccggccctactagccggtcagaccgcccacacacctgtggtctgaccggccctgtgaaggaaacccgtcagttttcaaactttgataattttcctctatttcgtccataggtgctaaatttgggtgtaaacagcggccatctcctcctccccccacagccacagggagctgctgcgagaagcaacaatcatcatctatcaccagcaacaagttggcagatacgtagatcagggcacattaatcgtcaccagatcaggtaaacaaaaacaacagagaggaggggtgagggatcatgtcggctacaagagaagggaagaaccaaatatttttctccttttcctctttcaccaacgacgggatatgttctagccttagctcgtcgttgtcgtagacacaaccaacgtcgccgacgccgacgccgataggcggcaggttgaggtcaaactgaaacgtgagctgacacgacagtgaggcggtggcgtccgtgcagtcctcatcaaccatcgacgccgacaacccgcaatcattgtggcagtcaccatcaaggatctacgatggcgaaagccgtggaaggagcaccggtcgcggcctggtgccgaatgactcaatggtggagctaaggctggtggtggctggcctagctagcgatggcagcggagtagggtgggtaggtgaggtggtggtggtggtgctgatggtggtggagctggggctgggcgtgagggagggagagagtgaagttggtcttggccttgggacccggagcgcccgcgctgccacatcgtaggcccgcgcagcgtcgtaggcctatgtgtcttcctcggcggagtcataggtttccagccacacccgcgccttcttcaccgggtcacagatcaccgccatgtaccgcccccatggccgcttctgcaccccgcgaaaccgcgtgcacctcccgccggtggtggagagagatgaggaaagaaaaaaaaaagatgatggagaaagaagatgaatctgatgagtgggtcccatttgcagatgaggaagaagctggaggtggatggaaaatatgatgatagtggcacggttctaattttgtaaaattttaatgacacagctacgaatagataaattatagtggtatttatttaaatttgtatatttacaatggcatggatcatattaaccctttgttttttcaaagcaagaaccaaacatgagaaatatctgaaaatggttggaccaagaattgtcatagtccaccttaattagtacaggtggggactttaagtattaggcaaaaataaaagccacaaactatatacaactccatgatgtagatacatgtacaaaacactacaagcactggacactagtacctaaaaaacatgttaatgcattttttgaaatattttaactaagttaaagttgtttggaggtgtagccttaatatgtttcttggtgacatgctgatacctggcatgcgtcattacgatgtctttgcaaagtcatcaaatcatcttgaccatgacctcatgttctaccaaaccactatcagggaccttccaaaactgaactgcaagtccacaataagagctagctacgcctcccacaactttaaccatttactgaaaaaaagagatggcatagtagaaacagaagctaggctatgttggaacctgtgggttcctaacccacctctcttgcacgaaaaatgaggtagttcattagtacatgattaattaaatactagtgatttttttaaaaaaatagattaatatttttttaaaaaaatctttcatatataacattgttaaaaagcacaccgtttagcggttcaggaaaccgtggaaaacgaaaaagtagaagttgggaaatgggatgttcgaacacggcctaatccaagtttgagttgctcatggtaagggcaatagtagtgcgccatagttttttttttttgctggtcctcacataccacgtagactaagaaccatatttgctacatgctctacagtgcaggtcacttgtggtgggtctcagcactatctctccttcacttttcatcccctctccttcacttttcatcactttgcatgtttgccttttccagttttccctagcatagaggaagcaaggtggtagcgtcggattgtctctggggacaaagccaagcagagcggtggcggcatggccgaagcagcgacggtggctccacctctcctcctcctccgaccggtggcccaagcgggggacggcgcggcaggagctcgctggcgcgagggggggatggtgcagcgggagctcagcggggttaatctggcggcacggtcgaagctgtgatagcgccggtggggctccacctctcctcttcctcctccgaccggcagcccaagcaggggagggcgcggcaggagctcgccggcgcgtgagggggggacggcgcggtcctctccgtcgagctgccgttgctgtggtactcagtggcacggaacggcgacgacaacgaggttaggtcatcagatccaccacctcttcttcctcctccgccgccgccccgacaagctcgccagatctagcctcgggttcgctggatctagcgagcgacaccactttgtgggcaatgcacctgctcggggtggtagcctcatcggcaaccggcgccgcctcgaatgagatgtgggggcgcacattaggacacagcatctctcaatgcgccacgccacccgtgcctgcaacttctgacgaagaatgagtgacttgttttgaccccgtagtcttgacttgacaacgccacgcacgtagctggggaggaatctcctacgtggacggttggggcagaacgacacatcagtacactgtgaacgcccttacagctcaaccaccccccccaaataggaaactactgcttccccctcttatagttttttctaattaagaaaatttttttctcgattcccgttagtacgctttttaaactgttaaacggtgtattttgtgtgaaaactttctatatagaagttgctttaaaaatatcaaacaaactcatttttcaaatttataataattaaaaataaattaatcacactttaatggttttctcgttttgcatgtcctaacttaatattcatcttcattagattcaaacaggacttgtcctctttgcaacagctcggatttagatttttctttagggctgggtatttctgtttttatatatctatggatttagatctaccatctaccatcacattgataatatttgaataaattattttgtacccattttatgtgtaatttaaaattttatattactataatctaacctataaaattcaaatttaccgtggatccaagatctagagttgtatcaaataggaccttaaagaaataaaatgtaggaattttaggtatgggaaataaatcctatgaaagtccttttgaaacaaatgggttgatccctacccaaatccttaaaaatttctatgtaattatatactctagaggaatgttgaagaaaaataaatgtggttttacctcttgttttcttcttattgtggctagagttcatgcatttttatggagagaatcccttatacaccgctctaaattggccagttcctttatatgctactcaaaattggcttcttacttttatgccactggttcaagtttttcatccttttatgtcactcccagcacggtagcatttgttgacggtaagttagatgttagtttttttcgtaaatgaccaatatgccctctcaactaaataatatgtaaacttcaaaaattcataactaatttattttaaatcctttttgagtgaacaaaattttgtcagaactagtgaaaaatttgctttgtattaaaaatattgttggaaagctgcatgttttatgcttatattgaaaattcatttgtgatggtgatgactaaaattgtacttgataataaaaaaatcaattttcatatgttgtatctagtagctatcttggtactaaaatgctatacatatatcaaccaatttctctatcaaatgaaaaatacctatcattggttgtataccaattctcaagggcaaatgcatctttttactatgaagttaacggtcaactagcggtggagtgacaacaatggtataaaagagaggacaaacttgaaacggtggcatagaagggaggagccaatttgaagtggcatataagtgattctctcgtttttatgtgtcaatcaaattacaattatgaaaaattattttgctatgaaattccatggaaatgcaacggtcatgacattttatcctccattcttttctatctatatgtttcaataatattatgtttcaaaggaacccccctaatcattgcctttatgatgtgagaaactatagggtgttatgagaaatcttttgttctaatttgaagttttgaacgggcaccagagtttgcaacattcaaatatttatgaagtagagtttattttgtcacataactaaatttttaattaagtgtagataggccaacgacatctaaatcaacatgatgcctattgtttttttctaatccttcgataaaactatctttatttatataaatatgctataggactatataaagtaggctcttagctaaatttaactcttattgcgtaaccatcaccattgacatgtccgggatcgatgatagggttattggcatactaagagtaggatcaatgttaccatccattgtataacgctccgcttttcgtgagacgttaaaaactagtttgagaaaaatcctatatgcgaaaattccgttcactgtgtgagagtctaagtcgtgccgtggatctcaattcaaatccgtccttgttccctgtcaccgccatcaaaaatcatccacctcaagatttcaacttccgaaatcaaacatcggaattcaatcccgtccttgaactccttgccaatatttctcccgattccgagaatgtcaaatccgtccttgaaatcctccctgtccatcgattgatctatccacttatctaacctatctatccatctatccatctacttatctgtctacctatcgatctacctacccagctgtctatctatctattgatctatctaactacctttgaatccttgccaaatattcgccctgactccaaaaataaccaaattcccattttgaattcattctccaaatccaaatctctctaaatcaatctttcagaaaaagtctattttgcctccctctggtttgtggaccgttttcctcctcggcccatcccctctcggctgctccttctcctcctcccctcgctcgtgcgttgcacacagccgagccgagagagagcgccgcgctcgctctcttcacttagctcgtcctctctctctccgtttctctctcccgtcgaagctcccccaccggcgccggttcccgccgccgccttttcgaatttcgctgtgcccttgcatagcgcgcgcgctcgctcgtgcatggccgaccgcccggtcgccgccgcgtcagccctggccgcctgcgccgcgcagcagcccatgccgccctgccactcgctccacctgtgcgcgcatgcgtccaagacatggaggcagagcctcggctcccctctctcacgcgctctccctcctccctctgctcgcccaaatcggtggctcctttcccctccccttttgctttttccctctcagcccggccgcccgtgaccacctcctgccgctccttgaccgcaagcgccgcgccagccgagctcccttgaccacctaagtcggtttcctcccccaaaaccgacttcccgtgcctataaaaccgcagccgagctcctcctctcaacccctctcgcttcactctccacgctgccgcgccattgtcgcccctgccttgcagttgccctcgccgtccgtcgccgaagcaccagggagaccggtgcgtgcgaaggacgcgagaagaggactccgagcgccgtcatcttccccttccccggcccaaggccggagagctcgctcccgcaccgtcggtcacccatcacagcgcccatctcgactcggtagtgcctctctccgttctactttctcgctcgccctctccctcttttggctcgcacggtagcttggtagccctcccgaacgcgcgtagacaaagccccaattcccgccgccgcccggaatggcctcgccgctattgccgcccgttccggggagccgccgctcatcgccggcctccctcggggcccctccgtcccatccggcaccggaaatgaattccttgcaccccggagatactctcgccaccttgaatcgacctctcatcgccccgccacgatttccccttttgctcgccgccggccgccgccgtcgctatccgccgcccttgacctctcccggcgaaatccgagccgttggctcgcctcctctcgcgtctatcttcgctccggtggtctcccctccttccgccgtgcctcgcgccgctccgccgacgcgcgccgccgcccgccgtccatccggccggccttcgtcttcctcctctggccattcgacgcagccgccacgttggcaccacg

SEQ ID NO: 7289 - DNA, 14741 bp, Oryza sativa
gaacatgaagtcatctaggcatgttaaaagaagactgaagtctgttagaaagcagaaaaactttggagtgatagcattggactatgtccagacggctaaaaatctggcagatcagtttaccaaggggctaccacgtaatgtgatagacggtgcatcgagggagatgggcttgagacccacttagagttgcacaatggtggaaacctgtccattgtgatcggagatcccgtgaatttggatggcgaaacaaactattgggtaactgagagaagagaccctaaaatgagcttatcttcatgatgcacttctcttctattctgtatggtaggatggtatacaccttaatgtgatccgagtggcttttcataaagcagagatgttatcctacagaacatcttagaaggaacacacctatatgagtccgactgctagtcacagtctatgagatctgggtgatctctagatactcatgaaaaggccaggagtatgacttatatgctccaaacagaggggatgcaaacaacagcctagtaccagttaagggtatgagtgaaacctgaatcgcacaagactgacaattcaaggcatagtccattgttcagttgtgatctggtgtagctcttttcctaggtggaagttcaacttaacagtctccaccgaaacactggtataacaaacaggatcagaatcgagagcatttcctatgagccacgaaatttggtggggattgttagattaatgggctaggtctaattaaatcctaataaattccattggcccacattaagtgctatgggtaataataccaccttggaaatctaagtgaagaggtctcaacttaaatatggaactagtggagagtctctgttgaccggttgagatggtgcatggacaaccaggcggggcgaggcgaggcaaggcaaacagctgctgctgcgctctctcgttttgtaacagacggtaataaacacggagaattgatttcgtatcaatgaacgcgtcggttaccgaattaaacgtcgtgaattgattccctcggctaccgaattaaatgccctgaattgattccgtattaacgagcgcctcggttccaaaattaaacaccgcggctgatgactccgaacgttactctcgcgcttgcatatatatactccgcagcgaccagaaggacttatgaagttcttgctgactcttgcactttgagttcctcctcctctattcttgagctgcagaatccttccccggttctgttcacctgcgcgcacaggtgtacgggacgagcaggtgcctccggaactccgtccgcttgagaacttgcacgggtaggcgagcgatcaagtttttgggtagcgcttcaagcgtgactgctcctgttcttcgttcttcgacgacaacgttgcatcttcctctacttctgcttcaccatggcttctactggagagaacggaggagacaatatcaatggaggcaatacgaatgcctcaacatcttctgcaccatgtactttatttgattttcttcttgttatttacatgttcacaatgttatccataggatttcaatcctatgtgaatgtcaacgatgtctatgcttattttaccttaagcatgcttatgtttatgtttagccttatcactagatcgcttctcattgtgtatgtcatgtttattgtcttaatattttggattaaaatatgccgaattatgaccaaatttccaacagccaccacttctcgtcaccgctgctatgcttcagccgccgtcggatggcgctgacgcagggggacggagctgatgagggggaggcacaccagtcgcgtcgctgctgagctcccgccatcgctggatagcgctaatgcatgaggaaccgcctcagtcaccactcctcatctccgctgttgtgctcgtacaggttccagatggcgctggggagccaccactcctcgtcatcgctgttgcacttcctctccgttgaaattgggagaaaacatgggggagagagagggggtgcatgttgtcaatcttgccgtctatggcattgtttttttaggtgtttttgtttttctgttttcactgttcctcgtcaggtagtgtgtcgttcatttctttgtgttgcttgtgggccggctagctatagcagctacgtcgtgtgtaagacttgaggcgtgcgagttcacgtcgaagtcgtggagtctgagtctcgcgcggcacgatctgacgtgtgggatggcgcacgtcggtgcggatcgtgtcgtgcgcatgatggtccactactgccgatttactagcgttgtttccaaataaaaggagatgaatataacccagaaaagctgctgaaggtgttgcagcgccaattcatgtgtgttcaagttcagaggcattgttgagtgttttagtttgagagttgcagagagatcgaggacgccgggattccgttcaccggctaacagtgcatgagatagagaaggaaggagagagagagggaggaagaataaagagagaggatgatatgtgggcctcataattttttagatgacaaatgggtctcacatatatgttgttaattctaatgccacctaagtgtcatgttaactctacagactaggtcaacactaacacatagatgccgcgtcagcgaaaccgctctccaaaaccattgagggagttaattgtacaggttttaataaataggggtcgagatatccggtgttatggtttagggatacgaattatatttgtttatatttgttcactggttaagggagttaaagctagcgggtgtgctagcagctgattggttcatttgctgtcccttcgttttactgacacatgtccatgcagcattcggggtagggcgctcctaacgtgactcttctcctatcgcgagcgtctgctgttcctgtatttagatatctcgcgtacatgtatacgggtccaacgggagtagcccctcagctagcaacttgggcctatggtcatgagccatgccaatgcttgcactatgcaggtcgagccagcttccacatacattcatgtcctgaaccgattgactgcgtgcctccgtgcatttgagagtattgttggactacagcgtaaaaagaacagcgacagatttaagcgtattagtctcatacaccatttttagtgtaaaatacacattagttcattattcaattaaatcaaagttcaatatcaatgtgttaacggtaaaatctggcagtggggttcagatagaagggaataaatcggtacagtattttatgaccaagcatgaaggatttgagatcaaattgcgcgtcggatggaaactgtatcggctgaaagcaaaagccaagagtcggattgaccaggacagtcaacggccgattcagccgatacagcacagtttgggtttagcataagcccagtttggaataattgatattgccaaatagagataaggctcattgaagccaattgtatccattaattaggttagttacgacagttttgttagttttgtcaagagacggccgtgaaaggtcttgttcgtatggtttgagtcgtgtccataatgaacttattttgtactcggggtataaatataaactgttagggttacgggtaaggtataccctttacctttcggtatacgtcacatatcgatatggtatacctgcgtgtatacggacattttctgcatacattaaggaaattcatcacggagttcacagatggaaggagtcctactcggacaggactgggtcgtcactgtatcatgcagggtccgatatcttcgagttctacttggaaaccgcctgacctgcgatataaaagggaccccctaggaaggacctaaggcatcgaatctcatagccaacacatccaccacagcctatgaagtcggagtctacaggagccaagtcgccaggagatttagttgaaccagctcgattacgatctcgccggtatcatcgagttccattgttccctttgtaacttgtgatttccattatataatcccatatcaactggattagggctaatacctatcaaggggcctgaaccagtataatctgtgctctttgtgtgcttgatgtcgtattacgtagatcctcgtaccagcgtaccccaataccctctatatccggtctacgggtatcccccgtcaacagtggcgcgccaggtagggggacttggtgctcaaggatctactaatatgtcatccagtttcgtcgacaacagcgctaacaccaacctcaaccaaggagttcctacttcgacaatgctggtgtggactcaagtcagcgaaatcgtcttcccggtttacaccacggtgccgatctcagctggtccatcaatgaccggaagcgagaacacggtggctacaacccaagacgactccatgtcgaaggatcctcccgccgaagcggagaacggaacgtcgacgacatccgagcctgagaaggatcttagtgcggccaaaccttgtcttttcgacaagaatcatgagccgacgaggataacttccgaggcgacaaggtcctggtgtcctatccacaaaaccagaaaacacaccttgcaagcttgctgggtttttctcaacgtacacaccgaaattcgtgcctgcaaagagcgtggaattcaacgtatttctccaactcgtgatatctattgtcctattcacaagacaaagaatcacgaactctaaagctacaaggtctttctcaacgccatgaagatgccgcttcctaaggtccatcagtcacgtatctctcttagggatgcggacaaggaacaaggagcgacactgatctcggatcgattcgttggggtaatctacatcgaccctcacgagccatcagttctacatttgctcgaagactatggctcatcgtcaacaagtacgccacgcgaggtgttggctatcgacgggatcggcacgtcagcgcgcgctaatgcagaagcagaaattcaagtgaaaggcaacgctgggtgtagagctttcagtcgttctgtcccgcacaacacatcagcacatcagggccgttctggttgtagagctgatggcgctatcactggacaacccaccgccctgacagtactgcacatcagcacatcagccctgatggcgctaatgctggaccgtcagtgatactgagggaaaccccctatgaccccgttctgaatgacaatctcgcacgctggacagaacggctacgggaatcagtgaccaacctcagcaacgcgttcgaagaggccgccgctgcagcgcacctggaacagccacaatttggcggtgctaatggcgaaaaccctgaacagcaggaatcgcctcatcgagccacccctccacctcacggcaccggtgatctccgcgatcacctgaatggctgccgagaggcgcgacgcgcacgacacaatgggaaccgttcccaacatcgcgtctcttcgtgacgtcaagataacgaagaacaaggaagccacacgagcgaagaccgagaccgcgataaccgccgcaaccaccacgatcacgacgatcacgaacggcgggtgccggacgatacttgtcaaggacgccgccataatgacgacgacgatggagatcggcgccgggacaacaacggggggcgacgacgggattctcgagaacccggccgatgtcctcagaatcgtacaccggaactaagtgacccatcatcatcgtcatcatcttcctcatcctcatcatcagatagacatccgcgaaggacgtatgatcgccgacaacccaccgcccccaacgcttggtgtagagctttcagtcgttcgctacgtgatgtccgatggcctgaaagattccgaccaggagcaatagagaagtacgatgggagtaccgacccggaagaattcctacaggtctactccacggtactctacgctgccggagtagatgacaacgtgttggcgaattatttgccaactgcattgaaaggctctgcgcattcatggctgatgcatctcccgccctacttgttttcttcgtgggcagacctgtggcagcagttcgtcgccaacttccaaggaacttacaagcgccacgcgatcgaagacgacctacatgtgttgacacagaacccgggtgaatccttgagggattatgttcggcgctttaatgagtgcagaaatacaatccctgaaatcaccgacgcttctgtaatccgcgctttcaagtccagtgtcagagatcgctatactacccaagagttggcaacgaggcgcatcacgactactcggagattattcgagattgtcgatcgatgcgcccacgcggacgacgtactgagacgcaagaacgacaagccgaagaccggaggagagaagaaaccagcgaaggacgcacctgagtcaagcaaaaagaaaaattgtaagagtgggaaaaggaaagctcaagcgtaagttctcgcagcagaatacgccgaccctgccaaacgcccagacccacaaggtagcgacgcgaagaatgcatggtgccttatacacaagtcggacagacattctttggaagattgcctcgtcttcaaaaagtcgctcgcaaagcacatggcatcggaaaaaggcaagcgagtacgtgtggttgagaaggacgctgaggcggctactcaggaatcggactcaacatacctagactccgatctccatgtctcgcacatcttcggaggttccacggcatactcctcaaagcgagaatacaagaaagtggaacgtgaagtctgttcgacgtggcagggggctgcacccaagatgaagtggtccgaacagaagatagaattctcggaagaagaccaccccaagactgccgttatcccaggacgatatccgatcttggtcgaacccagtattcggaatatcaaagttgcgcgagttctgatcgacggtggcagctcaatcaaccttctcttcgccagcactttggatgcgatggggatcccacgaagcgagttgacacccaccgatcaacccttccatggaatcactccccagtcatcgtccaaaccattgggcaaaattacgttgcctgtgactttcggccaagcaaataacttccgaacggagcaaatcaccttccggggtttctgattccgattccgaaaaaaatatgaaaatgaaaacgataaagatgatttccatccgtttccataccgttttcacctatagtgctcaagatgccaggaccgaagggaacaatcactattcaaggaaacacaaagctggcagtacaatgcgacaagcggagcctcgacatggtcgagcacacgcccagcctacccgccacagctgagccacccaagaaagtgagcaaaacaaacaagacaccaaaaccggacggcgcaatcaagatcgttccactcttcagtgccaaccccgacaagaccgtcaagatcggggcatcactaggcgagaaataagaactcgcgctcatcaccttcctccgcgacaatgcggatgtgttcgcttggcagctgtccgacataccgggggtccccagggaggtgattgagcacaaactcatggtgcgacccgacgccaagccagtaaagcaaaaactgtggagatttgcaccagatcgaaaacaagccatacgagaagagctcgacaaacttctcaaagctggtttcatcagagaggtactccatccagagtggctagccaatccagtcatggtgcggaaggccaacgggaaatggagaacgtgcgtcgatttcaccgacctcaacaaggcgtgtcccaaggatcacttccctcttcctcgaatagaccaattggtggactcaacagccgggtgtgagttgttgagctttctcgacgcttactccggctaccaccaaatcagcaaggcgaaagaggacgaggagaagacaacattcatcacgccgttcggggtattctgctacgttaagatgccgtttggacagataaccgcaggaaacactttccagtgcacagtccaaggtgcacttagcgaccaacttggaaacaatgtcgaggcctacgtcgatgacattgttgtcaagaccaagacaagcgactcattgattgacgatctgcaggaaacgttcgacaacctccgacgatatcgcctaatgctcaacccagagaagtgcacgttcggagtaccatcgggcaagctgctcggtttcctcgtatctggaagaggaataaaagcaaatcccgagaagatcaaggcaatcgagaacatgaagtcgcccacaagactcatgcaagtacagaagctaactggatgcatggcggcactaagcaggttcgttgctaggatgggagagcgaggacaacctttcttcgctctgctgaagaagcaagacaaatttgtatggacataggaagccgaagaggcattcattgcactcaagcgctacctatcgaatccccctgtacttgtcgctccccaacctaatgaagaattatttctttatatcgccgccacaccatattccgttagcactgtcatcgttgtcgagagagagaaggtgcaacagccagtctactacgtcaacgaagctctccacgacgcaaagacaatatatccacagatccaaaaactgctctacgtggtaatcatgacatcacgaaagttacgccactacatccaagcccacagggtcacagttgtctcctccttccctctcggtgaagtcgtgagaaacaaagacgtggtcggccgcattgcaaaatgggtagtcgagctaagccagtttgatgtccactttgtgccacgaacaatcatcaagtcccaggtactcgccgacttcgtagccgattggactatacctgataacaggttagacaaccaaatcgacaacgaaacgtggacaatggcgttcgacagcgcactcaacagccaaggagcaagggcaggattcgtcttgacatctccttcgggagatcaattcaagcatgcaattcacctcaacttcagggcaaccaataacacagccgagtacgaaggactactcgccgagataagagccgcagctgcactcggagttaagcgactggtcgtgaaaggggattccgaactagtcgcgaaccaggtgcacaaagattacaattgctctaatcccgagttatccaagtatcttgcagaggtcaggaaggtggaaaaaaggttcgatgggatcgaggtccgacacgtataccacaaggacaacatcgagccagatgatatagcacggcgtgcgtccagacgagaactacttgaacccggaacttttctggacgtccagacaatgccatcagtcaaagaggcaagcagcgaagatagcccagtcgcccccgacatcagctcgggggctacagaggcagagcgcgccattgttgatatcgagaccatagacgactggcgcaccccactgattaaattcataggtagcgaagagttgcccgaggacgacgcagaagccgagaaaataacccgtaaagcaaaattctactgtatgatcggcaacgatctatacaagaaagtgccaaatggggtacttctcaaatgcatctcatccaatgacggtagacatctcctcctcgacatacatgaagggatctgtgggtcacacgcagccggtcgcacattggtcggaaaagcctttcgacaagggtttttatggtcaaccaccctcaaaggcgcttgcgacatggttcagcgatgtgaagcctgtcaatttcacagtaaacacacaaagctaccagcgcaagtgctccagactatccctcttacttggccgttctcgtgttgggggctcgacatactcggaccattcccatgaggacagggcggctacaggttcctattcgtggcgatcgataaattcactaagtggatcgaagcgacacccacgggggaaatcaaggccgacaacgccatcaaattcatcaaagggatattctgcagatatggactgccgcatcgcatcataaccgacaacggctcccagttcattagcaccgacttccaggattactgtatcgggctgggagtcaagatctgcttcgcctcggtttctcactctcagagcaacggacaggtcgagagggcaaacggcatagtactacaaggaatcaagacccgcgtctatgataggctcttgtcacatgacaagaagtgggtcgaagaacttccattagtactatgggcagtgcgtaccacaccgacaacgtctaacaaggaaatacccttcttcctcgtgtacggctcagaggccatgctccccaccgagctacgacatcaaagtacacgagtacagaattagtattccgatgagggtcaggaggagcagcggaacgacgatgtgaatctactcgaggaacatcgcgaatgagttgccgtccgagtagccagctaccaacaggcccttcgccgttaccatgagaagcgcatccgagcacgcacgctttcgatcggtgattacgtcctctgacgggttcaaagccaagcagggcgaaacaagctctcacccaaataggaaggaccatacacgatcacacaagtcttgcggccaggcgcattcaaaattgcagacagcgatggtcgcgagttggcaaattcctggaacattgatcaattacgtaaattctatgtataagtcaatcgtatccatacttgtaagacatctcatagcttcaataaagcctattttcaggtacggattacaaccaaagtgttccttcccgatgatcccttacccagatgacatttagcattgaaacctatcctcttgtccctttacgccgtcttgacaaggcctccgaaaaacctaagggatcttcggctggggacgcctagagccgataaggccttgtcggatcctgtagagacgaaagaccatgtaagatctggtcgtgtaagagttcttgccgtgcgtattaaccaagccgtgtaatcggaaattaactttccaacttcacggctgggggctaggatcagtgcttgtaaaaccaaggcaggtcaaaggtccaagagccttatcttccgagaagtattctccgatgacaaggctgggggctagggagagtgtatgacttaaaagactgatcgacgtcgtgaagtgagaagacactcttacacactacatctagagtaaggaagcttagttagatagatcccttttctatttcacaagtactgcttacaatcccgtaaacatccaaaactatattacacttttccctaagatatttgtcacagggtacagagactaccaggaaggccaacgccagtccatagactagaagaccttctctgccagcggcgccatcgacttcgccaggtgatctatctccaccggagttctctgagaacgagaaaacccttcgtggaggaactcgaggtgcagttgcgggcgatgatctcgtatgcaagccaatacatgccctccggcatatcggctcgatcgacggcactcctgcttcagagcctcgtcaatacgcttgtcgatgccttcgagctgggtgcaggccccattcaaccacgagatgtatccggccgccgactcctcgggatccccacggggtactcggagctccctacagactcttgtcatggacgtgcagcaactcttcagatacgagttgaacctcacctcacgacctcggagtgtttccacagccagctccttctttacttccagcacagtcctctcgagttccgctacctcaaatttcgtcttccaatattggatgcgatgatcttggtcagcaggtgcactctcgagatctgctcagcgtgaaaacgactaaatcaagccgctcttctcttccgagaacacagcaaatcaagtcaatccaaacggaagggtaaaggagatggaaacagagatgaccaacctaaggaagtcgtcaccatacccgtgtccgcgggcaaattttgatctacatcgtcctgcgacacacgtggttcaaacgcaagcgtcggaacgatcaccggcaactcaagctgcccgcgctgctggacatcctcgacatcgacatctctacaaacgacaacaaagtacttgggattaaaatgctaaagaaaatgaaggtgatgattgcgcacgcaaaggcagttgaagccaacaaaagttttacaaagcatgactgattaaagagtacaagggaactaaagtcttactcttcaaaaagtgggagaacagactctcccagatcaccgacttcctccatcacgcccttacgtgcgtcgttagtcgctccctgatccaagatccactgaagatcaagttcagggtgcgctaacctcacacacgcgaggacgtgacatgccccggtgtaaatcccgttggacgtctcctccccgatcatggccgcatgcttggagggtatcgcctccatcgccgtggccagttctgcgagtgaagtcatcagcgagaacttgtcggggttcaccgggatggtggtcgtaacaccacatttcccagcgagctggtgtaggctggtgtaggtgacccgtaacgagccacggatctccgacaggttgttctctgtcacgactggaaataacccaacgggcgttccttacgtgcgtgtattattccttgtcccaggaggcaaggtacaccaaaagttgatacaattcagagtttaacaagcggaagcgtatatagataatttattacatgggcagcgaaggcccagcacacaagaagacaaacgaaaaacagcggaagactagggcgacgaccacaggcgcttgacggcaggcacgagttagacaccaaagccttcatcttctaggaactcctcttctgggtttgcgaaaaattgagcaagactgagtacaaccaccgtactcaacaagacacacccacaagtgtagaataaatgcaagggagtacaagggagttataacataggggttaagttttgcagtaaacagcatttaaaagtcacttagttgccaaaagctattttatgaagatgatcctagagctatacaagattattaatcaaggccgtgaacccacacgaacctgccttaacccaaggcctacgatgattcagaccgaactagcaacccgaccctgggtcccagctcgtcccaagccaacccaggccaaccattccacattttagttgttaagcaggttttaagaattaaaacactaacttgggtacattgctaggcttgcccataaccgagggcgcgactattcgaataggttttactctgatcagaggtgtacatctttacccacaagacatgtcttcctcacgtgtaaccacatgccacataccaccacggcatacagacggaagacatgacatagtttccaacccatcctagccatagacaagagtaccgacccaaccccacctacggccggaacctccgggacaggtaggcaggactgagcccctagcagcaggacaccagccccgtgccatgacatctcgactaccgggccgcagctcgtgtagccttcatttgccctagagatgtccatcgacccccgacttcgtccatctgcatccgtgtacttttgtttataaccagactgagccacaaactaagccttacccactagacatgtggaagtacggtagtgctttgcaacagaggcccgaagaccggtccttatgtggccgaggtgctactatcaaaaccatgcaccccgagcccagcctaaaaccattttgagggttttgaatagagggggaggtgtgaatccaattccacaataatccaaccattccaatgtccatgtgatatgaatattcccaaagtctagagttgtaaaaccacctaatgttgcctaattaaccagcgaagcatctacctaaattcatactagtggtaccatgcatagggtacccactagttggggttttgtttattctagggtgaacaaggtaataataacaatagcaataataataaggtcataacaatgataaataggtatggctaaataaaacagtgataacgcgggaatttaaataaagcgataatgcattaatttaaatcaaaataattttataaactgggattcaatatgttcaaggatgatgtgacttgccttgctcgctttcccaaacgtcggcttcaacctccacgaagagcggatcttccgaagctgcagcgtctacacgactaacggaaaggaaaaaggcttttactctaataaactccatataacaagcaggaacaaagcacaaaaatgggttcttgacttcttgaggaaaaattagagacttgaacggtccaattccgagttcaaatggccaagttatggccatttgaagtttatatgctctttaagtgaatatttgcgaatttctttatttaaattttaattttaaaaaaaggatttattgcgtcagccgacgggggagggcgcgcggaccgggtccacgggagtggggcccacccagcagcctcacggtccacggtggacagggtgcacccgggctcactccggccggcaccgtgggccccacgcgtcagccgcacccgagggcgcgggcagctgacggccgggccccacgcggcagccactcggcgcgcccgaaggcagccacgtcggcgcggccggtgggaggcggcgcgcccgcgcccctatggtcgccggcggcggccataggcacggcggagcggcggccgagagaagggaagggaagggggaaaagaggcagcggttcacggctcaccctaggtcgacagcgacgacgaaaaggcgaccggagcggaggaaggcggcgacgtggctcgggtcg

SEQ ID NO: 7290 - DNA, 9189 bp, Oryza sativa
agggaggggttttagggttttttctttttataaaacctttttaactttgtttatttcttaacaattattatttgtgctctgaaaattccactaaaatttatttgcacatttttggaggctttcacacggattttaattattctaggcataatttaaaggatatattttagggtcgttttgggtcgttttaggcgattttggagaagttctcgatgaatcttcggcggagaagatggttagagctcatcaaggattatgatgtgggaatccactatcaccctggtaaggccaatgtggtcgcagacgcgctgagtcgaaaaagccgttgcaacactcttggcgtccgtggcattccaccggagcttaatcaacagttggaagccctgaaccaaagcatcgttagccatggattcttggctacacttgaagccaagcctaccttgctcgatcaaatccgcgaggctaagaagaatgatccagatatgcatgggatcctcaagaatatgaaacagggtaaagccgctggtttcacagaagatgaacatgaaaccctatggaatggaaatcgtgtatgtgttccggacgacaaggaacttaaacagctgatacttcaggaagctcacgaaagtccctattccatccatcctggcagcacgaagatgtacttggacttgaaagagaaatactggtgggttagtatgaagcgggaaattgcagagttcgtggccctttgtgatgtgtgccagcgtgtcaaggcagagcaccaacgaccggccggacttctccaacctctacaagtaccagaatggaaatgggatgaaattgggatggattttatcaccggacttccaaaaacccagggaggatatgattctatatgggtagtcgtggatcgactaaccaaggtagctcggtttattcctgtgaagaccacctatggagggaacaaactagctgaactctacttcgctaggatcgtaagtcttcatggcgttcccaagaaaattgtatctgataggggaagtcaattcacctctcatttctggaagaaactccaagaagagttggatacccgattaaatttcagcaccgcgtatcacccgcaaaccggtggacagaccgagcgtctgaaccagatcctcgaagatatgcttcgcgcatgtgtcctagattttgggaagacctgggataagagtctcccctatgccgagttctcctacaataacagctaccaagccagcatacaaatggcaccctatgaagcgttgtatggccgcaaatgccggacaccactgttgtgggaccaagtcggggaaagccaagtgttctggaccgatatcctgagagaagctgaagctaaagtcagaaccattcgggataatctaaaggtggcacagtcccggcagaagagttatgcagataactgacgccgtaacctggaattcgtagtggacgattttgtgtaccttcgggtcacgccattgcgaggagtacacaggtttcagacaaaagggaagctcgcaccttggttcgtgggtcctttccgcatcattgctcgacgtggagaagtagcttaccagttgaagctgcccgcatccatgggcaatgtgcatgatgtgttccatgtgtcgcaactcaagaaatgtcttcgagtgccgtccgagcaggccgattcagagcaaattgaagttcgcgaagacttgacctatgtagagaagccggtgaagattctggacagcatggagcgcaggaccaggaactgggtaatccgtttttgcaaggttcaatggagcaaccacgccgaggaagaagctacttgggaacgtgaggacgagttgaagacagcccatcccgatctcttcgccagttcttccgaatctcggggtcgagattgtcacgtcccaaaacgactctaaaatacatcctctaaattatgcttagaataattaaaatccgtgtgaaagcctccaacaattaaaaggtgcaaagttaaaagtcaaataaggcttgggggatttttgtatatttcctaaaagcctaaaatgcgtaaataaattttagtggaattttcagagcacaaataataattattaagaaataaacaaagttaaaatgattttataaagagaaaaactctaaaaagtcccctttccctccctctccctcttgggccggctcggctcatctccctccccctccctctcctctccctgcggcccatccggcctctccccgcgcgcgcgccgcttacgggcgggcccgcccgccaccatcgctgacgggtggggcccacccgtcatccccttcctcccgccgctcccgccgcctcgcccgctcctagagccgccgccgccgcgaaccccgccacctcccgtcgtccccgcgtgaaatcaataggggggaattactccccgtgatcctctccccctttccccccctatttccctctctctctcgcattcaaaccggcggatttgcccccgcaaatctcaccggcgccattgatggcggccggacctcccgcgccggtttcctcccttccccggccaccctctctcgaccgggctctatttaaaccctccccgcacctcctccgtccgtttctgcctctcgccgcccttcctcctcgccggaatcgagctcgcgccgtcgctctctctctccgccgtcaccgtcaagctccggtccgccgccgtcgtcgccccggaccacctcccacctcggagccgcctccttcggattcgccgcatcctcgccgacctcgtccacccatccgtttcgctcgccgaccgccggaacgccgtcgaccccatcgacccgagccgcgccgccgccttcctccgctccggccgcctttttcgtcgtcgccgtcgacctagggtgagccgtggaccgctgcttcttttcccacttcccttcccctctctcggccgccgctccgccgtgcctatggccgctgccggcgaccatagaggcgcgggcgtcgcctcccgccggctgcgccggctgggccgccctcgggcgcgccgggtggctgccgcgtggggcccggccgtcagccgcccgcgccttaggtgcggctgacgcgtgccggtgtgagcccgggtgcacccggtccaccgtggaccgtgaggctgccgcgtgggccccactcccatagacccagtccgcgcgccccctcccctcggttgacgcaataaacccttttaaaattaaaatttaaatgaagaaattcgcaaatattcatttaaagagcatataaacttcaaatgaccataacttggccatttgaactcggaattggaccgttcaagtctctaatttttccttaagaagtcaagaacccatttttgtgctttgttccagcttgttatatggagtttattagagtaaaagccttttcttttccgttggtcgtgtagacgctgcagcttcggaagatccgctcttcgtggaagttgaagccgacgtttgggaaagcgagcaaggcaagtcacatcatccttgaacatattgaatcccagtttataaaattattttgatttaaatttttgcattatcgctttatttaaattcccgcgttatcactgttttatctagccatgcctatgtacctttgttatgaccttattattgttattgttattatttccttgttcaccctagaataaacaaaaccccaactagtggacactctactcaaggtaccactagtatgattttagttagatgcttcgctggttaattaggtaacattaggtggtttacaactctagactttgggaatactcttatcacctggacactatggaattgttggattattgtggaatcggatgcacacctccccctctattcaaaatcctcaaaatggttttaggctgggctcggggtgcatggttttgatagtagcacctcggccatataaggaccggtcttcgggcctctgttgcaaagcactaccgtacttccacatgtctagtgggtaaggcttagtttgtggctcagtctggttataaacaaaagtacacggatggagatggacgaagtcgggggtcgatggacatctctagggcaaatgaaggctacacgagctgcggcctggtagtcgagatgtcatggcacagggccggtgtcctgctgctaggggcttagtcctgcctacctgtcccggaggtttcggccgtaggtggggttgggtcagtactcttgtctatggctaggatgggttggaaactatgtcatgtcttccgtccgtataccatggtggtatatggcacgtggttacacgtgaggaagaggtgtcttgtgggtaaagatgtacacctctgatcagagtataatctattcgaatagccgcgccctcggttatgggcaagccgagcaatgtacccaagttagtgttgtaattcttaaaacctgcttaacaactaaaatgtggaatggttggcctgggttggcttgggacgagctgggacccagggtcgggttgctagttcggtctgaattatcgtaggccttgggttaaggcaggttcgtgtgggttcacggccttgtttaataatcttgtatagctctaggatcgtatttacaaaatagctttgagcaactaagtgtcttttaatgctgtttgctgcaaaccctaaccctctatattataacccccttgtactcccttgcatttatcctgcacttgtgggtgtgtcttgttgagtacggtggttgtactcagtcttgctcaatttttgccaaacccagaagaggagcccctggatgatgaaggctttggtgtctagctcgcgcctgccgtcaagcgcctgtggtcgtcgccctagtcttccgctgtttcccgtttgtctttgtgtgtgctgggccttcgccggccatgtaataaattaactatttacgcttccgcttgttaaactctgaactgtatcaacttttggtgtaccttgcctcctgggacaaggaataatgcacgcacgtaaggaacgcccgttgggttatttccggtcgtgacaagttggtatcagagcccccttgaccctaggacgagccgtagatcccaagccttagcaatattttcaaaataaaaatcctttcttatttgtgaaaatcctttagtctctctctgtcctgctgcttcatttatcgtcaaaatctgatctttaaaatgttgcttttctcttttgtttgtagatggccggcagcatcaaccgtcgtggtctggacctgactggcttcgttttggagctgcggggcatgtgcgttgtcctggggtatccgcatggagtggactaccagggcaagcggctcccggagcaggagggtgacgatgcagagccccacgctgcttgggagattactgcagtgatcctcactggctcacccgagaggacttcgttggtagtcaccgtgggtggagattccttctctgccgcttgccagaacgccgcactcctcgccatcggcactctccaccagtgctacccgaacgagttgcagcactcgccctaccgctaccacccttgccgcggaggagcccgcgactacgccaccttccgggatgctagctcggaggatgacgctaccatcatgcacctggcgcgcatggtggaggcgtacgacgcggcccatatcgacttccatcagatggtgcgtcgtgggttggtcgagaacaacatgaagatcctggagctgcgtcaggagaatctgcagctgaagaaggacctagacgcagtggacgcgcagctgcgtcagctcaagatcgcccagggagaggtctgtcgccccaagcgtcgccgcgtctgccgcagcctgaagatcaccgcccgcaagagtacctccaggcccgagcttgttcgtcagtccctggcgtggacctgcttcgtcgagacccctcgtgctgagcccgcgcccgtggttcctcaggaggatggagcctccggcgttggcagcacggaggatgtgctgctgctcaccttccgccctggcccgtcgcagtagtagacgagcagttagtaggcttgcgtgtgtgttcttctcgtttgtttttctgctagagtcatatggggcatggttatgccggtgtgtggtataactgtgtcggagcttgtctttattttatttgcttaagcaacttgaactttaatgaaccaatttaatagcagtaataaattcaagaattatggtagtcgtgggtggttagttttaattgtcagctctctctgtttgctggttctgtgtggggttttcagatggtgacaaccaggagaagtgctgctaccggtgaaggcagtcaccccgaaggcagcaaccacaacaaccatggcagcccacctccacctcctcccccgcctccaccaccaccaccagacaccaactccatcctcacccaaatcctcgcctagcaggccaacatgatggctgctttcctccaccacatccaaaatccgccacaacataatgctccaccaccacccccacaacactctaaactcgccgagttcctccgcatccgtccacctaccttctctagctccaataaccccgtggacgcgttggattggttgcatgccgtggggaaaaagttagacaccgtgcagtgtagcgatgaggagtaagtcatcttcgccgcccaccaactgcaggggcccgcatctctatggtgggaccatttccaggctatgcagccagaggggcagcctattacttgggcccgcttcaccgccgctttccggagaacccatgtgcccgccggagtcatggcccttaagaaaagggaattccgagagttgaagcaaggcaaccgctccgtgatggagtatttgcatgagtttaacaacctggcccggtacgccctggaggatgttcgtgaagatgaggagaagcaagagaagttcttggcaggaatggaccctgagctgtccgtgcgtctggtctccggggactatctggatttccaacgtctggtggacaagagcatccgcttggaagccaagcacaaggaactggagtcgcacaagcgtcgcttggcgaatttccgcaaccaacagggggctaaccaaaaggtccgctacaccgctacaccaatccctatccagggagatcctcctcgcagcagcaacagcagcagcaacctcgctccgcgccccgacctcaattcgtggtgcgcgtcccacagccgcagcaacagcagagtcagcaagggactcgtgcgccccgtcctcctacgccagccgtgcagcctggtcaaggccgcagggacgttcaaggtcagcagtgtctgtgcttcaactgcttcgagcctgggcactttgcggataaatgcccaaagccgaggtgccagcaaggccaagcgcctccccgctccaaccacggtggtaaggatgtcatacggggtcgtgtgaaccacgtgatggccgaggacgtgctgacaactccagacgtcatcgttggtacgttcctcattcattccatccctgctaccattttgttcgactctggagcttcccacttgtttatatttgtgccattcgtggggagaaatcagttgggggtagaaaggcttaggaaccctctgctcatcaccacccctggaggggttatgacagcaaagtattatagccctgccgttcctatagaaattcagggaattcctttttcctcggatctgattcttctagacaccaagaacttggatgtgatccttgggatgaattggttggctcaattccaaggagtagtggattgtgcaagacgcactgtcactctgtaccgagggccggaacaaccggttgttttctttgcacccccaacctctgtcggtagttcagaacttcatcagataagactgtcggaaatccccatcatcagagagttcggagacgtgtttccggaagaactacccggtatgccgcccaagcgagagattgagttccggatagatcttgctctaggaaccactcctctgtacaagcgaccctaccgtatggcagcaaatgaactggccgaagtcaagaaacagttggaagagttgaaagaaaaggggtatatacggccgagtacttccccctggggtgctcctgtgatttttgtggagaagaaagacaagacgaagaggatgtgcgttgattacagagctctcaatgaagttactatcaaaaacaagtaccctcttccccggatcgatgatctgttcgatcagcttaaaggtgccacggtattctccaagattgatcttcgttccggatatcaccagttgcgcatccgtgaagaagatatcccgaagaccgcattcacctcgcgatacggactatatgaattcacggtgatgtcgttcggtttaaccaatgctcctgccttcttcatgaacttaatgaacaaagtgttcatggaatacttggatatgtttgttgtggttttcattgacgacattctggtgtactcacaatcagaggaagaccatcagcaccatctccgtctggtgttgggaaagttgcgggaacatcaattgtatgccaaacttagcaagtgtgagttctggttgtccgaagtcaaattcttagggcacgtgatatctgctaaaggagttgctgtggaccccgaaacagtgaccgccgtcactgattggaagcaacctaagacagtcactcaaattcgcagttttttgggtttggcaggatactaccggaggttcatcgagaacttctccaaaatcgctcgacccatgacacagttgttgaagaaagaagagaaatttgtgtggagcccgcaatgcgagaaggcattccaaactctcaaggaaaggctggtttcctcgccggttttaatcttaccggatactcgcaaggacttcatgttgtactgtgacgcttcgcgccaaggattgggaatattcatatcacatggacattggaatggttggattattgtggaattggattcacacctccccctctattcaaaaccctcaaaatggttttaggctgggctcggggtgcatggttttgatagtagcacctcggccacataaggaccggtcttcgggcctctgttgcaaagcactaccgtacttccacatgtctagtgggtaaggcttagtttgtggctcagtctggttataaacaaaagtacacggatgcagatggacgaagtcgggggtcgatggacatctctagggcaaatgaa

SEQ ID NO: 7291 - DNA, 20521 bp, Oryza sativa
gggttgggtcggtactcttgtctatggctaggatgggttggaaactatgtcatgtcttccgtctgtatgccgtggtggtatgtggcatgtggttacacgtgaggaagacatgtcttgtgggtaaagatgtacacctctgatcagagtaaaacctattcaaatagccgcgccctcggttatgggcaagcctagcaatgtacccaagttagtgttttaattcttaaaacctgcttaacaactaaaatgtggaatggttggcctgggttggcttgggacgagctaggacccagggtcgggttgccagttcggtttgaatcatcgtaggccttgggttaaggcaggtttgtgtgggttcacggccttgattaataatcttgtatagctctaggatcgtcttcataaaataggttttggcaactaagtgacttttaaatgctgtttactgcaaaacttaacccctatgttataactcccttgtactcccttgcatttattctgcacttgtgggtgtgtcttgttgagtacggtggttgtactcagtcttgctcaatttttcccaaacccagaagaggagttcccggaagatgaaggctttggtgtctagctggtgcctgccgtcaagcgcctgtggtcgtcgccctagtcttctgctgtttttcgtttgtcttcttgtgtgctgggccttcgccgcccatgtaataaattatctatatacgcttccgcttgttaaactctgaattgtatcaacttttggtgtaccttgcctcctgggacaaggaataatacacacacgtaaggaacgcccgttgggttatttccggacgtgacattctcgagttccgacatccggttctcgagtccccaccgttgtcactcgttgccggccactagttccctcattttctggaggtcctcacgaacctccgccaggtcacgcgccagcttatcggcacgctcatttgccgacgacgctgctgccgtcctcgcctccgcaatctcgcgacttatgccatgagcaccaacctcaaggatgtgccccatctcgacttggagctccccccaggtgaggacgtcagcaggcaggcctcgagcaggcacgagatcactggctgggccgttgggcgtcacctcacggctcctgggcacgaccacgacatcggtcgaggccatcgcaggagacgtgctggagttccctccggacccgtcttgcaccgccttcgcccgcgccgacctacagaagattaacatgtctggccctcaagacaagtcgccagaattcaaccaagggaaggacctcaaattttgtccacttacttctcgccaagtgtcaccagattctgccgtcgtggaggtggcggagacgcatccaaggcctaagtaaaccgagtacgacgtgagggggacatcttccgactacgtagttaacaactcaagagacttaccgatgggaggacgctttccggcggctgccgagcacggaggtgaatttcctccccttcctcgggacacggctgccactagtcgtggcagcagcagcaatggccgcgtcggacgcctcttgggcgacgccctccttcaacgaggccgccgcctggtggtccaagagcggtccaatgacgtcggtcagagggagagcctgcaccgcgtgaagtcattatgcgatctaggagcaaaaataaagggggtcgtcaaatacactcacgttaattgcggcttcatgctcagccttccccttctcgcaaagggggatggggacgttactcaccgttgtcgggccactgatcatcaattgtccgacgcaacgctccatggtctcgctgttcaaacctgtagacagaaccagaattcggtaagtcaggaggaacatgcacataaggaagtcaaattaaacacaaagaaaaatacccgaggagaaactcgggtcgcgtcctccggcccagaatagtcaaaggctgggtgggctcgagcctggagcggctggatccgcctaccaatgaagtcggcagcgacttcatacctcgacaaacctcgtactcggaggtcatcgatgggattgatgaagaactgaagagaaggggtcaaggcgggtttggcagtccaagacggaatcttgtctggttgttcctcaggaacaacaaagattggatctgaatcctctacctgaagatagaaccacctcgcctgccacttgctgcgagaagaagggcattggaaggggatatagcgcgactttaggccatcccggagtcggaaaccgacgcatccagataccctggtggattccatccaacgcagcttgtagtagaagcgaaaaaggtcgagaaatggctctaccccaatgtaggcctcacaaagatgcgaaaagatattgaggaaggtgatggaattggggttcaaatggaggaaagaaagactgtagaaactcagaaggcggggggagaaaaccacagagaatataatcctccaccgcaaccatgtgacctaggacaggttcaggttcagtacctcctggttccctctccatggtcccgcgaccggggagagcgcccttgtcgcgtcccaaaacgactctaaaatacatccccgaaattatgcctagaataattaaaatccgtgtgaaagcctccaacaattaaaatgtgcaaagttaaaagtcaaataaggcttggaggatttttgtatatttcctaaaagcctaaaatgcgtaaataaattttagtggaattttcagagcacaaataataattaagaagaaataaacaaagttaaaaaggttttataaaaagaaaaaccctaaaaagtccttttccccccctccccctcttgggccggctcggcccatctctctccctctctctcctctcccccgcggcaaattcggcctcctccccgcgcgcgtgccgctgacgggcgggcccgcccgccaccctcactgacgggtggggcccacccgtcatccccttcctcccgccgctcccgccgcctcgcccgtgccctagcgccgccgccaccgcgaatcccgccgcctcccgccgtccacgcgcgcaataaagtggggggaaatattccccgtgattccctccctctttccccccatttttccctccctctctccctcgcattcgtttggaaacctctcccctaacctcgccggcgccatcaatggcgaccggatcttccgcgcccgtttccccctcgtccggcagctccctccccctcccaatcctatataaaccttccccgtgccaccctccaccgtttccgccactcgccgccctctctccccgtcggaatcgagctcgcgccgtcgctctctctctccgccgtcaccgccgagctccggtccgccgctgtcgtcgccccggaccacctcccgcctcggcgtcgccaccttcggcttcaccgcatccccgacgacctcgtccacccctccgtttcgctcgccgaccgccggagcaccgtcgaccccgtccacccgagccgcgccgccgccttcctccgctccggtcgccgtttccgtcgtcgccgtcgacccggggtgagccgtggaccgccgcttcttttcccccttcccttcccctctctcggccgccgctccgccgtgcctatggccgccgccggcgaccataggggcgcgggcgcgccgcctcccgccgctgcgccggcgtggccgccttcgggcgcaccgtgcggctgccgcgtggggcccggcatcccgtatatatgtatatacatagacacagtttgattattggtcttactatttaaaaagtaaagtgcacgggcggtctctaaacttgtatgggtgtatcaactagatcactaaactaggtcactaaactctcaaaatgaactttttagccctttaacttgtctcgtgtgtcatatagatccaaacgggttccaacccgccccgtgtgctgacgtggcagccatgttggcacctacgtgtcaatagaactcatatatatgtccgccacatattaaaaaaaaaggaaatatttttcccctttcttttttcatttattttttcaaaattgaaaacattattttctcatctccttttaaattttatttttttctacatgactagcatgcatgtggatcccactgacacgaaagtatcaccgtggtataccacgtcatctcacggagcgggttggagtccatttagatctatatgacacatgacgagtttggggacccaaaaatgcatttttgagatgttagaaatctagtcatctagatgacacatctgtacaagtttaagaaccgcccgtgcacttcattctatttgaaaagttatataataattcaacattgtcaaataaaaaacggaattagtattttgaacgtatttaatttcagtaggtatatatactcttcattaattgaagttgggactttaataatcttgtaatatatttacccctcaacttgctgacaaagtatatggaatattatatgaacaacaaggatatatatcttgctgatgacagtgttaaactaggatgaactactattgaacgtgaatcaaaattcatgaactacatggaaaaagttgaaatcggccggcctatgttgtcagtaaatagaagaaatctttagatattacaactttccaacaacattgcatcaaggctcaagcagatcgaacaaggtttttttgctctttcttttgtttgaacaaggacatgttacgctttcccgtataacatcctttatttaatttcgtgaagagagcatatcttttacacttgtatcaggaatatcctttgcaattcttagtattattacaaaatatatatgttgcaattccataagtaaacagaattaaaaagtttgatcttggaaattcttcaatgtacaacctaattttatatttagcatcgggatcttatgtatagccctgggaccatgcatgatgcatgtatgcatatgaacagtgaagacaagataacttgacagatacatttttgtctgcatgctatatatatcatatcgaaaatttaatcctagacaagtatggagctatggacgcactgcacgctcatatgctataaattctttttactaatgattaagtttgtacagtttccagcaaacttgcaactttatttattcgtgaattcggtcctgtaccatgagttcgacagttccattgaaagcttctgttttattcgaataattaactttgccttgcatgcaacgatgcatacgtttatgcatatgaagaaattaattaattataattatctttactaatcccttggcagagctacgccgtacaacgacacgagctttcgtgagtatgtggcagaggggagcgcgccggcgctgccggagacgaggcgcctgtaccggcggctgctggagctcggtgtcaagccagtgttcctgacaggccgcaccgaggaccagagggccatcaccgtcgcgaacctccgccggcagggctacactggatgggagaagctgctgttgaagccggcagctcatgtcgccggcgggctccagttatcggctgtggcgtacaagtccggcgagcgtcagaagctgcaggacgccggcttcatcatcgtcggtaacatcggagaccagtggagtgacatcttgggtgcaccggagggcgctcgcaccttcaagctgcctgaccccatgtactacatcggctaggtcgccggcgtcggtgccggtggccgttgctaacaagctgcgatgaatatagtcacacgttgttgagtttgttagttcagctgtggctcctacgtgttccagaagttagcagttgcaaaggttgaaggaataagtctgctggagtttgttagcagatgcagatgatgcggcgatcaagtccttaagcagactgtgtcagtagggttcgcgtgcgtgagtttagcgcggatgtgtgagtcattgaattcgaaaagtggtatcgtgggatggcgcgatttgagccttggattctagtcatgttatttgagttgtatgttactctattcagttgaataaaaaccacagaaaatcaaccccacaatttccagtacatcgattgttctctgaaacttcactgttcttcctctgaagatctcctttctgcattctatgttctcgtctgttgccgtgtcggattgctgcagtgtgcacacaaagtgtttgatccgaggtttgtcgccaacaagtggtatcagagcactcgggctgagggctgatctgacaccatgtccatagttccggcggcagcagatccggttttattgacggtcgttagcgatcagttttgaccgtcaatattactaaaataaatgagaactagttatacttgcaatgcatatttatgtttaataataaatagtcctctagcactaggattactaacctcttgcatagaatgaccaaaaaatggacgagaatcaacatcaaaacaagcgatcgttcaatcggacgatgtcaagaatcagacttatcaacgaatgggccaaaaatgcagaaatgacatgaccaattgggccaaaattcacaagtctgcacatgggagcaaaagaggaggccaccagccaaaacctgggctggttgggccgacccatggttcggtcgaaccctcctcagcgccgctcgatccagggttggtgatggatggtgtggatggcttccctatagcgattgaagggtattaccaacctttccaaccgccataaccatcactacctgtctgtaaaaggctcactctctctccatttcaagacacacctcaaacaagaagatcatttcatctctcaaatttagtatagtccctggagtatagcggaatagaaatataatagaatcttcagtcctcggagtcttcggaagaatttgggtatgcctctagtagcttttttttttgcggggactctagtagctttttcttcttttgtaagacttatattttatttagaatattcttctttatactactttggtattgtattacttttcgagtatatgaatatctactttactatatgttcaagttatattcattatgatgctagcttatctgggagatacaatggtgtgagtataatgatcatatttacgatgactctatgtcatgacgatgatattagaatagtatttggtaatttaagcatggtgtttagattactggatatcattatttggggttatatgttgtagaagcgaggtgggccgctgatggtgacagctcagtacatgtattcctccgcgcgtgtatatagtcctaagttaatttcctggggagggtagtcctccgtatttagccctgattggatggtcatgacggattgtcgtaaggaacttggcaatcagggttggcttctcgaagcaccagtaggttatcagaaagaggttattagctaagtaataatatggctaggatgtatgtataatatgtatgtatactagaagtataggaatatgatctttctatgttctttccacttagcttagataattatgagtaagagtatgaatgcttgtgcttagtgtcactctaccctttggattatattaactcatgcttagactttgattattacaattaatatataaattattagtatggtatctctattataatcttcccacgggattaaacaaatacgatacccttggaatactctcgggtgaaatgctacaatggtatatccgtgcgcttgcggatgaactctgtaaccataatataccagaagtatttctgcgctattgctgggaattatatttctagtaacgtcgttaagaaataccaacaacatttctggcgccgttgccggggaggatttataacagagattaccatgactaatactttatatttacctctatataatcactgtcatttgcaggctaaccttggttgttttcacttttcttatggaaacagggtagtacatgactggtttcaacttgccggaaaatttcaagaaaaatccagaagttttcttttggagcgttaagccgcgagtcgttgctccacctatgcgggtggatctcaccggcgagaatgcgagtcgttgctccacctatgcgggtggatctcaccggcgagaatgactggtaaccgatactttgttttgattgttgatgactttacatggtggatgtgggtgtttgtgattaaatccaagggccaagctttggaaaccttcaccaagttcaaacccctggctgagaacgtggttgggcggcgcataaagacgctgagatcggatcacggtggcgagttcctgtccggcgagtttgcacaacagtgtgaatcggctggtatccagcggcatttgacagtgccgtactcgccgcagcagaacggggtggcgagcgccgcaacaggtcaatgatggtgatggcgcgctcactgttgaaggggaggagcgtgtcaggctggctttggggggaggcagtgcgccacacagtgtaccttcaattctcaactggccgccaaccaaggcgatgggaaatcgcactccgtatgaagcgtggatggttaagaagccgcacttggcgcatttgcgggcgcatttgcgtgtgttcgggtgtactgcacacgcgaagaacacagtaccacacctcgagaagctggacgaccgaagtgcaccgtatgtgtacttgggcgtggaagaagggagcaaggtgcatcgactatttgatcctcgtcgaggtcgcatccatgtaagtcatggtgtcatatttgaagaaaatgttgtttgaccatggtatagagctacaggcgagtaggtctctgctgaatttgatgtggaggagaccgtcgagcaaccagctggctcgacgacatctgtggtaggcttcgtaccgcggtaccaagcaccatcacccggcagatgtccatgcaaggaaccggtggtggtggaaaggggaaattcttccctggcaagctcactggaggcgtcaccatcactaccgagcacacctgctcattcctcgccccccggatcaccgtcggctactcctaccagatctttcggggaacagatcacgccgcagtctggcggcgacactgacatcaatgatggccctgtccggtacaggcatattgatggcattatgaattaattgtgaactgctttctcaataatccgcaatgcatatccttaattcccatgtcaacttaccgttggtagatggatgagatttttgttgacgacgttggcggccatggatagcactgttgctttcaatcggtagtttcttaagtatcgtcacctaatcaacttcctagttttgaaaatacgatagagatagaggtaaggtgagaagaaaatttagagttaagtttttcttcctaatctgggttgccatgtgacttctcttccttccaattgaccccatactctccaccctcagcttggcaagatggcttgtttttctggttatcgtatctccttcgtccagattccaaatcagacaaaccatatatctgttctatcgtcgtgttgacttcaatgtggtatactcaaatatgtgatttggtttcatatcttataggtagttttggtgctccttcaaaattcaattgggaataagcccaaatatcccgacatgtttacattttatgacctaaacttgcaaaacctgttagaccaacaaaactcatagaatcccattagtgtaaagaaacaacgataaggtaacatgttatctccatttattttattaaaatttttgtactcgaattggagtttttagtggccaccaataggcgtcaactgagaatgaacactcacggctgaatcgaagcacgaactcaagagttcacggccggaatggacacaaaggaaacgcacctgcacacacgcacaggatttttcagcaacaaatgtctttcatattttccctgcaattcacccggtaagtaaacaaatgactaggtccatcaatcttaagatatatcggtccaatcttttgaaggtgctcatagggtaaggtatatgtgtgcgcattatgaatacttgctttggtgctgacttcaccaattttaagatatgctgatctaatctttccgaggtgattataagaatacgatatgtggttgcgcatacatagggaggtaagtgggttggcattatgagcacatgcgtttgtatagtattttaaaaaataaaaacttaagtattattgataaattaacaccataaataaattacgtctacgctattctgcaaaacaactcataacattaaaaaaatattgtcatcatcttcgttttctctttgttcttttctaaagggcctcgagcatggataacagagcttactatatttttataagtatggtaagaacatacatatagttaaatcgattggcgataaaactcaacttcctacttaacgatgcaattatgtatgaggatgccgatagtgaattagacaatatgaaattatggttcatgctggttttaaggagtagatctacatcaatgggagatccatgtttagaggcagcatgaaagaaagccttggtgccattcataatcaagacaaagtaatatttactatatttaagtctacgtatattttacaacatagatattttttctatttatttaaataatttgtactgagatatgatttcttttagcattttttcataaataataagtgaggtgcccgtgcatccgcacaggtttccttccaagtttcttttaactaatatcattataaagtaattaacaagtaatcatggtatttaacggtgtcattagccattagccagccagttcgatgggcagtcaagcgaacttgctgctgcgcccagcccgttcactgagcagccaagcgaactcgtagagcagttaactgcaacgatggtatatttttggcacttctctctataaacacatatattctgtaaaaacgattagaaaaatgtatattttcgaatttttccggttacatgacacatgtaggcccccaatttacctcccttggttcttttcccacttgtctcttgaatacttcaaatctcaattcctaaaattcattctccttcggcaaatttgacaacaccaatcgagagcctaccatgcacgcatggatatatatatacacacacattaaaaaaaaaaacccttcatccagctaccacatctcaatataaaacccttccccaccaccctgcctcttgctgcttctgtaacttccctctccccttcaatctgaaaccataatgaacttaatttcgcttttgtcaggttttagctaggtttaggaggcatcatgaatcgattacatcctgcgtttgttgctagaactagcccaataaagagaacctagggtactggcacatatatatacagttgctgtcgagaacatttaacacacagagaccgggctagaactgctctctggcctgtccctaatcctgtaacgctcaatgcatcaaaaacatcaattttgattggatgccacctctcgatcagttctgtttcttgtttggcacttagagaaaaaccccacctgatcttaccaagccacctcccctacttatggatggaagtgtgcaatctggttacccaagtaaaaaccggccggcttagtagtttagatgtgttagtataaagcccaatgtgaaatttgtataattgccatcccactgtgcctgatgtgcctatttgtatgactgcttcttttggaaccctctaataatccattgtgtttttatggtaaaaagtggacgatatgatcttatattgtggacatgtaaaatattatgagaagttatacagtacttgagaaaatatcttgaggtacataagttttacattaaaattaataccaaaatttacattagaaaatatggtaactctcagtaccttcttaacaatggtaaaattactcaaatattattctgtgcatacacagatatgaataaataaagcaatcaggcagaagtactccctctatccctacataaatcaaaccttagcttcccaaggagcttttaaggagagaaataaaagaccacaatactcttaattaacgtgaatgttgtattgaataatggataggtgaggggtattgaagtaataaaatttctcgttttgcggattggtggcaggtaagaaggtagaagttgtttattttgggacaaatttgaaatctagaagttgatttattttaggacggaaggagtaataagaagaaagggatctacgtgtaaatcgattttgaggcaagtatttctccttgtctatttgaatgagcaccacgaattgaatccatgtttgaaaatgctctccgaattgtccgatgatggtgtagagttttctaaaaccaagttcttataaacttttacatgcttcatcctaaaaagcacagattcttttgtaagaaattaatcttgtttgcgtttcattctcgtgtgtgtgctcgcgtgagaggagctgagtcatcggttagccaacatctttttcctggtatcagttaggcatgggatgcatacaggattcatccaaaaaggacttgatggttggctgtactgtagtttgctgttcgtctggagctagcagttatgccagcaatttgtgatacatatgtttggcttataggttgagtttttgtcacaaactgaatgaccgcaaaacagctagctaacatggatattttaaatttcagttaagtaatgaattgtacatttactttcaatctttaatttggagttcctttagtatcattggaaaaaaaaagtgtgtttcattgacacatgtacgaaataattaatttaacccctcctctcccaaaaacaaaaaaagaccccagatgatgcctgcattataggctttgcttattcccaaatccaccaaatcccaatccttaaaagtcattctcacttgacaattctgacaacaatcttcgaggtgttagtatgcgagcgttcatactcatacacacacatacaaaccagcatccgattacctttgtctcaattttaggttttggaggcattgggaattgattttatccagtgtctactgatagagcaattttacaacgaactagtaagttgagctggtaaagtacagaaagtggcttgaaaatgtataaacgaaatttttgtattttttattatactattacatattgcttactagctagttcttaaactgaatcaaagaagaaaaaaagtaccattttgtctttattacaactgctgaattgaacttctctttatagcccataactttcattcaatccagaggatagttctgacttaaaagtttaagagtacgttcagaacttcagatcgtctatcctataattgatatcccgttgtttctatttgcctgtttgtatcattgcttcctctgtaacatcaattcctagagagcgcgtcttaaagtgatttctcatgtcccctgtaacatacaaagcttgcggagtatattgtggataccagcaaaccaaagcaccacagattcctcttcctatccatcaattaggcatgggagccatactggattcatctgcctctccgatgacaacgccaagttttatagtttgttcctcattgtgagtagcaactgcagcccatagtggtccattgtgatgtggacgagggttaccgatcttccgaaaggttctaataggcagtcaatttgagcggagtcgcgacacagcccgatccggcttctgaacgaacacgctcttgagccccgcaatcgtagcaccacgtctcctctggttatcacccgtatcgaaacgcggaagacctcgccgaaaaggctaatccctgtttgcgaatcgaagaacacaaacaagaacaaggaagaatacaactaaaattgtagatgaatgattaagctcacaagttggtgtcttacaaaccgatctagtggcgaaagtgttcttaacagaataatctaagaaaaacctaaaccctaaaggtgacggctggtactgatatatagagtttacggtcgtgcaaacaacccttgatgcaaccctaatgggttccaatacgatacacggcccaaatgcccaaatacggtgacgcagcaccgggacagattcttgacgtcaaattgttcggtcgattcctgttgacttggaaagaatttggacgtgggactagaaccattggaaatattatcttcttagctttccagccatataaagaacgccataatccgagcatgtatgcgatctgggtgcccgttttagtgcagagggtcctggactccgaatcgtactcgaagtcgacttggtttgggcctccatcttgacttggacgtccttgatgatcctccgcgcctctaagtccctctctaagggtgtgttcgctggttcatgttcccatccggaacaatagacacggaaaacagagcggtccattagcgcgtgattaattaaatattagctattttttttaaaaatggattaatttgatttttttaaagcaactttcgtatagaaactttttgtaaaaaacgcaccgtttaacagtttgaaaagcgtgcgcgcgaaaaacgagggagatgggttgagaaaaaggggttgcaaacacaccctaagtgtctctttgtcctctccatgattcctataattattaggtagcaatatattctcaaaatcatacaaagaagaataggaacgagcttacctctaaattcaattgtctcgcgcgagctcttgttattggtccttgaatgaccggtggaggattgttgtgtgtatccgaaggagtgatgtccttatcatcctccctctcttgaattagagtcgtcctcgactcaagtacatcttcttctctcaagtatggttttaaatctaaatgttaaaagtgggactaaccccaaactcaggaagcaattcaagtttatatgcattatcattaacctcctcaataattttgaaaggaccatcagctctaggcattaacttagacattctaaaatctgaaaattgatcctttcgcaagtgtaaccaaactaaatcacccggttcaaacttcacttcttgcttacctttactaccagcaattaattctatactttttagtcatcttttcaatgatctcatgtattttcaaaataaattcagcatgtgccttagtttcagtgtgaaccctctcactagtaggtaaagactaaactgctccatggcctgtccctaatcctgttacgttcaacgcatcaaaaacatcaattttgatttgatgccacctctcgatcagttctgtttcttgttttggtatttaaagaaaaacaccgcctgatcttaccaagcctcctccctctacttatggatggaagtgtgcaatctggttacccaagtaaaaaccagcttagtagtttagacgtgttagtataaagcccaatgtgaaatttgtataattgacatcccactgtgcctgatgtgcctatttgtatcattgcttcctttggaatcctctaataatccattatgtttttttatggtaaagagtggacgatatggtcttatattgtggacacgtaaaatattatgagaaattatacagtatttgagaaagtatctcaaggtatctaaattttatattaaattttttggtacttcattcgaggatatcaaaattaatttatatatattagaaactatggtatctcctggtatcttttgaaatatgttaaaattaccaaaatagtatactgtgcatacacatataagaataaataaaacaatcaaacagaactagtcagaagaaagggatctacgtgtaaattgattttgaggcaaaatatttatccttggctatttgaacgagcaccacgaatcgaatccatgtctgaaaatgctcttcgaattgtccgatgatggtgtagagttttctaaaaccaagttcttataaacttttacctgcttcatcctaaaaagcatagattatgtttcctggtatcagttaggcatgggatgcatacaggattcatccaaaaaggaattgatggttcgcagtgttttgtagtttgcacttccttgtcagctggagctagcagtgatgcccagcaatttgcgatacatatgtttcgctttgatattatgcgaagagctagctatcgcttataggttcgagtttttgtcacaaactgatcaaagaccgcaaaacagctaacatgtatattttagctttcagatctgttatatctgaaaaggaataactctccccccgcgtcgccgccgcgcctccgtcgccgctccccctcccccctccccctacctcgccgccgccggagctctcctttgccggctggcgagctaggatggcggcggcggggccttcttcgcggcggcgtcccttctaaggcgcggtggaggagacgttcgccggcgtcggggagtggtggcggcgaggcctctgggctaggcagtggcagatccggcgccgccgtcgccggatctggccagcctctccggttttcggccggagtactggcggcggcgccgtggggcggcgtgtgcggaggcggcaaggttggcggcggccggtgcgcgcgtggcggcgcgaggcggcgaagtccagcgcgcgcgtgggtggtccggtgcgcgcgtggtggcgcggaggacggcgcttgcgaggcggcatggcgacatctgctggctcccgatcggcgaggcgcgtcgctgggggcgtcggctacactggctcgccagccgccccccatcgccacacctacccctccggtgtcgacagtagccacaaccaccctcccctctcttggcttcttcctctttgcaagcagaagggggtgtccgccacccttgtctcccttcttctcgcttcctccctggcagctctgctgcctagttgtttagttgctttgcttcttacaccagtgctcctctctctgtgctagtggtgaagttggaggtggtttgtcgcagctgtaaggggtgtcctgcgaaggccggggtcctcgccggaaacatggatgacaccgatgccttcgatgccttctctcctccttgatgctcctccctttttttggccgtctgcttccagtctcggccgtggagtctttcggtggttgaggagaagtgttcgtctatgaaggtggttcagtctgtctgtagtcagggctcttgggcctcgcaagtgcttctagtgtcctgcgactaagtgaacctatcgtagtgccgagttggagcggtgtgcttatcttcagtgccagagttttgtgtttggcggagtcggagctgctgcatcgggcttagccgatgagctgggcaacgataacacaacacttttgctctggcccattgtagatcctcctttggagggagtctcgggtgaaagccctgtcttgtcttccagaatcggcaacatcgacgcttgtgggtgtcgtatccttcttggaggtgctgctttgtggactctctccccctttgggtgaaaactcagtccaatttttgggcaggcgtcggcagcggcttctgtcgttgttcccctccttggaggcttcgccttgaaggtcttgctcttccctcggtcacttttgtggttcggtcgtttgtcccaggcttttttctctgtcttctgtgtaaggtttcgtcagtttccctttagcaaactatgcagttgtaaggtttttgagcccggtttttcttattaacaaggtcaactctcttcttataatattccggtagatctcctaccgtcggtttcttcaaaaaaaaaatattttacctttcagtttataattaatgcattgtacatttcctctcaatactttggagttcctttagtaaaactggataaaaagtttgtttcattgacacatgtatacgaaataattaatttaacccctcctcccaaaaacaaacaaaaaaaaaccagatgattccttcactacatatataggctttgtttattccaaatccacaaaatcccaatccctaaaagtcactctcacagtcacacttgacaaattagacaacatccttcgaggtgttagtacgcacgcgtaacacacatacaaaccctcatctaactagcgaccgtctcaaaaaaaaagaagggaaataccatgtgtcaattttaggtttaggaggcattgggaattgatttcatccggtttctggtgatagaactagcgctgtggagattatgggtaccccatacccacacgacatggttatccgactggttataggggataacttatatctatgaaatatataacggatcatgacttgggtattacgtttccctgtatattatggaacggcctaaagtcctggtttgataagattgtaaagtagatttaggaaaccgataccgtattggttaagatttctatcttgtaatcctgccccccatcctatataaggtgggcaggaggccctctagggggcatgagacaactagatcgtcagatctataatacacatggtggattcaaatccccaaacaggagtagggtattacctctcatcgagggggcctgaacctatctaaatccttgtctccgcatccatccacttttaggtctcgtgcgctacccttttattattgctgaattcatgtttcgacagttggcgcgccaggtaggggtgcgtcaagttttccgtcaagaagtgtgatggaatcaagatcaggagtggccggattttccttcaccccgaaggctggctttcggttttgacggattcgtcttctttgatggtgactccaacaatctctccctcttcgacttgggttttaaccagtcgagagaacggcgatcaaagatttacgtcatcaagttggaggcttcaatcgtcggggtcaccgatatctcctgtgcatctccacaaagatctctgcttcaggagctacactttgtggttacaagaataaccaggttcgtcgttccaatctactaatcgttattagattggtctctgatataactactaattaaattaatctatgccttgcatgtactgttgctggttctgacctccgagtctttcgatcattgtcacgggagatcaagacatcagctcactgagcacacatctctatatgggtagatcgtattgatcttataccaggcgtacaatagaagtccagactcggatttagctgattggatcattctcggactcggctgactactggatgatcaggtcaaaacaaaaatacactcggcatgcaaggaaagcactgggaatgtggtcggcacgagccccaacacttaccagtaccccagctctgggaaaagcaacgaacgctatgcatttgatcaattccagagctattggttttgcatctacatcccagaagaattgccaggcatacacatcgttaattggttgtcatgagctatcctcaataagggacaccaattaatatttccatccagctcatacgcatgtgagcatatatggctaccttgccaactaatcagatcaggagtcctagcaccatactcctacgtgaggatatatgatatattggctgacatcatcaggagatattatctcggactccatcaaaacatgctccggttttcccttcaagcactcctctgacatcatgagcttgagttataaaccactaccggatcagtacaacatggcgttgagtctggaagggcctatgtcttcgttattaccgctggcttgcctccgtcgtcgccgactagtgttctcgcctatacggttggttgatcacaccaccgttgatgggcatcttcgtcttcaccgactggtcaccttcgtcgccgccgattgatgtctttgccttcatgactggcttatttcatcgccattgacggatgacttcgttcctatatcggtcatctctccgtcaccaaggagaatattacaaagctaagtcatcattaattttcttctttatatgatatttttcttttcctctaactcactacatcaattggttcgccattgactagtgagtcgggggctagagatgctatgtcatattttttcaacaattttcataatatttatcttgattgcttgcgacataatctgagtacaaaagtgactatcgagttatggagttctatcttcctatgctttccgtttggtttgtcgatggatagttgcctttgggccgattcctagcacccgggggctcgttggatggaccgagtaacgcaagatgctaagtattatattcggaataaatcaaaagcatagagataagataaatttatttattttcttctcttaacaattgcaaaaatacccgagtagtaaattttgattcgtgaaactttgttccattaatgacgaactcatgtcactcatatgcatgtttgggaagtgcctaggccgactcccggtgcttggtggctatgactagtcaggcagagtgtttaaacgtaatgagtcatctgctcggggaaatcaaaattgacgagaggagaaatacatatttataaacacttttaatacttgaatctttctcaagtactgtatttacatcagatactactcatcctatatatttgttctgcaggatccagatccagatatgcatcaaagggattcatggcttt

SEQ ID NO: 7292 - DNA, 32669 bp, Oryza sativa
ttccttgtctctttgcatgatgcagcttggacaagcattgagcacacgccctgatatattgccgaatgcatattgtaagagctctctaagctacaggtagtgctttgttgtgcattttataattttgcttaactgatgggaaacaagtagcatttaccttcaacatacttcatctaattgtttgcaccaactttctgtaagtattgagggatcagggcagagctaggtcccaaaattgaggcataaaaagtgctaaactaagtctaggttccaaaatagacagtactcaaagtctgtttatatgggatttccgcagttagtaatgctctactcaatggaattgaaggcaatcatgttgaagctttaagccgctgtcaaaatttgaattttaaaacttgattttgatgtttttctttgaagtttattttccagcactggcttttaaatcactaaggacacacataaaagttttacccacaaatattttttttgcggcttataatcagcattaggctaggtcaatcaatggcagccgtatggcttataagcacccttaagccgtacattccttttgctttatttatttctttttagaggtgtatgttgacaaatcacaactatctcatcaggaccagataccaccatttcctactcgtatcgcaatcaggactattgagtctcaactgggttctcgaatttctgatctatttgctgatatcagcccagagccagttgctgcagcatcgctggggcaagtatataaaggttagccatgcctgacaagacattttatctaatgagttggtggctatcttccttaagaccttaagcatctatttcagacctgagttctccaagttgaaatgcattctttgatatttcaagtcatgcagctcatctacactctggagagcttgtcgcagtcaaagttcagaggcctggaatgactcccttgctgactctagatgcacttttgttccatatgatcggaggacagttgaaacggtttgcaaaggctcgcaaagatttactggtagcagtcaatgagattgtgagcatttaacttctgtttcaattggatataatgatctattcatgctaatccgatactattagattataaccttatgtcctgcttacattttctatggttccatgttaatttaatatgtgttgttctaatgtgtgttctaatgaaagtgaaatactttcctaatactgtatttttctaggttttgttgatgcatgaaaatgtatttttgtggtcaaaataatgtcatagaaaccatgtcaatatctcaatccaaaatttaagttttgtattgtaggactaataatagatggtctcattaagacaactgtaatataatttgtttcagacaatttagttgcaactgccatatactatgtttttccattctagaccacgtttcccatattttggccgttaatatatattgcaatatagtttgcttatagcttttgacccttctgttcaacaggtcaggcacatgtttgatgagattattatgttttagagggaaggaatgctgaaagatttgcgagactttattctcatggtgagttcttaatttttattcaatttttgatttttgctacctgctagtgtgggttcctctaaatctatctgacaagcttgctctcctgtttcccatttatctcgaccatcatatccaaaccttttacattcacatttcctagtgctctttcagctcagattgatctctggctctctgctatttattatacaaagcacactgtagggccatcattgtgttttttttcctggcagatttaggtgggaatagctccggagatgggacaagtatcaaagtcccaaaggtctactggaattttacacgtaaatctatattaactctagaatggattgatgggatcaagctcactgatgctgagcgcattggcaaagccaatctgaacaggaaaaggatgatcgatgaggtatcgcagaaatgttatacttactgtatattgtgactaacacaatactatgaagaattcagatttatattaaatcactactttcctctctccacatattttcataacatgagcttgtctgaccatatacattgtacatagacttgcaaattgtgcttgcatttgtttgtaccgtgcaactgttttgttgggcttgtttctgcgtgtttttcagtgtattgtccaggtgtttttcaccattttagcacattttcgtacctcttctgtttttcatggaaggtgtttggtagtcttgcatgtatagtcgtgttcttatttaggcatgctaatatttcaaaacaaattttacagggtctctattgttcattgaggcagcttcttgaagaaggctttttccatgcagacccccatccaggtaatctggttgcaactgaaggtggatcactcgcgtattttgattttggtatgatgggggatattccaaggcactatcgtgtagggcttatacaaatggtaatcattgctcccttttctcatgtgtaaccatatggttctgttgggttttcttcctgatttggtttttgtcgggtgctaagaactgtttttgaccggttgcagtgcagtctggtgcatttctgcacagttttgcatcttcaaattttgaattgaaaattcgaaatgactggtaacaaacttcgaacgatttggttaccatcatattgtagagtggaaataggttatatcatggtacaaaataaatattaagaaatgattttcataatgcaaaccatatacaacctggcccatcttctgaacctggccctgttcgtatcttctaaaggtagaggataaagttttggatactcgtggcacgcttttcaaactgctaaatggtgcgtttcgtgcgaaaactttctatatgaaaattgctctaaaatatcagattaatcaatttttcatgtttgtaataattaaaactcaattaatcgcacgttattaccacctcgttttgtgtgaaacacttaatctttatcttcatcttcatcttcaggagattcaaacaccacctcaggctaccttgggtcacggttaaatcacaaataaattgaatagcatgtacagaaacaagtatatatatacataattgcttcctacatgtaccaaatttgaaatttaaattatgtttaaaactactcttctaatttatctcctggtcagaactccttatagtcaaagtttaccggcctgttcctcagagtaaaccaaatcctgtgtatgcacatcgttagattgaagcattttgcatagattatcgacttttcagtctatggttagtaaaattcaaaacattcaaacctacaaggtaatttgagttttgcagagctttaggctttatttgtaagttataagatccactaagtgcatcaaatttatcatagcaatttcagagtagagttgaactattagtaattcagaaattggtctaacacttatttgaagcttcaccaatatatagtttgctgaagatattagattttgtacttctcccagtttactttatatggattttaacttctgcgaaatatggactagcaagatatatactgtatctatcgatgtcagtataagttaaaaatggcggtaatactcttaagaaacaatataattgtacttctgcattcaaaacattttttttggatgtatgaatactagtctgaacatgtgttcgagtagtcatgcgcattactatacaagcagaaaggggcttctgccttttaaaaaatagcgcacttgatctgtgaatattttacattttatgttgacttcatttgtgttgatttcttgaattcacttgttccagcttgtgcactatgttaaccgtgactccttgggcttggcaaatgacttccattcacttgggtttgtccctgagggaacagacctacatggggttgctgatgcattacgtgtttcctttggtgatggaaggaggcaatcaaatgattttcaggtttgttaatattttttttgggtatatgtagtggactagcctttactggatttccatctgattcacctctgaaaatgcaatgcattttttcttaaatcatactactacttgggtctttatcacttgtctcgtactaaattctcattatgggtcatttcttttttcaattgtatatgcttgcagcttcatctgccacctttactttagtttaatgtgggtgagttggtgtccttgttaatcaatttttttttgccttatatagggggtgatgagccatctgtatgatgtcatgtatgagtttaatttctctcttcctccggattacgcactggtgataagagcactgggttctttagaagggactgcaaaagcattggatcctgacttcaaagttattgaaagtgcatacccatttgtcattgggaggctacttgaagaccccagccctgatatgaggaaaatattgaggcagctcttgatatgcgatgatggatccatcagatggaatcgactggagcggctggtaaggcgatccttaattatttctgttttgcttgctgtttcattttgtcttgtagaaagaattttgcaatacattcttcataaaaatatataaagattacatatctgtcatgtttatgatgaacaacaattaattttctttcctttagttagttccattaggatgattaagaacttgtgtcacccctatagtcctgtacacttggaatactatcactaggggtgctaaaggtccgaaatccagatcaaatccaccctgctccattcatctgtatgcatacttcccgatccactccaaatcgattcctcattcacagaatccaaagttccaaaccaaccctccccaaagtataaaagcaatccaaaccgatccaatccaaaggtaaaaaaatgggtggaacccattcggagaccattcccaaaccaaaagaaatccaaaaggggggcatcgctgcggacgctgatgaggcaacgagaagatcgttgtccccctccatgctccggcgcggccggcttctagaacacaccactggcggacggaaattcggtatcatctatgctggcagcaactttaacttgtggagtcttgagtcaatggtgatggacagattaaaatttagtctttgcagatcgattagtgaaatgaaaaccaatgcaggagtgagatgtatgcatgtgtgcccaggagatgatcacctggctgcaaccatggaggaagtgagtgcggcggcggactgctgctgcttgtacttgttgctgacgaagatctctgacggatgcaccaccgccttgctccctaagctcgtagcctcaaggtcctcgaactacctcatggtcgcaaggtgctcaaagttgatgcacatggtgtccaagcccagatcggcagcggcgggcatgtctcgggcatcaatgtgctcatgaggaagatcagtgtgtccatctggccagcatagaggatttggggacgatccagtgaaaatccatgggttgaacccattttggacccaaaagtatacagccaaaatccagatcgatccaatccactttcagcgaagtccaaaccgccccagccctacagcttcgtcagatcatttctacccaaccaaatacaatccaaaatgaaaaccaaaccattataccgattcccacccaacccattagtaggcctaacgataacatgcaaggtccaaagttatggacacactgaaatgcttatgatttacaacaattaatttatttccttgatttcattggagtgattaagaatctgtcatacccctcttgttacttgtgcacttggaataactatcaaacacttatatatgcatgaacgtattacataagcataattttctagtgctgaccatcattcatgtgggaccagtattgtaactgcgaacatggcactaagagatagaacttatcatgataattttgtttttgcatcaatatcatgcaattatttggcaaatatccgtcatgtcttgctgtaatggtcactaaaaatccttgaaatgttcagattgcagctatatccgaacagtcagaatcttcaaataagtctgaagatagatctggtgaaaatgctgccaacaaacctgggtggagatcattcgacatgcattctgtggttgcagctacagaagacctttttcatttcattttatcaaggaaaggctggagggttcgtgtttttcttgttcaggacattgtaaaagcttcagatgcattcctacaagaagcaacatttccaggtatattcgatgaagaggggactacaggggagctacatccagaggttaggacatcttatttcttagattgaaaatgtattcatttcagttttgcatgtagatagactaatttaaccaatttaccactggtgcttaaccacttcacatatttttggacatacgcagcttatatttcttttctgctacatgtttagagtcataaacaaccctcattgctctatttcacaatctttttttggttgactgctgtttgtaaccttgcactatttgtggtgaactactgcatgtatttgtcaattgccttgggatgtgttgtttcaccgtgttgtgcttaacctcatttgcttgtatcagaaagttgccctcatcacatacttgttcactgctgcataagcattatagctttcgatttttggatcgatttattattttcacccctaagaatgttcattcatttttatgagaaaagatatgattctctaagctacatctgtactgtaaacgtgtggatcatcgcacatgctaatacttcgtagtgcctaagcgagtatatatactaaatgtttcttttggaatgcagagaagtaaaatgataagaagggtggtacatggtgttcaatcattccgtcaagctatcagtttggccccagatgcctggactgctatgctattccgtaccttgttgaaacctgaatcccagaaatttattcttgatgtctttctagccttggcaatgcattcctgttacaagattccagaaacaagctggatttgtatgtcgagattcctgaattacttggacaggcagggtaggtaacacagataatggaaatgcagtctaattatcttttgatctgaatttactcttcagaggccaatatgctcatttttgtgagagctgctaccgatcttctaatgccactgcccactagtttcatttctgttcgtaagtattgttgagggtgttgaaaaagctaccgtatgctttgtgtagttttgatgattcattctgttctacacttgtactattttgccccattattacctatggtcccttctgcatccattgccttgccttcattcactcatcagcctgtagagatctccattgaacttggacactgaagcgaccaagccgacgccttcctttcgtagttgtcgagcaccttgatgatatcgccggacagctaccatcgcctgtgccgtcggccctgccttgctcctgtcgacgagcgagggaaatgaggcgaggatcctcttcccagtggtatagccggcggtcaggtccggcaaggcggcaacagcgagctcttcttcatccagtcccattttggcctattagaaaggcaagtaacaagtcatcttagtttcattttgtgctagcatagaagagtaacctgctggcaatccaaaatgtccatctggtgcaaggccaatgtcgtcaggagtcaggacagccggggaggttgtcaaccaaaatctccgacttctcgtcctcgtctgccttcagccgcagcttcatgcatcgaaaaccattgattccgcagaagtaatcacagatctgccacacgacaaatctcacaagagcgatatgggcgaacctagaacaaaacttgctagggatcctattatatacttcctccgttacaattcccaaattgtatagcttatattttttttagagcaaattgcattggtggtacacaaacttgttaggtgggtgcaatttagtacataaacttgaaatatgctcgtttcagtacacgaatttgtctggttcatgcgaatgaggaccaaaataacttgacaatgttaattatgttgattaggatgtgacgtgcatatgtgtgatgagtatgcataggacattcaatatttataaatttgctctctactttatttttcaccatggaaatgatgaatttcatatatttctaaccttcataccattgctcgttttctaatctttttctactatcactgtatcctattctattttttattgaagagatgtatgtctaatagcaaccttctcagatatatgccctaaatcaataagattagcaatgtagtgtcctttttgccttcctccgcacacaccagataagtttatgcatcaaaacgagcattttacaagttcgtgcattagattgcactcacctgataagtttgtgtaccggcgatgcaatttactcctttttttacacgatctgacatactttgatcattaatgtaattcatgttatgttcccaacgaatataaaattagcatcacgtgaaaatactttaaaatatgaatatagtgatataacatgtataatatttaacatagatatagttaatatgattattagctaaaaatatttttcttaaaaaatagacatcctactgattatctatttatggaccgatatgctaattaatacaacataaattaaaattagttagaattagataatcaacctgtggtcttgtgaccctgggagcgagagcacgagactttttgttgttctcatgccgtgccatgatgccatagcgtgtctcagtcgcagaggagcatggatgccgccgtcagtggatgggaagatccccggcaggggtggagctaagtattgaggacggtggtcaaaaacccggtcaagaaaatttatagctatatttgatctattttcataatatatataccctttcaatataaatttagatacccacatataaaacagagtaaattaaacaggtgacaccctctccatatcattctagctccgctcctgatcctcggcaggccgttgccgccgatgaagcgccaccgttcccacgaccctttggggtgcatccctttgtcccttgtcgccgccacggccatgtgcacgtcgtccggccaggcgaccagcccttccccgagcttctccagcctctgcatccaaccagctgaaaaacgatgcaaaattcgaacgaacatgacaccgcgagccggcgaggcgacgctctaatgtgggtgtgcgtgtgacaaaagagaaacagaagtgtcgacttcaagcgagtagaactgtacaagtgatactaatctgaattaaaacgaggaataatttatttctacggaattaatcggcttgcctaataaagttatagtaagacattttgtttctttttttttttggtcaaagatgaagattattcaattcaattcgtctggtacttgtaactccctctattcaaaatgtttgacttattacttgtggcaccaaaaccaaagagaaattaattcattctgcacataatgaataccactgagtatatgcatgcatataacccaagagtattaaaatgactgtttggattctgatcaatcatttaaatttatggacgtgactagagagctaccggtttgtcaagtgatcactccatccagtataaatccccattcaacataaaaaatacaatagtgtgtgtctttttttaacctcttcaataacttatatcttttaaatcacatattcttgttttggcaaaatttgctacaggacgtcagaaaaacatgtaattagctaggggatatcccggcaggattattttattatttttagaggaatatgagagagaaacaatcattaaagaccaggttgcccttggctcaaattagttagtcttcactaatcacgggcttaaacacatcttacattctcatcgccaagcaaagagcaagagaggagaagagacgatggtggatgtgaagcacatggccgaccacgccggcgcacggagagtcaagctgttccgggtgccatggcggccagccagggtggcggaggaggttggggcgccgctggtaccagctagcgagaggaagaacatgaacatgaagcaaaagcacatatatttacatacaatgaatcaaaagcacagatatagccaaatccaaccgatattcatatccaacatcaagtttgtcgaacaccttgtgacaactgacaacacacacaagcaagtctttcctggtagcagcagtcaaaagagaggtgggggtggatgtcaggcttggatgctggacgagcaagctacgtcgatggtggtctcctagggcagcagaagcagagccgcgccgtttcctccgagggcagcagcagccgccgctgccaacgccactccctcgagtgcagtcgccgctgctaccttcgcgctgccgttaccacgcgcgctccctccctcagtgcccatcccgtcgccgctccctccctccgcaagtttctgctgcgtcgtcgcgccgccgtgtgaccgtgcgaggctcggcggcggcgccggcgggcgaagccggctgttcggtgcattccggtggctgcgggtgcggtggttggcggcgctgtaccgcaggaggagaggcggcgggcgagcgcagcgagcggagcggcgacggcgggtgagcgccacaacgttgggcgaagtggcgcctgcggcggttgagagcagagaggaagagaaagaatgagagagggagagaaggataaggaagaaaaaagaaaaagaaaaaaaaaatcaaagggtagaaccgtatttacacaactatttctctctccaattcttccggatataataaaataattccacgggtatccagcagctaattaccaattttttgcggtgtcctacagcagaaacacgtttttgcagtgtctcctagataattacacattttttggttgtcctgtagcaaattttaccttgtttttaagatctatttgcatcattgtaccccactgaaaatatatgacaaaacgagatccatattaaatatattcaaacattttattaatttaaaagtaatctattactccatcaatgttaggaagttatcgggaagtaacttttacatcttatacatgattaattctcattagttactccatcaatgttatttacaatccatcaaagattttatcttcttttctcatactacatgaaaaacaaaaacaaaagtgaaaggaaaaaaaaactatcaatgcttaaaacagatttatagaaagttacttctgaaccatgcaaaagttacttccaattaacattgaagttacttttaaaaattgttaaacttacatgtgttgattaaatttaatttctagatagagtcatatttttatccctacaacgaatttacttctaatgtcgtgacaaagttactttctttttattttaagttacttttataatatatgtaaattacttttagactttattgaatttacttttatatgtctaagaagtaatttaatgaaatctaaaagtaatttaaatatatttaaaagtaatttatagtttttcatcaaaatataatataatcatgtgagatcttgttataaagatttaattgttacgatcacaacgatgtaaccggatcgtagatcggatgagtagtttaattgaattttatttgaagcatatgtggttcctatttgcttgatggactagtattatattttcagtagagtaatggcttcagtggtgtctaactgtaagactaaaccaagaggcttctcagtttagattttgcgttctaaaatccctaactacgaaatgacgctgtccaatggcgacaaagccattatagcaaaacatatgatattttgtgctgcgcgtgtgcccttccaatttatgcttcatattagggctgccaaaaaagctcgaggctcgcgagctactcgaacttggctcgttccagactcgatttgagctcagctcgtatagactcgagcccgaactcgagcttgtttctaagctcgcgagctctgtcgaacgagctcgagctattcgtcgaccctatcaattcttaggaagctgcccacatgtgcctttatctttccttgcccatttcaaatctgccagtacttagctttacttgcttttggaactagtactagtatgcggtcgttcgcggtggaaggctaaagctagtgaagcaaatgtcaacagctaatggccctgtttggatccaagggttagagttagtttgagctagttggggctcaaatagccctaaaggatccaaacatgaggggttagattggggctagttgcatctaacccaccaaaaaaactagcccctccaagaggtgcttattggagctagtttgagtggggcctaccatagaagccacttttctctctctcgctgcccgcaccggatccccatctcgcacgggatcctctcgctggacgccgccgcctccctgatccacaccgccaccaccactaatccgcgcctccgtccccgatccgcgtggcgcggcctcccccattacccgcaccgcggcctccgtccaattgcgccgccggccaacctcagtgccgccgccagccccgagccgcgccgccttcgtccaaccgcgccgccgcctccactattccgcgctgccggccaatctcagcgccaccgccacaccccgagccgcgctgcctccgaccatccgcgtcgccgcctccaccaatctgtgctgccgaccacgcatggacagagatggcttcgacaacctcagcgcgtgggcttcgcagccgtcggcgagcggccctaccactgcttcctctgtcggcgccggcttcgacctcaactcgcaagcgccggcggcggaggggttcccggggcttgggatgtacggagccttcctccagggcgacgacgacgagctcctcactggccgcggtaggggctccagcctccctccctatcgcccaccgcgtgccggagtcggagacggaagggcgactccaaatctgactcggcaactgaactttggcaactcctcctcggcaggagctggtcgcggaggaggaaatggtggagctttcccagcgggttgtcttcggggagaggcgtttgcagcactcgagttcggccgccacggcacttggccgccggagccagcacagcaacacggcggtacgtgccggtggcaggggccagcgcctaccgcgtccccgggcaccgaggagtgccgtccgtgggcaagcatccagctccgacgctcccttcaccaatgaagatgaagaattggaggatgacgtggaggagtttgcgagctccggcggacccccggtgagccaagctagtcgagcctaatggaatgaagttaataatgcttgcttgttagaattgtgcattgagcagcgtagagtaggaacgtataatggtgcacaaatgagtggtgaaggataccaagccatcgtcgacggcttacttgatagaagggggtatagaagggggttggtgtatacccgttgccaggtgaagaaccaaatactcgtactgaaaaccacccactctttctggcgatacttgcaagcgcacacagggttggggaggttaccagatggaaccattgatgctgagtctttgttctggaaaacacatacagaggtataagcagccaatctgtgtattctatttttcagtttcctagttacaaattgtttcaaattgtgtacagtgcttgcccaatttcagtgttgctagctccagtgggcgaaaaattgtccaatgaactgatctctcataggactgacttactgttgtagttactaactttctgctattaagtaggcaaaaatttgacgaggaaccttattataaaaacatttgcttagtaaacacaacacgaattgtgatagttatttgtgtgatagtacagtgcgctgtataaactatactcttcctttatgatagtacagtactctgtaatttaggttatatgagcatgtaattcagttatctgtgcactagtatagtacatatgtgctcatccattttatttatcgctgcagaagaaaccataactaaagaggctgcaatggggtcctccagaaaacgaggagttgcttgatcaactattcagagggtacactgtggatggaagcacaacccttgtgcctggagatgattatggtcaggaccaggggcaagaggaagaggaagaggacgaggagtttcaaccaacacctagtagtacaagcagccagaggagcaagagccaaaagggcaagaggccattaagtagcactacaagcactttgtccagtccaatgaagaagagcaagagcccaatggtgaagattgtgaaagacatagccagtaccttcaaagaagctgtcatagtcaacactaagcaaatgcagaaacgtgcaagtgacaaggctgcattttcagtcaagaggtgtcaggagctggcatttgagtgtggcgtagagcaaaccattgaatctgtctatgctatgtccaagatgttcgaaacagagtatcaaagagagttcttctgtggccaattaactcctgagcttaggttgggttacttcaagaaatggtgcagggacaacaatttggagtagttgatgtcttgctttcatatgtctgttgaactatttatttgtgtgttgaacctatcatctgtgtgtcagttgttgaactatttatctgtgtgttgagactattatctgtgtattgaaactattatcggtgtgtgttgaacctattatctgtatattattttcgagtgttgacaattttttacatgtgttgaagcaggaagaagatcatggccctatggttgaggaagcaaaagatgatggaggcagcacaagtgaggatgagattatatcgatgtgccgcaacaatctggtgcatgcagagaattcgatcgtgcaattggttcctatcttgggtatgtactctgataactattttgtgaaactacctaagagggtcaatggagattttggtatggattgggtcatggatacactagcccgagatacccaatgctacaacatgtttagggtagagagacctttatttaacaggctacataatactttggtccagtcatatgggttgaagtccactacaaaaatgacatctatagaggctcttgctatgtttttatggattgttggttcaccacagtcagttagacaggctgagaaccgtttaaggaggtctttggagacaataagcaggacatttaatagagttttgacatgcctccttaggttagctcatgacataattgtacccaaggacccaactttttcagaggtgcacccaaacttggaaaatccagcattttggccacacttcaacgactgcataggagctatagatgggacacatgtgaatgttgtggtgcctaagagtaagagggttccgtacttgaacaggcataatgaaaccagtcagaatgtgcttgttgtttgtgatttcgacatgagatttacctttgtattgttgggatggcctggttcggcacatgacatgagagttttcaaaggtttgctacttgaactatcttgcaacaatctttaattgcacttgttcatctaagtctcattgtgtgcctcactttcacaatatgttgggaagtattatgtggttgatgcggggtacccaaaccggccgggctacctttcaccatacacacgtacaaggtaccatgtcgcgcaatggaacgatggaccgccgccacaaggtatgaaagaaaccttcaaccatgcacatgccaaagttaggaatgtcatagagcgatcttttggagtgttgaagatgaaatttaggatcttgttgaacatgccaagttttccagaagcaaagcaaactagaattattgttgcttgtatggctcttcataatttcattcgagagagcagaattgcggatagggaatttgatgcctgtgatgaggataaaaattataacccaatgctcaagctttattttatggagtgtaattttttcttgtctagcttaatttgtatggactaaactacctatcgtgtatgttgagtgtgatatctcatttgtacagacaaataaaatttatcgtgtttcggatgcttggtttgaaatatgatttgtttgtgtcatttgtgagagggaggaggccacacatgagtctgccacatcaaatccggttggaaaggagccaaatgattggaaaagtatatttattgtcaatctagccctttcatccaaacacctctagggctagagttagttcagggttagttgagagctagaaactaactctaacctcaaactctaacccttggatccaaacagggccaataaatgagtagtacctgctctacttttctcaaacccaagtccccataaaagctattcctactactagtatgcatgtagcatgtgtgctgtaacagagcagtatgcatgccggctgttgattttttaaacttcttttgacaagctcgacaagaggctcgaagctcagaacgagctgagcccgagctcaactctaaactcgaaggctaaggaggctcggctcgagtctgtaccgaactcgagcctagagaggccagctcgcttgagctcggctcgttgacagccctacttcatattgagctagtcatcaaaaagttcagtcctaaaaatatcgaacattttttttttggctattcatccagaagttcagtcctatgattctacgaggaactttaaacactgagctagtgaaattactaagctaagtcacagatttgacaatttcaggcttttggtctaacaatcaggggcatccaagaattctattagatgtaccagaagtttttcatgttggcaaataaaagcagaaaactaaagcaggtatcacaaggtaagggccggaagcagataaccaaacaaataataaaaactcgaatttatcaatcttttgatatgcgaacaagtaaaccagtgggtgtttgaactgtttttatgtgcccagatccaattaagtcgcgaatgtgaaagcgcacatcaagaggtgaaaaccgtaatcttgtcttctccagtgaagagagtagcatctccttgtacttcttgcggttcaataatgaaagaatttccttccttccctgctctccatgagaaactcaaatagtcaaaatttctaattatttttattactacaagcaactttgacaattctgttgaggtcctatatagaacacaggaatttctcaagagttcagttaccacagtttgggaaagatatccgtgtttgcaaacagagatttagaaataaataaaaattatgaacatttatttattgacatctagaaacacacaaaaaagagctggactgcatactgaagggatccatcgacttcaacttgtgtagttatgaataaagtatttgaattaactttggatcataatcatgtgtatcaaagctacgttgaatgcaaatgcgcctgtatattacttggtagatgtaacaaaggtcaatattgcccaatggaattgcaaataacgtgatgccttagtaggtatatattacaaaggtcaatgcctgatcctgatattcgatatgcaaaacccaggatgtcgaaaatggctcaagcctaaccccatttttccataggacagaaaacagaaacatatggaacaacttgtgtgtatttttccttgcttagtgcaaaaggtttaacaattaatatgatcagcatatatgatacatggtcctataaattggtctgcaccaagctaatctagaaagatgtaattaagtgctacctcaccgatacacatgcatgaatgaatgcatgccacaagctacgctagcaagcattaagatcaacaaacaccattgaacaaagaaaaagaaaacacaaacctgggttaggcctttcaagacgggaccaatacttggtatagaaaaccagtacatgtttggatcaattaattggcgagtctgaaaatagatagtataaacagtaagcatgcttgatcaagaaaattaattatgtttaaatttatgtgtagttaatatttgactaacaaacatgaaaataattatcctagtgaagacatcacatgtattcttctcatgtatagagttttcaatatcatttccttattgtcgtttctattctgacataacatcatcaatgacaatacttactaagagaccagcattcatcagtaatgtgatatgtttgtcagttacatcacctccaagtgataacagagaaaactgcaacacaaaaccaaagatgttagatatctttaacagatttttagtgtaagatatcttttgatgtgaaaagtgttaatcgtgttcctttacttgagaaacatgtcatgggctttgggccgggagtcctaggcccaatgggaacgatatcccaacctcacaataagtacgtatctcagttggatagagtcggggtctgttaggattaggttaaggagtcctccatctatataaggagggatcctatctcaggtcagtgaggcattagattaagatttatcttagtgcccatcggccctgccttctcggttcgacggagagcatcgcgccgtttaggtccagggccattctctgttctttcctctattataatccaatttatttcctttcaccctgtttcatcccaaataatcctagcacatgacaaaacaataggctaagtcaaaatgtcaggtcaagaatagaaaaaaaaatccaaatattctgtggcagattatagcgaagttctatatatattaaaacttggatttaggtttgacactataaacagtaatgttgatggccagaaagaaacaaaaaggttaacacaaaaattgtctatatgaagtaactagcaattctccttgtgtgatggcagaaattaccagatcgcgctgatcaatgctaacttcaagcttcaaatgaataacatatctctcaaaccacccaaaaacttcagtaccatcttggtccttaccccttgacctcttgactgccaacgccatctgcatatgtttagtgtacagagaaacaaattaaccaaaaaattaagtaaaaatgtatgaagttaatgtgataaattatgtatgaagttaatgtggtaaattatctgtttcctcctggatagttagaattgaacagataaaactgaaattttattatgagtgaataaagctataacatattaacaagcaattttcttaacaaatgatgcaactaaaaatctaagctaaattcccaaggacatggccacaacaccaagtaaaatttttcaagattcagaagcgtacagaaattttgtgtgtaactactgttcgatatcagttctacttatactgtattgcaacagccatcactgtttatgtgtgcagttgctcaccagaatatcgttagtttgtcttagatataaagattcttagtgtttatgcaggagttgaaattttctacaagggagacaaaatgggatgacattaacctactctagaagtgcactcttgaatgtgaaagtttggcacacaggcacaatatcttggttggctaaaaaacacgttcctgagtaccgttttaccatagcaaatggtgggatgatgccatgtaacaccatgatgtcgatttcgatgcatggtgtttcaccaaactagattggtgttagtgtgcgctagtaacaaatccgtgcattgcaacaggccaataacactgggaatgtgccggcctttttgttttttttatctctagcgtgtgctctgtgcgtgcactgggaggagggacggaaggaggactactccgcctttacagtaatagcagcaggtggtgagcataaaacagaatgttagatacatgtttaatgccaaaccagtactaagagatacctgtttcagataatcatccatgaacatgattgcatgatcatcctgcccagtattgagtttgaatacacgcaatactttgtctttcttcaaggactacagccaaaaaaaggtttaaattctcaatgaacctcttgtgcagtatgaggatgactgatcatctattatttatgctgaatttaagatgaaagacattcaaaatttcaaataagaactgctagaaaacaatagaaaggcaagacagattccactgcatctacaataggcatgctagaatgctacactaaaggtatgataacattaattcaagacaaacctcaaggtctctatcaacttgtgtcctgtccttcacactactatacaactgtgactgcaaaatgaatggttctgtcacaacctgcaagtgaatataaaacaggatgtaatgtttacacacaaatggcaatcaatgactcttaagaaaaaaatgttagtccagagagagataaaagctcaatataaagcccaattggacactgattatcctagcaatacaaagctagagagagatattaataataaaaattgaaagaaaatgcaaaaatctgtaatctctgactgtcttagttatttgtagtaacaaagagtataacaacccaactttcattttggttccattaaatcttgtatatagctcataacaacttttgtttcttttgcgcctgatatctcttgggaaggtgcttttttacacctgacctacagcatattggcacaactgagggatctagagtctcaactctcaagtgactcacttgagccaacttaacttggttgtttctcaaatctatcattcatatatgtgcattgagaggtataaataaactgtgtttagttgcttaccagtacctcaattagatatcaagttcagaacatatgaaacaagagatgatattcacttggtgaaaaatgacaaatcatacagcagttatgtggatactggatgcaattcgggtgaattacagaaaacaactatctaggcaatcaaaacatattgaaccaaatagtttaaactggacagattaatcaagttttgacaagaactgaatatgaaatttaaccttcaaagtgcgtgcaaaccttctctagctttgggaattgtgtgcgcatcagttgaagagcaatcatggtatcactgaacgtaagggtgtcctctgcatcatcaaacagataataaatctttatggtaactgaaatataaagcaataatcatcaccgaacataaaacaattcaattgttcgattaaatttggacgaggagagtaacgaaccaaggctgcttgtgtatatttgggttgtgtgcactggacgctcatcgctgtgaccaggagagcgtggtcgcttctttttcccaccagaggaagatggatatgatgatgatgatgatgatgatggttcgtccatctcgctttattgattattcatgggcggatccaacttgggaacttttcggggaacaaacaaactgttactaaggttaaggctctctctgaaattaagagaagagcttcttccagatctggaagagaagctagggttaacgaacgaacgaacgcaagcaaaattaaagtagtcccggtgggggagagagagatgaatcagaaagaggatgtggatgctcaccaggatcacctcctctcccctcgccagatgagatggagatcagcgcccctcccctccccttccctcccctgttcagcagcgagatgagcggagcagacgagacggcagattttctttcttttacgctaccaacgtattaacacacgagggttagcaaatactccctccgtttcacaatgtaagtcattctagtgtttcccacattcatactaatgttaataaatctagacatatatatgaatctagacatatatctatctagattcattaacatcaatatgaatgtgggaaatgatagaatgacttacattgtgaaacggagaaagtatttagcctgtgtctttccagggccgggaaccccaacccttcacacggaaaacggagcgatatattatcatatgattaattaagtattaactataaaaagcttaaaaatagattaatatgattttttatagcaactttcctatataaactttttacaaaacgtgtatctttagtagtttgaaaagcgtatacgcggaaaattggtagttaccatgattgcctctaccatactcggtgagtatccttaggcggtcgccgcccgattttctgcatgccttcctccaacaggaccaggacgtcgaccaccaccagtccctgttgcgtggagtcagaagaaaataaaaaccagagttcgatttgccgccggtgtgttcccttggatttccgtgctctgcctctgagccggagccagaggcgaaccacaccacattctcctgcgaactggagaaccggatgggggacaccatcgggttccaatgtgatggagattatctctacttcttggtgggtagtggccagatagagcatccgtcgcctctacaacgaccaagacctgggccacgtaacaaggtgagataggttgggaacccacaggaacgaacaccgcctaaatgtcctgagttacatggatgaaactgttagtaaacagaaaagaatacatatttttttttcagaaacaaaaatgaatatgataatgctactatctgtcggaaacgaagtaggaaacttttcggaaacacattcagtttttttcttctcaaaattggaaacgaagtatttctcatatgcagctgtttagctttagacttttcaactctaaataattagatttatactatgtgccatagtacttataactgcagttatggatgaatataatttatttttccaagaaaataaagtgtacaactagttgtattattattaattgataaaaaatagaaatattgatttattgttttagaaaagatattgaactatatctcttcattgatttgagaagctcatctgcattgatttgagaagttcagcttaagtttttatagtccgataaatacccgttaccatatttgctccattttcgtattcgataatattcgattctgttttcgtatccgttgtttccggttctgatttcaaaagaaataaggaaacggaaatgataaaagtggttttcatccgttttcgaaccgtttcgtccctactcgagtactccacctttatctcaatttttttattatttttaaactagctatttctttacgatgactgcggcccacacatcagcaatacttagagaaaaaaatgcaacaaactcggttgagaattttgtcgacagcaaactcctcagacctccggtaaccactagttgccgctccacgcaccgccaccaccgctctttctccatgagccaccatctttcctcacatcctcctctccgcctttgcatgtgcagccgcatcctctagtcaccgacatgtcttttctcctcccctgttttcatgcacgctatttttatggtcgccgttgaggtcggaggtgttgggcttgcaaggacccgggaaggtaggagctgacccgatgaagagcatagacgctagatccggtctcctccttgctagatctgacgatttcccaactgtcgaaggggaaaaaaaaggagagagagttagtatgcgatatggttacagagtaaccggacttggagatggatagaatgcggtggtctaaattgaaatgtaaagttagattttgtgtaaatgagaagaattattaaaggatgatataatttgaaaacttttaagaatacatagtacaaaatgtaatttacttttttctacagcacaattaatgataagttgtccattacccaatagtctcgtgatatgccaatcccatttatcgtctctgcacagtatggttgggtcggtgtacttagctattactaataatctcatgatatattgatacaggacgatacaaaattctactaacacggattgcttaattatggttagatagatctggctaaaaaaagataaaaataataccatcaattttgctcaataataaagcattcgatcatggtctccttttctcactgcatgatatatgatgatcagtatgtatataactatattgctattttcctaattctttcatttttttttattttttaaatatatgttaatttggactaattttttttctcataattaagtaataaatttgtttttccatatttctcctataaaatgcgaatagtgcattgtataatttgaaatttgtattataagcgtatgtaatttgatgtgtaagatatggatttatagtataagatttgatttttttttaaaaaaaatgttgcaccatagtagataagtagttaagtgaacaaccgtaaaagagagaatccattgtgccactgattttgtccctattttataacatgtcactggatttgtcaagttctaatatgccatcgcattttgcttaacttctataatataccatctccgtccagttagcctccgtctacaaatttgtcctagtgaccaaaatacccctggacgaaaacttctaaattttggtcaaaaattccgaaatatcatattgtaaaacttctaaaatttgagatgggcaactttgagcgctgctacagcctttgcatgggatggggataatcgaaggcgaagcgacgacggaagctgtcgctccggtggcggcgcggggccgatgcgagtagatgagttttcagggctctcggctggtttattggagatatttacctgattgccactattagatttgacagttaactatatgaacccacatgtaatagaaaatgagaaaccatgaaatcatatgttacatatgagtagcaaatagttaaatgtccaagtttattgagagtctggtttacaataaataataaacgaacagagagaaagagagtggagaaagaacaaatttcaaaaataaattcaagaaaaaagttttttttgtggctatatagttgcagccctaggggtgaaaatggtcggaatcggtagcatctcttcggaaacgacgctcgatcgatcgataattatcatttaaactactcagtgtcgatattaatacgatacagaaagaaatagaaaaacaaaatttatacattgccaatcccttatacgaaaatgacgctcgcttggtcaggaattttcatgaccattttcaccccttgaacaaagaacctaattttatttggaaagaagaattttacagttcgcagttgatattttattcttttttcttcaaaaaatttgaccaatactatttattcaattacttagttaagtaaaataaaagaaatcactagatctgtcataaaaaaatcttttaagtatgtctacgatgattttctatgatagtcaaacaaactattaaaaaatcaaccatgtcatatctctactattataaaaattgaagatgtttttgctggtattttggtacgtcatctgtgtatgagtcagtttttaaattcgtttgtttttagaaataaatattcgtatttgagtcggtttttaagatcgttcacttttggtaatacataaggaatcatataagaaatctgttaaaaaaactcgcatgctaacttgagacgatcggactcctaactctagcttatgattttctaaaaaatatatatctaagcgaactcccacagtgaatttcatattaactaaaccatataacaataataagattaaaataaacttcaaaaaactcgcatgctaacttgagacgatcggactcctcactccagcttatgattttctagaaaaacatatatctaagcgaactcccacagtgaatttcacattaactaaaccatataacaataataagattaaaataaacttcacccgttgccatgcacgggcattttatctagtacttcaaaaaaagagagatgataggtttcaaagaaaaccttgatctagactaacatgatatctactcctctattccaaaataataaaatattctttgctatctctggctacgaatttggataagcatataaggatccaaagttttctttcacaaactaagcagcacgcctctacttcctccaacatgattctctgctgaacagattatttgtggatggattatggttaaaaaaaatatccaagcttggaatgctagtttgctacagaacaattcttttattctcagtaataattatcaggccgtgcggttagtcagttaccaccgttggtaaaaaatagatgaaggaaagttactacctttggtacaaaatagatggatacatgcatgccgtatgagggagaatttactagtatttgccactctaccaaaatactactagtgctcaaataccactctcctaaattttcattcccaaatagtaacttctcccgggaagtttacatctatggacggaatacataacatcgcgtagtcttacattggtgacacgcccacagtacagcaatcctttataaagaaaaaaaaaacaaactagtaattcgaagccatctgcacaagatgttacaagctttagctccgaggggaaaattgtgagacgaccaacatcatcagcgataccttcttcataaaaagtaagcattcggtgagatgatcagatgaaaaaaatgagtggttctcaaggcacttgttgacgtaaggtaaacaggaacagcatcttaggctctcttcttccgagcagaaggtccgagtgatgaaccagcagtaccacgcggagcagacgagcaaagtccacgcaaaattgcgatgacagcgaaaacggcaaaaggaacatacatctgaagcaattttagtgtcgctttcttcgagcccacaatctctccaagtattgctgactgaaatgattataaacaaacattatgaaacatgtcaaaacaatgatctagtacaagtagatgacattacatcattcattacgagctagaaaaatatctgatgcttcccactaggatgcactcacatgcacccaattcaaaataggacataaatagtaatgaaaaaaaaacccataataaagaataaaaaataaaaaataaaatttacagaacaaagaaccatgttaaaaagaatcaaatataaattatataattcattctacatgtggagaaattttttagataatgaaagctgaaaattagaagaatgcctattcattaaaatatctttttgtttcttccaaaacagaattgattttctaataattttttataggatatgcttgattactgcatgacctatgtaaccaatattgtcctgttttttgtatccatttgcagtttgcattgaagaagaggcatcaatgagcattcagggcactcagactgaattctggaatgacattgactgaggttacttagcatgcatggcgattgaacgttcatgtaacaaatgtcttctggcgtttctacagtttgctccttaacgataaacaaggatatagaagctcggtgggctaaaaaatgtaaagtgaattgattgtacataaatgttcgggcaagcattaactgttctgttcctaatcttctttccttctgcactgtgaatctatgaccagttatgtaaacttgaaactaagacaaatttgtaataagaagtcacaaattgtatgtatatttgaaagggaaaaactgaccaaagaaaatgtgttggcctgttgggtatttaatcaaacagactgtaaatcctcaactatgagtgcagaaagtgaaattgacatgtaaagtgaacacaccatggaagccagtaaataaaacaattaattaacgcaacagaaaaaagtaattatgtttcagataatacatccatagtacatgaaatatattgagtggatagttgggatggtaataaactggcttaacacaaagtggatctgggcagagctgctaggtggatggtgataagtgctgggctacatgcttctctattttataggccagactctccggtatcttgggatgggataaaaacaagagagaactttgtgttctgcttaagctaccatgccatggcatgcttctagatagattgcgtgccccacattggcatggtaagttcttttatcatcagaatttttttaaaaagaaaaactcaaacaccttttatatgttttcttacattagagatgcgctaaatctaatcaaaatattaccttacaagcaaaaggaacatttaaattataaaaacaatgacaaatcgtctgttttccagcgttatcaaaatatatgtaacaatgcaataaatgaacgttgtagttctcttaattatttcttccaacattatggctcatcactgtagggattcagcaagtgccgactgcagttaagattttatgatggggatttggatattgctttgtcaaaagtcaaaactatgcccaataacaaggtgtcatgactactatattagaaccatgcccaactcccaaaagaacaaacaaagaaattgtatccttggatggaaagattaaggctcaaatcagtcgagcttttaatcatttccactctgaatgactcaatgcttcagagcagggcattaataaaacagaagaatatctacattcttgtttggagcgcactatgagcatttacaaacacaaacaatagtaccaactaaaatgggatcaaaaagcaattcgcgcggcattgagttggacttaagaaatttcattggtccacccagatcaacaaacaatatagagcaatttcatcgaaccctctaaacaagtgagcttaggcaatccatgaggacgacaattactttgttctaaaataaaattatcaatctgagattaggtctgtgtgttcccataaaaatgaaaaataaaatcaaccctctgcgcgttgcagatccgatgcagaagcaacccatttactcccaaccaacatgaactcgaacgctgaagcagagagacagcgggggagggagcgaaggggggcgtgagttaccatggaggtgagggtggagacgccggcgatgagggaggtggtggcggcccagcggcggcgggcgaggatgccgtagagggtggcgagggcgagcggccagaggaaggcgagctcgagccagacgagcccccggaggaagcccggggggcgggccacgaggtagtcgccgaactcgcgggcgtaccaccgcttgagggagacgagcggcgccgggaaaaggtggcgcgggagcacggactgcgcgtcgatcagcggcgccgccaccgccaccgtgagcgagaagagcaccaccgccgcgtccgccgccgccgagaccacccccattgccgcgacgcccggtggagcagagcagagagagagatagagagatctcgacgaggagaaatggtcgacgcgtccgtcaaaggaggaggtactaacttacagatgtccaaaattcgagcaaatttaataagggaaaggattaattggatcatcccattataaatttaatttgatggtttttataattcacccatttgaaatcatcatgccattataatttgataggtatttaaaatcatcatgccattataatttgataggtatttgaaacgtgtcactacttaccactttaatacgctgaaattattttttggactagattaccctttttttcttcctctactaattgggtgtcctacaacgagagaaaaaaatatatttatgaattcaaaaacactaaggaaaatgattttaaataggcatcgagtgtttgtttgttgtatcgaaaaccttaatacacaataattacatcacatctttatagtgctccttattaaataacaagaacaaacaaaataattgaatagaacatcatagtaaaaaataaaataataccgctctaatgctaataccaatatttgacttagttaaacacaaaattaactcacggcatacagagacatgagtaacattatgatcatgcaaaagaaggtgagttatggtgaagcaatgcaagcacaagaatggttaataaaatccgattcagtcctcactgtgcagataactataatagcaccttggtcgtcacaagcttggacagaagcattgtttgataaattaaatttcagctgctccacaagcttcaatcttcattgtacaaaactacaaatgacagaaccacattattagctacttgaatgctataaatggagaatggtgcaatgattagtcatctacaaggtcccagtgaatttgaaaaagcttgatcagtaacattacgtgttaaacatcaaagttccagaaaatctaagccaattcctacaaacattgaagcaatacattaaagtccagaatcatagtcattgaaaattcaataatcaaagcaacataatatgtacatgacatgacaaaccacaaagtcatcgactcttagtctaagcaacaaccactcaaaagcacaaactatagcatcagctaagaagtcctagcacaactatgctaataaccaggagctcttctagccatcacactaatacccttcagagcacggttgcgaggtatgccgatctgttgtcaatatatccttggacaaatgcaagatccaaatatcttgttatcacacgttgtcgcaattatgcattacaattcaatatagatatcttgggttattttctgaatgagtaatttacatattgttggaactacttagcaaagcaagcattgcaggatgaattggattgaacttgaaagtagaatgatctgaactctctaagcatcctattgttaaatacgaaattaatatttattgcagttcaacaatgtaacattatgttagttatgctttaaggataccagttctacactaatttttgttgggtctatgagtgggaggaaatcaatgatatgatgtagttatcgggactttactttattcattggtggttatttgatgttgaaagactgaaggtacgagaggtaatctgaatatatttattagttaattaagttgatattaaaaaaaatgtaattagctagaaaaaaagggtacatgccccttttacttaacatgggggcacaagtcccctcttaacgggcttgtaaaaaggtgaaataatcattagcaaagtccactagttttttatcataattttctatggtagtagcatgaaataatatttttgttgaacatgtagcacgaaataatattgctattaagtttgtactataatgttactttatgcttgacttttgatatcatcaactttttaaatttccatttatagagtgaaaatccaatctcctctggccaaagaacgagtttgcgcctatgagtagctaggtaaggttcaaaattttaatatatacaaacaacaacatgtgtaatttgatatgaatgcataatatgaaagtctttactacaaaatagactttaaagtttgtagacaagactattggaaaactcgagggagaaacatttgaggataacaatctaatcattaccgcaaataatgcttctgttaattgcaacaatttaagtttggaagttggttgaaggagtagttatggtatattaaaatatttttttgtcttgtagtgactcatagaaagttggcatgaagacttaatttgtactatttaagttataacttctaattcatttccaaacatgtttctcatcgcttttgtactaagatttagagcttgactcataatcaattgggacaatggaaaagcaacgaaatatcttctaaagtcatttaagtttctccctatttatattggagatgaccagatagacaaacatgcatttaaggttcaattatttcttaaacataaataaatcccgagaactccttttagtgttagttatataatatctcatatgtatatgttactttgttaggtgtttcatgagcgtaacaacgagtacaatattcttatgttacaagctatgtcacccactacatacgatgatattgttatatagaatctcacacgtatatgctactacattagacttcatgactcatgagttccacaacaaggaacaatgagacagtttcatgcagaattgccagccgggggatacatccccatcccagcccacccctattggttggaaaattccccatccccaaactgaggaaacatgattcccatccctgccctctgggggaattatttatcactcctcgtacccgcttaaaaatgcatgtacatctcatatcataaatgtaatataacacatatcaatatatcggcatataatcactaattcacatgataggaacaaaagattgtcattcatctagtaatcatagcccagctagacttcaaacacgcaaatgtacatcaaatttggacccccaatgctagttaagcgggtctccgtggagaatggagatggaggataattctgcccggctgcccgccagactctatgggtcggtgtgttttctcctgttcaatttccttttgaagaactaattgcaaccatctatgctcctaacaaaagaataccccatagccacgaggaaacaagtccaataataaatctcgaccgtttggtctgaattttacttgtgcagatggtgtccatacaggaacatatatgtggtggttgagtaccatccacaggccacagctgatcttaatatcgtgtgggtggtacacgatatttaagtcacaaaattcagtgacttgtcataacatcaataagatatttgtggtaagtttttaggaatagagcttataatgctgaaaatgttgatatgctggctgacaatttt

SEQ ID NO: 7293 - DNA, 18440 bp, Oryza sativa
ggcatcggcatccataaaaccacaactcctgctcaaagattggttcagctagcactagctaggacatcggctaatcattcttgagtctcgactaatgaaccatagagtacccaggatcggttgattgatgaaccatgcatagagcacccaagatcggcacatcaaatgtgctccatggatgtactaccacaatacttgcatcagatgtactagtagaacactggcataaataatttcaacagacatgaatacactatagaaattagattttatcagatttcggatggtatcttaccataaagtttgaaatataaaagtgtgatgcattcttccccagtacctgtataacagactgccggtaggcactcccatagtgcaactttacatacatacgaaactatgaaagcataggcattagtgtgtccagccacataactgaaaggtaattccagtcgctaaatacagaaattgtcgatagcaaaatcacttcatgaatgtattttacatggctgtcgtgcaacactgcattgacaaacctgcccatgcatatcaatgtccacagcaaaagacatcaacctcctctgcatcaggtaacaatgatcttggccttgtcagacaccctcggcagagccaatagcttcttaagaactttactgcccaatgaaaaagccctagtgcaatccacatttatcttcacttcctctaaaaccggtgcccagctcagtagctttcctacaaaatcaacttcgtagtccaaacccaggaagtcattcacgcttacagttacgaggtggtccatttgaagggttagatctgcaatgctcgtctgatcttgatcccacaagctcattggcccaaaatcattatcccatgggaaactctgcacaatcaatttttaatcaacgtatcaaatgtaaatagtaccaaaatttcagtcattcaaggagataaggatagagattgacgaatatataaaaggcatacccatagctcaagctttttgaggataggagcattctgaaacaatgacacggccggtcaggatttccctttggtcccagaagcatatctctaataacatcatctcgaggtgatcaaacacagcagggatcttcgtcattatgcacccttttgatagatactgcaaccagaaaaatgaatgatgagaaataccaacacagcataatcaggacaacatcatcataatgctgaaaataacaatgaatcaccgtcaagaaatagccgttgatgacaagtttttcgatgtcacttaggcttcccaatgcctgcttgaggtaacttttcccaccatgcacaactggaacagattggtattcttgagctttgtgcagagtgacatttgcagtctccagattaggggcatccaaatggaagtcttcatacttcccatcaacctctagaatttcaagttcaggagctcgaatgttcagacagctgatgccttcaaaggatttcaaaaccagcacagacaactcagggcagcaggaaatcagattatcaatgtcactgtctgtggaggagaaattttccaggtccaaagtagttaaccactcaaaacctttgaacatttggggcaaactgatgatgcagttctttatgtccagatgctccaaatcactgatggagaagaagcatgatggtatcctataccttgacgcagaggtcaatttgattgtaactgaatttggtgacttcattgacagcttgtgcatccacctaccaaatacgtcgtggtaatttttgctccctaaaattgtaatcccatgcagaggtcccctgtggagtgataacgccatatcgaccaatgtaataaacttgggtggtgcacttgttactgaaccttgacaggaagtgtaggtgcaatcacacagcaacatctctggaatagtagtccatgtgctcctccaaacgcttgacaggatgttagttctgacagcatcttgaacattcagacgagagaggatatcggcttttatctctagaggtagactgctcaatctgtctgacttcgcggcacgtctagacttcaccttggccttctttgagctacccattactttgaaaatgccctgtcgttaccagaaagcagcaaacttagatgggtatgcattccatcgccagcctcggaggaaaaataaataatagaaatcacaaaatatagtacagtgaagttgattgaggacagagtaaagtactgatgactagccagcattcagagaaacaagactggaaaatttttttaaccgaacttaacacgccgactcgtgggtccttctctgaaagcaactctaattgtcagttaaagtgtgtataaaccatctggtaaggaatcattatcaactatcagctgcagagatcaaacttgtgcacagctgcaagtatggaaccactggatcggtaagcatagcacagtttctgctgttgagatgaacccatcagaccaaggatcaagtggcacagcacatgtttggggtatcacatcaaatacatatgagaaaatcccttatgtacccatgaattttcgcccaatttcttctgtgcccctaaattttgtcttatcccctacgcacccttgagttttcatttttatccctgatatacccattccgtgagttgactgtcaattgactgttagatttttccaaaaatgtctacattacccttgtgtcttacttattgcttagtacagagtagttgattaaaaaaacatggctctcaaggtaaaagttgattcatttataaaaccaaacatgccataattacttaatctaaaacatagatttttaaataggtttcaaatcagatttgatgaaatttattgaaaattttcgctgaaatttaaataaaaaacagttttggtttttcgaattccgaataaaacattttttggatttcattatctttaaaaaaatgtttgaaaaattaattttgttttcgaaatccaatgttaataatcatgtccctttttttatttttaggttaagctttttttattaacaagacttatgtttttaaattagaaagcatgaagtacaagcgaagggcaatatagtcattttgggacaattctaacggtcaattcacagtcaactcacaacatgggtatagaagggatcaaaataaaaactcagggacatacagaggatgaggcaaaattcaagggcacgtgagggattaagcaaaaaactcatgtgtacataaggaattttctaaatcagttgtcacatcactgagcaatttcgacggtaacctgaatggcatgcagatggcaaatgcatgagaatcaggaacggagttaaacaaaaaggggaagtctaaccctacatgaacaactctgcatcacaaatttcacccggtagcatttctttcttgcaagatccatcgaagaacggacaggttcttgattatggccacaacgacaagaaaactaaaacaaacccttcacagcccagcccccatggcgtctgaatcatcatcagcagatcgcatacgaaaattctctaaccaatcccagccaagaatcacacatctagaatgaactagcgtagaaaaggtgcaccatcatcatcatcatcagttcatcatcaccacacgaagtcacgaagaggagaaaggggtggttacctagaaggaataatcaatggaggatcggtgggtgaggcccttaccaggagagacgacgaagaggcaatgcgaggggcgcggccaagcgcagacggggagagggagggagggaggcggccggtcgtacggcgcgaggcggcgatcggtggcggcgacggcgaggttttcgcttccccctctccgccgagagaggatgagaggagagtgaagagaggctgggccggataggcgcattttgggcctcaattggatgggcccatatgtcggctttgattttttttttcaaacttatttttttggtttggttaagtttatagaaaatttgacaaaatctatatttcttttatttttcataatatttttgttttgtgctgaaaatattattatatttttctataaagtcggtcaaacttttaggaaaaagtgaaaatagtccctaatatgaaatggagggagtacaattataggccaaatttgggcccataaagtggtgggctgagatttcggtccatctaaaggaaggacacggatggacctccatcccagttaaaaggggccgactggacattgaccgtacgtccgtattgcagtcatgtgttagaatttgtttctcttttttttaagcaaaaacgaacaaggtttattatttttgtttcagaaaaagcaaaaaaaaagagaaaatttcataaaactacatgtattttgaataaattatcaaacaaactatatatttaacatgatgtatcacaaaactatagatttaacactaaaattattatagaactatagaatggaatatcacaaaactacgcatttagtaacacagttatcaccatattatagaatttaaatatcataaaactataaatttagttacaaagttaccataaaacttggacacctttaactctaacataacattattgattattgttaatgatttgaactcaaaaatatatagttttgtgataattttattattaaacatgtagttttgtgataaatttagtgttcaatctgtagttttgtgatatatcacattaaatctataattttgtaataatttgaccaaagcatatgtaattttgtggaaattataattaaaaaaagttcacaatcgctgccggctgccgctgtcatttttgcttgggatcacagctgcttcagatacacccacatctcaaatgcaaagcttcatcatcaaattaaagaaagaaaaaccttcgaagcatttcattctacaaacgttgggcttacctaccgttcgttcgctgtacaggtgatgaagaaactgagggtggtattgcttgtggttaccaagtggctggtgccaaccacaacatcgttttttaataactgtacctggaaagcgttgccgtctaaaagaaacaaacacagaaagcatgtcacccatgtcatgtcatgtggtggttcattatccgcaatcgcctcttgtacatatgtcacgtgcataccaccaatcaatgacaccaacgcatcaaagaccacagacaataatcacactgctgttttttttatgtgcatatcctggttgaccgggaaaattttgttccatcttgacacataagtaaattctcttcttaaggatatagaagggtaaactcactgttatcaaagaaaatagtgcttgagaatctatgcaacataatagcccaccaccaatcacttttgcacgttctacagattaatccctgatattttttatatcatgcgatagtcatgtgtttgtttgaatcaagtaaataacatatatttaaataaacataggcattttaccgatagcaaagcatgggtatttcgctagcattcaagaagaagagaaacttggaaagttaagccatcatgaactaggaaggataatgtgctagagccaacagttcaacacttgattgaactaactgagccaagggaaagaaatagtttgtcactctaatcacaccaataatttttatacatgagaaaatggccgagttaaattatttaatacaccaccaaattacctcactatatgctcctttagctacaacactgtcctccaactttgatcttctcccgtttaccatatactcacaaatcactgaaagctagtataaaaatacacttgcagagaagaaacctgggatggaaacaatatgcatattattgggactaaaattgcatcttggagttgaatttacccgctgggtgccgcaattactatttcttccatactcttctggaacattatttctgtaggttttaagcacccacgaatgtactcctgcccaagttgtgcgcgctcgttgtccccaaacccaaatacaatgcctctgtttgtcactgcaacagtgtggtacaggccagtgctaatttgtgaaacatagtgatcacgcagactatcgaggactcgaggcctcattactttgtcggatgatcctcggtcaggaaaccctaaactcccaaagcccatccatccgaatgcaaaaactgagccctcatcagtaagaacaaatgtctttcttttccttgcacagacctgtcaaaattaaaggaacatacttaagcctttatacatgaaactactactagttctgtttcaagatatgattgttattagaacaagaaactcctatatcatattagcatgtagcaatgcataacttttgttttaaatacgaaaaccatagcaatgccctatttcttgctacataaagtatattacctcagcctaatctacatgattgatgatagtttaaaccaggtttattcttcgatgcttaatgaagtaagaaggaaaatggtgcaaacatatggaacacacctgcacagcaacttgactcttcaaactgctgatcaattctgggctagttttgtcattctcatcaccatggcctaatgctccacagtaacctctgccccatgtataaacctaaaattttcaaaccttaacttctgtctgaagatacataacaatcaaaacatacaacagatagttccttgaacagtgtatacttacataacccagtgcatcaagagctacagcatgctcatcaccagcagacacgcgaaccacatgaatattcctcctcttgaatgactggattgcacgtggacgaagttcatcatgctgatctccatgtccaaggcagaagttggtacaagagccaaaggaataaactgttccatcatccgttacagcaaatgtatagctggcaccagcagcaacctgcactaccggagcaaggccttcaaataattcaacgatctttggagtagccctgtctattgtgtcaccatgaccaagctggccatgtgtgttacttccacatgtatatacttgcccatccgttgtaagaatgacagtaaaacttaaaccagtggcaacctgcaaaaaggggaatagatagaattaagaaaaagaggaagagttttgcagacttgactagaccagacatatgaaacaactacctataaggctataacagccttattgtctattaacaaatttagttacaaaaagtagggtcttccctccattttatatcaacaaataaataaatttgaccacaaaactaaaacatcgttcctgttgcatcaaataactagagcattgttctgtttttacaaaatgaaatataataattgaaagaggcatttattccattgtaggagatatggaacataaaaggataataaagatgattgggtccacctgtttgcaagaaattccttttagggcctttatttcggttggtcgaaatatagttcgccccacctcaccgtgaccacagcataatgatgaattatctccacaagtgaagacctatttgaacaaaattcacagcgttcaaagtattagaaatattacaattgacaatatacagtgtttaagatgagcatcaattacctcccctaactctgtgacaaaagctgcatggttgtgagaggcagagatgttgacaacacgagaaagtgatgggaagggaaccctgctgaatgccgcacactgggttgtatctgggccatgacctagcaccccacacaaactggatccacaagaatagacagaagagtcatggaccaaaagtgtgtgatatcttcctgtcgctacttgcatctggaaacatacagcatgttcacatatataagaaaccaggttggaaatgtcttctaacattaaaaagaaaatctaactttccagtttcatactaaagatagaattgttcatgagggaaactattcccaagtgcaacaatgcaacttttgttgatcatttggtcttcatattggcaagcatagcagaatggcaataagtaacatgtccaacatagagcatactctcaaactggtagagcagatgagctaggatgttaataaaagaaaaaaaatctagaataaaagtaaattaggcaccctccagaacaatctgatgcagtaggcacgccaaataattatgcgccatatatttttaaaatgtctgacttgaaattcaatcagtgtaagaaaaacaactaagatatgatggattcaaagcaactgaggcatcagcaacatattcccattcagccaagtgtgtcgtatctaaaagaaaatgaaaaaacacaaggtaccatatgtttattataaatcatttccaatgtccacatatcctcctcattcagaagcatgccaacttacaaatcaataaatcatagaattgttagtaattttgttcatcaggaatgagctggtcaacctctcttaattctataacaagcaaaaaaaaaaagaaaaagctcacaatagactacaaacgcatgccttaacttggtgttaagatgtttcattgtccctagtgtaatccaaatgtggatatccgattcctatcacgaagtttccgaattcacaaagtcatgcatgcatgatcaaacatggatccctaaaacgggcaaaggtgtgaggcaagcacaatcatctctaccaggctatcctacaccacacaaagtcaaactaaggttgcatttactagtatctcagaattcagatgcgaagcaaagaaatcctcacgttgccggaggaggtgtggacggtgccggaggactgctcgacggactgcaggaacctgagcaccttcttccagctgccgccgcaccgctccaggagctccccgcgcgcggcggggcccatggccgcgaacgccgcccgcgcggcgcagagcctggaggcggcgtgctcggcgagcgggcggagcgcgcggcacgtggcctcgagccgcgcgaggtccccggcggcgaggcggccggaggtcaggacctccccgatgaggtggccggggagctcctccatcgagaaagcccgcggcgccttctcccccgtcgccatggatccacccctcccgccgcgatccccgcctccgcccgacgaaatcttggcggccttgcccctggatcgatcggaatcatccaaggacgacgccgaccccgacgccgccgtacggatcgaaatggcgacgaactccgcggcgagctccccccctcccctccggcggatcaaatcgaatcgaatccaatcgaatcgaatcaatcgctcaccaaatcccgccaagaaacactaatccagcagcagagcagagcgaggaattgggggagtaaatccggggtgcgatttgagggcgggggaagcggagaagaatccctccaaatccgaaaatccgcgaggatttatacgctctcgcgcaagcgcatcaacgcacgaacacgagcacgaaccgaaaggaggacgaaaaataaaaataaaaaataaaaaagaagaggaggagcaggagaaattttcttcacgcaagtaaagactaaagaggggctccggaaataaaaaaaaatgcttggatccagaggctcctccactagtagctggcgccgtcacccactgaccagtgggcccagcggcaggtggcctcacctgtcagaagtcacactcacccggtggtggcacgtggcctcgcggtgactgacgaggtggggacagtggagggtggggccggggggtcagtggggttggagggtgcgcgcgggggaaagaaggttcgagatcccggggggaggaggagaggaagaggacgtggcgggcactatcgcctacaggggtgacgtgtcaagccgggattgggcgcgagttggcgatggggacccggcacggtggcacggccaggcgatcggtttcctcggcaactcggcgccacggctggacaaggcgcaggcagcgacaggcgaggggcaatgcaaatggcatggtggggttgcaaattgcaattttgcattattagcggagcaaaagcaccaacggctcgttgattttgttcgctcccatctaatcacattattttttcgtccccagcccgggtggtgttcggtcacaggagtttttgtccaatcccttgtcaacatagtgtggttacagctcgagacttttattgtgctgtgattctttcttttcttattacattatttccgttacacggcggacacaccattatacgtgaaacatgatacacaccactgcgcatgcaacaccacgctcacacttccacgagtgcgtctcttcacacacgctcagagagataaaaactggctgtatatttatgatcacactaaatcctattgatatttacttacgtacgcgtaatatttatgggtagcaagatttgaaccctaatgggtaaagtcatgcactcactaatgactctatcaccaccccgtgctttccttactgtgtagtgattctcgtggcatcatgtctcgatgtttttatgtttatacttggagcacatcctttagtgacataaccttttattgcacactccaccgaaaaccaactatcacatgttcattcttttcaaacactagcgaagtgacaattctttcgtgataggtgatacccctcgagaatcataccatggtccattcttgatgctaccaccaataaattatgagagaatttcttttatgtccaagtcttcgctgctcataatatttctatcaccattatacttacaagagtgaggaagagatgcgggcgacggcggcacgagaggaagacaaaggcggaggcgaaggcggcgatgcgaggcagaggtgacggcgtgagaagaaagcggatacgacagcggcggcgagagaggtaaagggcgagatgacatggaagaggggatgcgggcggcggtggcgcgaggggaagacgaaggcggacgcggaggcggagacggcggcgcgaaacgatactgacggcaccagacagaggtggcggcacgagaggaaagcaaaggcggcggcggcaagagagggagagagcaagagacaacggctagggttttggatctgtgagagccactttgcgaaaaaaaaaccttcagttttgacaattttaagcacagcccttattcacttttttctcttcttcgtgacgaatatctggtttatgtaagggcttaaacgtaaaatatcagttcaaagactgtttgggagggacttagatcgaattaaactcaaactaaagggttttttcgtaaaacttcaagcgcgtactgttcctatcctacgtggatactggatagcgcgtctgcgcgcctaaccggacagccttgaagagtaaattttcatatatttttttttacccacgagtctcaaaatgccctctcgcttgtgaataagtgttgccataaaaatcatgatcctcaaagtgaaaacgagttcaacttaaaattatttgacccttaatttaaggaaaaaccagttcgaaaagcattaaaagttccctttttgattttatagtaccagaagttctcaactcaggggcaacccacattgaaggtatatacaatggtacaacctagtataggctcctaattaaaacacattagttatagattggcttttgagacaacatagcctgcacaaaaaaaaattacttttctttcctcttctctacctccatggaacaaaatttccttcattcaatgttaagagtcgatcttgagttgagttggtgtcatgcgtatgaaagggtcaattaggcctagaggggggtaaataggctaatttacaacttaagaaatgcggaagcagtaattttcagaactaggctgggaattttcggaacttccgaaaggattttcggaacttccgaaaatgcacagagcaatgcacacaaaagaaaaatctagatctagaagtctattacagggaatacaaggcacaatcagcaactagaccaatagtggcacaagcaagcaaagctagaggagagggataaagaaatatcaccaagatgtagctcccaaagttgttcccggagttcaaatccttgaggggattctactctccgttgaggagctcactaagagccgggtctttgctaaccctttcctcaagaggttgtactaagtactcctccttccactaagaggtatatcttcccttgcggaggcgagatccggccttcacaaacttctcccggccaaccacaggtagatcggtggctcgggagtgacacctagccgtctaggagtcctcaacctccaagagtaaaagatgatgtaaagaactcccggagatgatgcaagtgctcacaaatcttcacaaagaccacaagtagcatccacacaaactcgaatccacactctcacacacacacaccaaatctgaatcaaacacgagtggagagatgaatcgaggaagcaaggctcaaatgaactagagaaagagagcaagcaaagggcacaaataattggaatagaaccagcagccctcacaagtgaggggaggtgggtatttatacccacagcacaaatctgcccattggagtgcaataaaagtaattttcggaacttccgaaacaattttcggaacttccgaaaattccagatctgagaaaaaaatcgaagtcaacgcaatttttggaacttccgaaaaacattttcggaacttccgaaaatttccagaacgcttctgtgtattttcggaacttccaaaaatttccagagagctctcaaacggttctgtgtattttcggaacttccgaaaatttccagaacgctcaaaaacggttatgtgtattttcggaacttccgaaaattcttttcggaacttccaaaaattttcagaacgctccaaaagagaaatgcttcgaagaaaaattgattttgagcacacgcgtcactccttatatgtctatgcatcatcctccttaatagtacagctttcctacgacacaatgcgaggaaaaagatacaatatactatttgatcattgccgcattgcatcgcgatgtcgcattcacgggatatgcattgtattacaacacgttgaggacttaacaaacttcacatttgcttgaataaaaatgttagtcctctctaattgtattgtaatcaatcatcaaaatcattaggggcctagatgcactttcagcgtagcaacaatgtttctctttctcctatctctctctttcatgttaccaaatttacttagatggcaacaaagagagcccgctaataaagatcgttgtatatgatgaaagtgaatgacttacaacaataggatgctcctgtcatcaagttcatcaagcgccgcccttgagcctatctggcggttgcctatgcaccgtcacaataccataacttcgcctatgaaacttgacgaaaaatgttgttccaatacatatcttgctggctagctaaccaatcttgattttatgtataaaaatgtgcacatgcaaattcaaaatgacaattaagtgttttaagaaaaacgaggtgattttaacgtatgattaattgaattttaattattacaaacttgaaaaatagattaatatgatattttagagtaacttttatattaaaagttttcgcacgaaacacaccgtttagcagtttaaaaagcgtgccacgagtatccaaattttcatcccattttttagtggaaacgaacgggaccgaaagctcatctgcttcaatacctgttggcacccctaagcttacacaggcgcaccatcatacacgagctcatcgattgcacctgatcgaactcacttggacacgtcgtcctgtagctcatctactagcaccctcaatctcatctatttgtgctgcccatgagctcaccctcctgccctttctacaactcttcaatggagctcatttgctgtggtacgttaaggaggaagacatggtcacgctgtgggaagtaatggtagtttgaatagaatgctaaaatgagtattagagggaactttcgatactactaaagctaaaatggactttttttccctataaaactaaagtgggaatgtttggcgttgtagaaccaattatccccaagttaaaaactgaaatttaactattcaaatgaactatgatcaaattttacgaaaatttagaagacacttgaccccttagtggaattttcttgaaatttggttgaagttgataaaaattacatatttttgtttctagtagaggaaaaagggagataaaggtgttttgtctaattcccctatgaaaatttatcaaatttgattgtacaatgaaatttctcataatttatatatatccaaccatattatgatgaatgaatattgcatgattatacccatatagcataatcaataagtttattattgaagtgtggttaaagtttaaatataaatggtggcgtcagatgacaagtttcgtaaaaggaggtagtaattagttgaaaagttcagtttagaaaaataaatactagttttgttgttaaaataagtggttgtcctaggtttgccggattgcttgattgcaacaagcagcaactgtgctattctccagatcccagtgacatggcatttcatttcgccaatgctctatgcttcacatatggctctcaagtaccaccatcatgtcagcatgtcacgaagtcccattgccagtggccgcaccaatggttagcagttgctctgcctctacacaccaaatgcaccatcattagtcgtctcctctcacgactacctcatccgctagtatgcccatgattatgtgctcacgaatcagttagtcgcaaattaaagctagctcacatacttgttgcatcctcacccgtgattgaggatgcgtggcacacacaaaaggagaagatgcaacaaccaattaaggtgatgttggcctgcaatgctgacgggaaactatttttcgttttaatagtctattatagtgttggttcaaatagatctactaatgcccagtacaaagaaaaatatgtaacataggatatagattaagatatgcccatatctccaaacaaatatttaacacactttgttcaacttcacaggcatccaaaataattaaactaataaatattataagtaacaaactatattatatttgggtaaaatggccctaaggtttatagtattaggttgtaacttcatcaaatatctcaacaccttaaaatccaaataaccaatactccctccatcccattttaagtgcgacaagtttccgcgcccaactttgataattcgtcttatttaaaattttttataattagtatttttattattatgagatgataaagtatgaatagtactttatacataacttatgcttttaatttttttttaaatttttttcaaataagatagatggtcaaagttgtgtaaaaaaatcatggctgcacttaaatggaacggatggagtaccttttaaccatttttaattcaatggatagtaatgctgatgtattcacattagtttcactagaaaattattattttttcaacgtaccaggtacattcaacacatgtttttgatctcacatacaaaggctaacatccaacggagcaattttacaagaaacaatctgcttccgcccaatacttttataaaaaaacccctagcaaagctttccttttcttctcctgtaaccaccttaaatatggatccctcccacgacgatagcgataaggaagttacttaattacagcgacaacaccaccccatttaatgtgtttctttttggagtctaacagatgacgaggttggaaacctaaccgcgatggcaaaagcaggataaatgcgcgctgttcaatactacatttgtctcaaaataagtgcagccgtaaaaatccgtgtccaatattttactgtccgtcttatttaaaaaatttatgaaaaaatttaaaaaaaatagtcatacataaagtactttttatgttttatcatctaataacaataaaaatagtaatcataatttttttttaaataagacgaacgatcaaacgttggggataaataatacaaaactgtatttattttgggacgaaggtagtagcgttttacaggagtctgatttggtcgatcgcatggcaattggcaaccgatcgctcatcgcctattgctaaccaaaaaaaaataaaaaaataaaaaggaatttctaccacagcagtttttgtgctgggcttgggccaaccgagccgagcaactgagcagctagccatggcccatgggccggccatggcgggccgcggcgcgagcggcatgctcgccacctcgcctcgctcccccacgtgtcaccgcttcctcccaccttttccattttttttctctctctctctctctctctcttctccctccccaagcaaagcatcggcatctctcctccctaaaaccccacctcccgtctccccggggcggcggagccgatgagatcccggccatggcgggccccacctcgcgccgcctcctcctcctcgtcgcccgccgcgctggtcacctctgccgccaccaccaccaccaccaccaccgcgacggactcgtcctggcccgctcgctccaggccgctgccgctgccgccgcctagtcgccaccaccgcttcccgcctcgcccccggccaggaggtaatcgaatcccacaggcgcttgatctctgagccgccaccatcgcgtcgttctccctaggtcgcaaacccgttatctaccgagagcaggtccattttaggttcttatactacatcgaagtaattgtattcttaacaatttgcactaacggggaggagagaagtgggagatacactagcaaaaatgcacaatgacagcactgatttgcggagccattttgtaacgattattgggataatagcagagaactatttttgcttctcacaagttacaactatcaagttttctctgcctgtgcaatcatgtactagccatgcacgcatctgtttcttggttgtgtgatagtttggagtcatcgttgtcaatccattttaatcttacataccatgtactgtattagataacactgcataaatcataataggcgaagcaaacattttgcaccgtaatggtgctgaatttagctattttaaatgtagcaaacttttaaccatatcagctttctggctgattccttctactttctaagctctcttatgtttgcattgtcatacttgtgttttgcctccatgagtacaacttgatacagttcaactcgctaattcaaccagtcgtaagttatgtaaccatccaatcacgtataagtgcaatatgcactgttttacaaagatcttcaacaaatggctacaccgttgtgctcaatatcactatgaatcaatatgtgttctccctggctctatcttaagtctgaactgaaatttcttcatttgggtaaagtatgtttgcctactcatctcaaccttaattaccacccattgtatgaggtagctgtgaggcaaacgttttgtaccttagtggtgctggatttgtctattttaattatccttatgctagaacgatttgtggcttattccttccaacttttaacttatctagcatacttttgttttgcctccattgacataccttgatacagttctattcgcatgttggaccattgtaagttatttaatcatctggtcacttataagtgcatcaacatataaggtattgctcagatctccaataattcttttcataccaatatatccaataatgactatacactgccacgctcaatcatcactctgaagcaaagttttactccctcagcttgtctaagctcagctgaatgttctccatttgataatccaaatgctcatgccatttcaaagttctttttttttcaggaacatcaagttgaataagtgagtagatatattgttcttaggaggtttattttctgttttgtagcttttctagtgcattctcaagtgttcatggggagagaccgtcctcagaatatgcaaagatcagaaaggagtcgttagaaagccagtttggaaggatcttgggttcaagctcacgtacactatttgcagatcgtggctttggtccattccttgcaatgtacagggcagcaattatctcttttcatgttatgaagctcactatttggcatttattgctcagtgatgtgcacaaacgggctgagaaggtatttcttttctgcctttcttcctactctaagggtgtgttcggctgccctatttcagctgtgatacagccattttgcacagtaatttgtgtcactacaaacagctgtgtgactgtgttgcagcggctggccggctgcaacgtgcagccgaacacaccctaactctctacgagtacttgttatactttgagtttcatgtatctggttttcattttactcatttcagttccaggagaccttgatccggttggggcctttttacatcaaggtaggtcagagcaatgcattttaataaatgaccaacattacaatgtatctttactgtaacagatattcttatgcttattt

SEQ ID NO: 7294 - DNA, 1114 bp, Oryza sativa
aacgtcttcgagaaaccgcggattgacgaaacggccgaaacctacgcggcaaccaaagcacacaagcaaaacatgctataagactactgaaacaggaaacaaaaccatttttaatggattctttgcatttttcttgatttactgagacttgaatggacttaaatggagctcggatgaattacttatgaattttagaagataaactgtgtttttactaataaagaaaaagtccttaattaattattgcgcaataatacccagggctgacgtcatccagggggggcggcgccgacaggcggggcccacgggtcagcggctcaaaggggagaggaagggggcgccggcatgtgggccccacgggcagtggctcaaggtggccggtctaccgtggaccgggaccacgcgggtggtccaccgccggtccggattggccaggaggccgatcggacggcatggcggcggctaggcacggctcggctcggcttcaaaaccggccggccggccatggcaaccggcggcgacgcgcacggttttggcggcggttgccgtcgtggggcgggcggttggaggaaggggacgacctgacaggtgggccccacctgtcagcgtcccggagagaggggaaaggggaacgggccagcccaaaggaaggaggccgagcgcgggagggagtgggccgacggcccaatagagaaaaagaaggaaaagaaaaagaaaagaagaaaggatttttcctgggatttaaaattgcactttggtgatttttaattggttaaaattatttccaaggctctgaaaattccactaaaaatcttgttaatgcattggagcatggggaactcaagaaaaattccaccacgctatttccgattattaattgaatttattaactagggatttagctctaggttaattaagataatttcttcgggcaatttatttaaccaatttttaaagcaagaaaaggggggaaacttcagggtgtgacaaacctaccccccttaaacggaatctcgacctcgagattcggaagagctggcgaagaggtgcgggtgggtggcctttaactcatcttctctttcccaagtggcctcttcttctgagtgatgactcc

SEQ ID NO: 7295 - DNA, 7287 bp, Oryza sativa
ttagatttgcataacaaacattttttaaaataataacagacaaacaccatggtattcactatttagtgcttaaaaaaagaatccagggtatttcgatcacaaaatttctagtaattccaagaaaatttccggaaagtttccgaccgattccgagttccgacggaaactacccttatcatttccgattccatttccgagaaaatatttccaaattcgtttccgtttctgaaaaattccgaccgacagattccgttttcaaaaataggtctggaattcggaaagtttccgtaccgttttcacccctagtaattggtaagtattatttcttttcttttcaacgtgagtgtatacaagtatagattagtcaggattaaagattcctacttactccgtttaactatgtaagacttctatataaatgtgggtgatggtagaaagtcttacattatgaaacggggggagtaatagttacgctttaaatacaattttcaatctgccaaagtccatgtattcgtgcgtgctttccattggttcagccgatgattgcgcggagaaaaggtcaaactgggtgaaatatacttaatcacactattatgataagctgtgctcattggcaagcactcatgggccctgtttggaagattagcccagggctaattttgagagctaatgtttagtcatgaattggtaggctaaacattagcctaacatgatatgtttggatccataggctaattcaagactaaaaggtggagagagagtagaaagagatgagagagaaggagagagagagagctgcttttttatggtccccacacaaaattagccctattagcactctttggaggggctaatgttttgaggggggctaattcacattagctcaaaattagtccacctgtttggatccttgagggctaatttgagactaaaagatgagagctgaacattagcctatggaaccaaacagggcctggtagcctggtacacatggcgatcgaggaaatttggtggttagtgccacgccttcgagtacccatagtcccgtatcatgatgtacgcaccgatttggcatgataatatagttaatgtgttcagcatttttgcctcctttaattccgccgtccaagtccataagaatggtttgcaacacgctttggtatgaccaagaagagatgtacactattccagcattaactcatactccttacgtactagtaaaggaagtcgtttaggacagcggcatggtctccaaaacacaactttgacttcttgtttctataaaaatatttattgaaaagtgatatatgtatacttttatgaaagtatttttcaagacaaatctatacatataatttttacatttttaaactcaacaacttgagagttatttatgatttatattcccaaggtttgacttaaacattgtcctaaataactttctttatgagtacggagggagtattccattatttctataaaaaaaacttctagccgcatcataactagaaattggatttttataggatggagggagtagtcacgtacttatatacagccgcacctgagcgttgacatcctgcatcctgtgctcaacatgaaactgatttgattttggagaaggaatgtcagatttgatctcgtgtgccacactggaaactggacaaaattttgtctactagctgaagttttcatttggacccgaaacatttttttgctcaggaaaggaaaatggaacaaagtagagtccacagtgtccactgcattggtatgtgggatgaacttgctgtgctttgcaaggtttagaagaatatataaacctactcacctgcgtacgtgttgatggcagaggcataaaacaaccatttctgtctggaatagttggcaaggatcattcctgagtccaaacgctccagcgttgaggtctgaccaagataagaagattatttattattcagataacctatcatatttctcgaggcttgtttcaggctaaacacaacgtcgtcagttgacaaggtctgatttctaaacagcaactgaagctgcttgcaggaccatcatctgcttcaatcccactcttccctcagtcctccaccacgccttccccttgttcatcatctgcttcctcatgcctctccttcatcatgtcctccttggcttcctcctcatcctcctctacctacggactccgacgagctctaccgccacggacaccgtgtctcccggccacgcactcgtcggcagcgacaggcttgtctccaacaacgggaagttcgcgctcggcttcttcaagccaggcaatgagtcctacaccaaccacaattcctaccttggcatatggttcaacaaggtccccaagctaaccccactgtggactgccaacggtaataacccggtggtggaccccacttcaccggagctcgcaatatccggtgatggaaacttggccatcttggatcatgccaccaagtcgatcatatggtccacccatgccaacatcactgccaaggacaccattgccatactgttgaacaacgggaatcttgtcctacgaagctcctcaaattcatccataatcttctggcagagcttcgactacccaacagatacacttttccccagtgcgaagattggctgggacaaggtcaccggcctgaaccgtcgtcttgtttctaggaagaactcgattgatcaagctcctggtatatactccttggagttagggcccaatggggatggtcatctgctatggaactcaaccatagcgtattggtccagcggacagtggaacggccgatattttggcctaacaccggagatgacaggcgctctcatgccgaatttcacatttttttacaatgaccaagaggcttacttcatatacaccttggataatgacacagcgatcatgcacactggaatagatgtcttcgggagaggtttcgcgggtacgtggctggaagggtcacaagactggctgatacattacaggcagccgatagttcattgtgatgtgtatgcaatctgtggaccattcacaatctgcgacgacaataaggatccgaaccttctgcgactgtatgaagggcttctctgtaagatcaccaaaggactgggagcttgacaatcgaacaggagggtgcatcaggaatactccgttaagttgtggcagtagaacggacagaacaggcctcacagataaattctaccctgtgcaaagtattaggttgcctcacagtgccgaaaatgtgaaggttgctaccagtgcagatgaatgctcacaggcatgcttgagcaactgctcctgtactgcttattcctatgggaaaagtggctgctctgtttggcatgatgagttgtacaatgtaaagcaactatctgattcttcttctgatggaaacggggaagttctttacattcgccttgctgcgaaagagttgcaaagtttagaaaggaagaagagtggaaaaataactggcgttaccattggtgcaagcaccggtggcgctttgcttttgattatccttctattgatagtttggagaaggaaagggaaatggtttactctcacactggaaaagcctgaggttggcgttgggatcattgcatttagatatattgatttgcaacgggcaactaaaaacttttctaagaagttggggggaggcagttttggttctgtatttagagcaatgctccggtgctttctaccggtagtatatactaccagtagaactaatctgaaccgtttatttttaagggtagattagtaaagtactgaggtagatttgggataaatttggcacttaatttatttttgtcgtggatcgctcggatgtttctggaaaagcagtgctgccaccgcttcctcatccatcgcaatcgagcggaggtggagagagcgactccttccgccgccggcgcttgtgcatcacgttcccttccgccggtggcaatactctccggcgccccctcttgttcagttccccttctctgccggcgtctacccgcttccccgccgcaggagcttctggtgccaccctgaagacttccggcgtgcgcacaggggcagcggtgcagaggagccccgcgtggttccacctcctctcgcacgacaccgccggcggtggtggcagccgcgacgacggctacaggcgtgcgtggagccggctgttgaggaggctggtgcaggagagcatgagcttctgtagcctcagcatcagcaggcacggtaatgttaattttcgtggatgacttcaccagaatcaagaatctgattctgaatctgaatcaagaatttaatttggagatggacagtatgctctattgctataccagaatcaagaatctgaatttgctatgaaaagaagtagctcaacttctgtgagcctgatccattaaatttgtgctttgcttcctctttacccaagctaatgtaatgtgaataggcccatcttgttggaattctgcgtgaaacccattccagcaatccagtccacgaaggcttccccttgcgagtcgtcacggcggcgagcgggtggcggtggcgccatggatggccagcaggaggagcagcacgcagggcggcggcagctgaagcccgggaaagacaaaagtatccctccgcaaatatttttttttggacaaaaatatccctccacaattctactaccattaagtgtgatggtagtagaaatagatctgaaccctatgatcaaatgagatcaacggttcagattattttctactacaattagagggcaccggagtgggtatcctgtatttaagggctacctaagcaactctaccatagcagtgaaaaggcttgatggtgcccgtcaaggagagaagcagttcagggctgaagtgaattcaattggaatcatccaacgtattaacttagttaaattggtcgggttttgttgcgaaggtgataataggttacttgtgtatgaatacatgccaaacagctcccttgatgtgtgtttattcaaggctaatgatatagttttggattggactactagatatcaaatagctattggagttgccagaggccttgcctacttgcatactagttgtcgggattgcatcatacattgtgacatcaagccagagaatatacttctggatgcatcttatgtgcctaaaattgcagattttggaatggcaaagattttggggagagaatttagccgtgctatgactacaatgagaggaacttttggatatctggctcctgaatggattagtggaacagttgttacatctaaagtagatgtttacagctacgggatggttttttttgagatcatatcaggaagaaggaactcaagtcatgaaaatttcagggatggtgattattcattcttttttcccatgcaagctgcacgcaagcttctcaatggagacgttggaagtcttgtggatgccagtttggaaggcagtgtgaacctcgttgaggttgaaagagcttgcaaaattgcatgctggtgtattcaagataacaaatttgatcgaccaacaatgggcgaggtggtacagtctcttgagggtctacttgaactcgacatgcctccattaccaagactactaaatgctatcacaggaggctcacatccagtgacaccacaatattttgattcactataaatctgtatgttgatttgcaatttccagttgtctgacagaacattataattcatcttgccttttaagaaaactaggtataacatgtaagatctctaggagatcatgtcttatactcgtattaaataaactcagtaccgtaacatgtaattaagatctctgtacccaagaaggagattgtgccagccttattaacaaattatagttggtgtctatgtagtatctttaggtattagtgtaccgtatacacttttcatgttgccaattgagatgttttcagaaatacaggggcgattgcctcgtcagttgatagtggattgtgagcctaacattggcaaatgtgtgacagcctgacagttctgctcatgttatgcaaacatggcctatatgtggcctatacatacaagggaaaattgttcactggcaaacaaaagggagaagcctggctgctaacctgcaacttgttttttcaagggtagccacattcttaaactacaacacaagaactttgcaagacggagtagctcataggttgtaacactaactacctgaactgcaaggaattcaagctgtggcgtaccgtactgtggttaccaatcactgaaggttgataatggatgagcacgtttgattgtctcatgttcttcatgtacagttgttgctgctgttgatagttgcggtttataggccgttccatccaccagaggcaacctgtatacttcatcagtttccatcaaaacttaactggttattgatctgaggaaggtaagtgccaagatactgatagaacatagggcctgtttggtagagcttcaagaggtggagctggaggtggagctgtgacaaacagacccataatagaagaatagaactgctgctgctatatattttttacaggaaaggttgaaaagcttttttgaaagcataagagccttacaggtttactgctgggggctccagcttgtctatacatcacagggcaccgacatccccaaagcacctgcatgctcaaagctacattatagacatcacaaaacacctggctaaggctaaagtgacaaccacaaataaactttcaccaaagactgatgtcaacccactccagatcttgatagtcctcaaattttgtccagtgccttggatcaccatgatcagagcttccatttcttctgcttcagatgacttcagtaagatcttccattgcataaggaacagaattcgaaaaacaattattaggggtgaatgtaaactttctctctaaacataatgtcattcctgaataaccacaactgccaacagccaacacacatacaagaattctatttcttttacgcccagctctcccaataacaaggtgaaagaaatgatcaaaagagaaaggagaactttgccaacccaaagcatcgctaataacacaccatttgctgcagatcaactggagataatatgttgcgaatcctccagcacttgcatagcatgcaatgttctgaaccctcctaatttcttttttttttcaattgtacagcagactggattctatctctactagccaaccgtagaaagtgttagggcaaggagctctataatttccatccctttactataatgtacccccctaaatgtcaaagcatacac

SEQ ID NO: 7296 - DNA, 9485 bp, Oryza sativa
  unsure (1)..(9485): unsure at all n locations
cgggccgtccgcgaggagcgagcggcgccggcgacagttagctagagcggtgacggccgtgggctggagctgaagcggcgggctgagtgccatgtcgcgccgctcaccgttcctctcacaccaccaccacccgcacctcccgccgaggaggtcacctcacgccgtcacccgagaaggtcacctcacgccgtccaccgagaagagaagcgccatgatccggtcgccgccgtcgccgcttcctctcgtcctccctctgccacaagccgccgccgccctcgcccgcccgtcctcccgccgccgcccgctccctatgtcctcccactgccacaagccgtcgtcgccctcccccgcccgccctccctccaccgccgccgactcccgcccgccggcccccgtccctcagccaccgctcgcactgttgccggctcccctcgtcctcccactgccacgagccgccgccctcacctgcccgccctcccgcccgccggttacggcgtcgaagacctagtcggcggccgccgagctcgccgtaccccgccacatgtgcctcccgcagtcgctgatgtggtcttcgccgcagtgcagctcagcccgggcgccgccgtctccacccgccgcgggagagagagggagcggcgaggagagagaaggaactgagggagggggagaaaaaagggacacatgggtcctacaatctattttatgtgtcaatgacaaatgggtcccacacatattttttaattctaaatgccacctaaacaccacgtcaacgtcacgtgtaaaggagacccggtcaatactgccacgtcagcgaaaccgtcctccaaaaccgttgagggagtcaaattgcaccggttccatagtttagaggtaagatattcggttttgtggtttagggtcatggattagatttcaattacttttgagggtcaccaagtgaacttattccttgttgcagtggctgcatcagtgcagcccagcccagcccagcgatgcgccctctctgtggaaatcacgagcgttccatcagtaatatgaggtatgtagattaagtagatgtgcgtaaaatgggaaagttattagcacataattaattaagttttaattattataaacttataaataaatgtatttaatattttaaaacaacttttttataagaaagtttttcatgaaatgctccctttaatagttaaaaaggcgtgctaacagaaactgagataaaatctaaatcttataatcagaaaataacagggccacttgaaccgattatcgcgcggagaaaggtcaaactggataaaatactcaacgacaggctgaaatcattagcaagcacttctgttacacatggtgatcaaggaaatttggtggccttcgagcacccatgattacgcaacgattttcacatgataacatagctagggcccctttgatttggaggaaaaacataggaattttagggcccctttgattcgtaggaaaagtttaggaaatttgaaggatttcaatctaatggaaaaaattcctatgaaaacatttgaaacaaaggattgaatcctataatatcctttaaaattcctatggaatgggtaatcatagagagattttgtaggaaagttagcaagaggtccaacctcttggaaaaattcctttgagcctatctctctcatccgaatcctgcgtttttcctttggttcaatcaaacgatcattcctatgtttttcaatcctttgttttacacctgcattcctgtcagaatcctacgtttttcctattcctccgtttttaccttcctgcgattcaaaggggcccttagaggatttcaatcctataggaaaattttctatgaagccttttgaaacaaaggattgaatactatccaatcctttgaaattcctatggaatggacaatcctatagagattttggaggaaatttagcaagagcttcaacctcttgctaactttcctttaagtctatctctctcatccaattcctatatttttcctgtggttcaatcaaacggtcattcctgtgtttttcctattcctacgttttctcaatcctacgattcaaagggcccttaagagcatccccagcagctcgtccaaatttgatcatccatatggctatatagatggtcatccaaaaaagattcctccttcatatttctccccatatttctccccactccaacagatcatccatattacatcatctatatcacatcctcctatatattaatagtatccttcaactaccatcaattaatattatttttttcttttttcatcattatcttctctttcactcccttctctcactccagagagctcgagagacacgagctggcggaggagcggaggggcgacacgagcggctcgccgccggccggagcggagggtcggcgcaggcgaagggtcagcgcgagcggctcgccgccggccggatcggaggggcggcgcggggggctcgccgccagccggagcggaggggcgcgcgaacggctcgccgacagccggacaaagtggcggcggcagcggaaaggcgacgcggccgaaggtaccttcactcgatctaccttcactgcttcacctcttcctcgatctcgatccggatggggacgggagaacaaatggcagcggtggttgcgggatggcgtgaggagagagaaacaccaaatctagcgtttctctctccgggaatagcgcatgcgccatctatggaggcccatatggcgtatccgttggagccggattttctccccccatacgccatttcctggatggaagatgggatgccggaactgctgggatgctctaaaggccaaagtcaatgtgctaaccatttttttcgtttttgcctccattaattccggtgtcccactgatcggttttcaacacgcttgtctgcaagccccagccacagttctgttccctttcacgcccttttctcagcaaacacatactacaggcgtacagccgcacaccctgagaaatatatgctccaacaagtcctcctcaatatacaaatgaacctgatgacattatttggaggggatcgatcagccaaatggggaataatactctgcaagacgtacaaatacaacatgcgatttcaaggcacaatcaagttacaacaaattcaatgttctctggcaatctgaagcccaaccgaaacatgtcagactcgttgggtggctcctgactcatcaggcgtacaaggtcaatcaattcctatgcttgcttcgtttcagaaattcttgcatcttacatccctcggtcatggtctgtgcttaaaatcagaccgatttgcttttggagaaggaatgtcggatttgatcatactggaaactagactaaaaattctgtctcctaactgaagttttcatttggacctgaaaccatttcttggtcaagaaaaaaaattggaacaaagtaaatccactgcattggtgtgaggaaagaacttccagtgttttgcaatgttttaaaaggagttcacttaaaataatatacctactaacctgcgtgttgatggcagaggcataaaacaaccttttctgtctgaaatagttggcagggatcatttctcagtccaaacgctccagcgttgaggtttgaccaacatgagaagattattattcagatagcttatcatacttctcgaggtttgtttcaggctaaacacgatgtcgtcagttgacatggacttagtgattgagacaaagtgcccacaccaccacgttaacttgccaatctgcgagctgaactaatcgctggtctgatttctaaacaacaacagaaccggcttgcagaatcgtactgtgtgtgagctagcttcaataccattcctccttcagttctccacttctccttcccttgttcatcatctgcttccacatgcctctccttcgtcatgtccttcttggcatcgtactcctcttcctgcacactctggcgagctccgccgcgacagataccgtgtcacccagccaagcacttgccggcagcaacaggcttgtctccaacaacagcaagtttgctctcggcttcttgaagccaggtaatgagtcctacaacaaccacaactcttaccttggcatatggttcaacaaggtccccaaacttaccctgctgtggaccgccaacggcgataacccagtggtggaccccacttcaccggagctcacgatctctggtgatggaaacctggccatcctggatcatgccaccaaatccatcatatggtctacccgtgccaacatcacaaccaatgacaccattgccgtgcttctgaacaatggcaaccttgtcctacgaagctcctcaaactcgtccaagatcttttggcagagcttcgactacccaacagatacgcttttcgccggtgcgaagattggctgggacaaggtcaccggcctgaaccgccgtattgtttctaggaagaattcgattgaccaggccccaggtatgtactcattggaggtggggctcaatggggatgggcatctgctatggaactcaactgtgccatataagtccagcggggactggaatggccgatactttggcttagcaccagagatgattggagttgcattgccaaatttcacatttgtttacaatgaccaagaggcttacttcacatacaccttgcgtgatgacacagcgatcgtgcacactggaatagatgtcttcgggagaggtttcgcgggtacgtggctggaagggtcacaagactggctgatacattacaggcagccgatagttcattgtgatgtgtttgcaatctgtggacctttcacaatctgcgacgacaaaaaggatccgaataacaacccattctgcgactgtatgaagggcttctctgtaaaatcaccgaaggattgggagcttgatgatcgaacaggagggtgcatgaggaatactccgttaagttgtggcagtagcaaggacaggtcagacctcacagataagttctaccctatgcaaagcattaggttgcctaacaacgccgaaaatgtgcaggctgctaccagtggagatcaatgctcacaggtttgcttgagcaactgttcctgtactgcatattcctatggggaagatggctgctccatttggcatgatgagttgtataatgtaaagcaactgttggatgctgcttctgatggaaatggggtagtcctttacgttcgccttgctgcaaaagaattgcaaatttcagaaaggaagaagagtggaacattaattggtgttgccattggtgcaagcacaggcactttgtttcttattacccttctactgatactatggaggataaaagggaaatggattattgctcacccactggaaaagtctgaggatagcattgggatcattgcatttcgacatattgatttgcgacgtgcaactaaaaacttttcagagaaattggggggaggaagttttggttctgtatttaaagggaacctaagcgactctaccatagcagtgaaaaggctcgatggagcccgtcagggagagaaacaattcagggctgaagtgaattcaattggaatcatccagcatattaacttagttaaattggtcgggttttgttgcgaaggtgataataggttacttgtgtatgaatacatgccaaactgctcccttgatgtgtgtttattcaaggctaatgatatagttttggattggacaactagatatcaaatagctattggagttgccagaggccttgcctacttgcatactagttgtcgggattgcatcatacattgtgacatcaagccagagaatatacttctggatgcatcttatgtgcctaaaattgcagattttggaatggcgaagattttggggagagaatttagccgtgctatgactacaatgagaggaactattggatatctggctcctgaatggattagtggaacagttgttacatcaaaagtagatgtttacagctacgggatggttttgtttgagatcatatcaggaaggaggaactcgagtcatgaaaatttcagggatggtgattattcattcttttttcccatgcaagctgcacgcaagcttttcgatggagacgttggaagtcttgtggatgctagtttggaaggcagtgtgaacctcgttgaggttgaaaaggcttgcaaaattgcatgctggtgtattcaagataccaaatttgatcgaccaacaatgggcgaggtggtacagtctcttgagggtctacttgaactcgacatgcctccattaccaagactactaaatgctatcacaggaggctcacatccagtgacaccacaatattttgattcactataaatctgtatgttgatttgcaatttccagttgtctgacagaacattataattcatcttgccttttaagaaaactaggtataacatgtaagatctctaggagatcatgtcttatactcgtattaaataaactcagtaccgtaacatgtaattaagatctctgtacccaagaaggagattgtgccagccttattaacaaattatagttggtgtctatgtagtatctttaggtattagtgtaccgtatacacttttcatgttgccaattgagatgttttcagaaatacaggggcgattgcctcgtcagttgatagtggattgtgagcctaacattggcaaatgtgtgacagcctgacagttctgctcatgttatgcaaacatggcctatatgtggcctatacatacaagggaaaattgttcactggcaaacaaaagggagaagcctggctgctaacctgcaacttgttttttcaagggtagccacattcttaaactacaacacaagaactttgcaagacggagtagctcataggttgtaacactaactacctgaactgcaaggaattcaagctgtggcgtaccgtactgtggttaccaatcactgaaggttgataatggatgagcacgtttgattgtctcatgttcttcatgtacagttgttgctgctgttgatagttgcggtttataggccgttccatccaccagaggcaacctgtatacttcatcagtttccatcaaaacttaactggttattgatctgaggaaggtaagtgccaagatactgatagaacatagggcctgtttggtagagcttcaagaggtggagctggaggtggagctgtgacaaacagacccataatagaagaatagaactgctgctgctatatattttttacaggaaaggttgaaaagcttttttgaaagcataagagccttacaggtttactgctgggggctccagcttgtctatacatcacagggcaccgacatccccaaagcacctgcatgctcaaagctacattatagacatcacaaaacacctggctaaggctaaagtgacaaccacaaataaactttcaccaaagactgatgtcaacccactccagatcttgatagtcctcaaattttgtccagtgccttggatcaccatgatcagagcttccatttcttctgcttcagatgacttcagtaagatcttccattgcataaggaacagaattcgaaaaacaattattaggggtgaatgtaaactttctctctaaacataatgtcattcctgaataaccacaactgccaacagccaacacacatacagaattctatttcttttacgcccagctctcccaataacaaggtgaaagaaatgatcaaaagagaaaggagaactttgccaacccaaagcatcgctaataacacaccatttgctgcagatcaactggagataatatgttgcgaatcctccagcacttgcatagcatgcaatgttctgaaccctcctaatttcttttttttttcaattgtacagcagactggattctatctctactagccaaccgtagaaagtgttagggcaaggagctctataatttccatccctttactataatgtacccccctaaatgtcaaagcatacaccgtacagggacctggatgagtagcccttgttcctctccatgcccaggtcaaggtatctactccctcctgttgaggtgtcatctctattaccattctcaatccccaccatgcattcatctcttcactcccaaaagatcttctaaaagttaagcagttaatacctctctctagaatttcagccactaggatatctttgctggttgcaaatatcaaataaattaccaaaactaactctcagtggccaccgctatactcacaatcgatttaccggataggtacaatcgatttttcagcacctatattcacagcatttactggacaggtataattcctatgatattttttcccacagttctgcatcatttactgggtacctcttgtcaaatcaagattgcacccatctggctggaacggacacctcacaggattggataatgtattgtgcagttgtacggtaccaacaaccaaccacaaagattgaaacgatatctatcctacatacattcctactgatagtagcagttcttccacaatctaacgcagcacgaaattggtcgatcttctctagttcttccacaacctaacgcagcaggaaattggtcgatcttctctagttgcaaacgagcaataatggtggccgacctcgtgcagcacccataatcgaacaggagtacagttaagctactacgcgtgcagctaaatgcagggcaggttgcatcccccaaatatatatatactccctccgttttaaaatgtttgacaccgttgactttttantntntgtttgaccattcgtcttattcaaaaaattcaagtaattatttattcttttcatatcattggattcattgttaaatatattttcatatacacatataggtttacatttgaataacacaaatgggcaaacatgtgctaaaaagtcaacggtgtcaaacattttgaaacggagggagtatttgtgttccccttcagtgctctgatttctaccggaatcttcagcttttgcggcgaaagggagatcaggagatctattcgacgagatgttatccccccaccacaaaacgtagaagagcagagacaaaaaggagtaggaagtcgagaccttaccacggggagagagagagagagagagagatcccccgccgccgcgcgtgtgaccatctccgtcgagaatggcggcgccgccggcggccgctcgccgccccgaggttccgtcgtcatctcgcccacgacgccaacgaacggtgcggcccaaatgaaacgcggaaaagaggccatcggcgccgacccgacccggcctggcccggcccatcttcccttccaggcgaattttctgcgctcgcggcccatgctttgttgcaggtaataagttcacttggtgacccttaaaagtgatcgaaatctaatccgtgaccctaaactagaaaaccggatatcttgacccctaaactattgaaaccggtgtaatttgattccctcggcggttttggaggacggtttcgctgacgtggcgcttgcgtggc

SEQ ID NO: 7297 - DNA, 14577 bp, Oryza sativa
ccgccgaggcctacctcgtcggcctcttcgaggacaccaacctctgcgccatccacgccaagcgcgtcaccatcatgcccaaggacatccagctcgcccgccgcatcaggggcgagagggcttgatgccgttattgttcgagttcatggcttgttagatctagaagtgttaattaacccatggatctgtgttatcctgtaatcactcgcttgaattgggttcgcattgatggaatacaatctgttcttggcaaactgtgggatttgtttgtctgtttcgtgggttgtttgatgctagtatctgaagatggtagctaggcaatacgtttctgtcagtctgcatgtcgatgggtatgcggatgatttgggaatcaaccaccctatatttcattttatttgtaggcttgcagtggagccatgaaatttcatgtgtttggtaatttttctctttgattgtcagatattgcaattttttttttcagattttccttttgaagtaaaacactatacgaaagaatcctacagtgtcatattaataaatatataatatttacaaagtacaatttacaccaaaggtgattacaagttctctagccattgtttaacttttgggaaataagattgtttcgccctttggataaccacggcaaattcttgtcttaaagagaaactgatctgaagaagagaatttatgtttctgaagattctattgttcctccagatccagatactccatgccattgttatgactatctccatatactcaattttttcagattgaatgcagaaaaaggaaaatgctttatactaccagtgtgttttgggtcaattcgatcgacacattcactgttaccaaatctgatactaactgataagcactgaggactgatatgttatgggcttttggatcaattcttgggcttgttcttccgcgaagggccaactggccatgtctgaactcacaatccaaaaggaagacaattattaggagtatcaattatcataaccatccaaaaaaagatcatacgagggaagacttgcagaaggtttcagagcaatgatcactgtccgtcaccaactacccttcatcaaattgtttcataaaaacaaagactagcagtggactggtaccaggttacagctttgggattgtcggcaaagccagttcatacttcgccatgcggctccgaccatgtactgcaatcacacaaacagcgagaaaaaagaatatgagcattaaacaaaggctaatgcaggtgtgagcctgcgccccacaattgctttcatctgcacgactgactttaatttccctccagtaatcaaatcagtgggaatatttacaaccagtactccatatctatctatacacgtacagtagttgatgaactaagatgaccatatataggttcagtcctagttcatgctcacactctctgctctgttgagttacccaatttgaatagagtaaacttatctctacagtaaaggattcagatatctcaaactgtagatgtaaaaacaaaatgatttgaagaactaagaatgaagaaacttttaagaggcacaggggtatggcctcctgaggctctaaaaggttcaggcaaggaccatgtgaagttacaaccgatgccacattttctagtaggcagtcaggatccctggaccagcattccattcattgcactcatgaccaatcggcaatcgccatgcgagtccggggtaaatgattgatcaatattccagcacaagaataatatttgtcggattctcgatcacctttgctctagacaacaacttcatccctttcccaatgaaaaaaaaagaagaagatcactgtacactagacaacaaaaatatgtcatgccttttccaataaaaaaagaacccatgccatcctgctcaattccctgataacatttgctacccctttttctcatgtgctcctcaccatttcctaacacctatttaagtgccccaagtggcaagaaacttaagtatccattccaacattgtggcagctccctctgaaatcccctcttccaatcatatccaccagctcacagtttgtgatccactatgactatcctccttgtcattcttgggcttcatctctgcagcctacacctccctgcaatctctgctgcagcagacacgctctctcccggccaatcgatcgccggcgacgacaggctcgtctccagcaacggcaagttcgcgctcggcttcttcaacaccggcagtaagtcctctggaaatgacactctcagctactggtacctaggcatatggttcaacaaagtcccaaacaaaacccatgtttggatagcaaacaggggtagcccggtcacagatgcaacctcatcacatctcacaatctcccccgatggcaacctcgccatcgtaagccgagccgatagctccatcgtttggtctagccaagccaacatcacaagcaacaacaccgttgccgtgctcttggacaccggaaaccttgtactacaaagctcctcaaactcatcacacattttgtgggagagtttcgaccatccgaccgatgttttcctccccagtgcgaagattggtctcaacaagatcaccggcctaaaccgccgtatcttttcgagaagggatctagtagaccaatccccaagtgtgtactctatggagtttggacccaagggtggttaccagttggtatggaactcatcggtagaatactggtctagcggcgaatggaacggccggtacttcagcaggataccggagatggtagtcaagtcaccccattataccccattcattttccaaatcgaatatgtgaacaatgatcaagaggtgtacttcacataccgcatacacgatgaaaccataccactgtacaccgtgctagaagtaactgggcaaagaaaggccttggcctggttaaatgacacacagggttggcaagcagtcttcacccatccaaatgatcagtgtgaagttgctgctacctgtgggcctttcacaatctgcaatgacaacacatttccatcttgtagctgcatggaaggcttctccatagaatcacctgacagctgggaactaggagacagaacaggtgggtgcaggaggaacattccattagattgtgttagcagcagaagtgacatcttcaacgctgtaccggccactagattgccctacaatgcccatgccgtagaatccgtcacgactgcgggcgaatgcgagagtatttgccttggcaagtgctcttgcacggcatattcatttggtaattacaatggttgctccatatggcatggtaaattggttaatgtgaaacaacaaactgatgacagcacctctgctaatggagaaacacttcacattcgccttgctgctagagagcttcaagctagaaaaagcaataaagggttagttgtaggggttgttgtatctgcaagcctctctgctttgggtatcttaacacttgtcttgctactgatcatgatcaggaggcacagaaagaagttgcactgtcaagcattgaacagcatttatgctggtactggagttataccattcagatatagtgatttgcaacgtgcaactaaaaatttttcggagcaaattggggcaggtggttttggttctgtgttcaaggggttgttaaacgggtcaaccgctatagcagtgaaaaggcttgtctcctattgtcaagtggagaagcaattcagggctgaggtgagttccattggagtcattcatcacaccaatttggtcaaactgattggtttctcttgcaagggtgatgagaggttgcttgtttacgaatacatgtcgaatggctcccttgatactcatttattcagaagcaataacagtgtaaccctgaattggagtactagatatcagatagctcttggagttgctcgaggactggcttacttgcacgagagttgtcgagattgcatcatacattgcgatatcaagccacaaaacatacttctcgatgatttgttcgttccaaaaattgctgactttggaatggcaaagcttctaggaagggattttagtcgggttatgactacagcaagaggaactattggatatctagcacctgaatggtttagcggagtggctgtcacgccaaaagttgatgtgtatgcttatggaatggtactcttggaaattatatctggaaagatgaactcgcatagagagtctaatagttatgctgatcacatcgtttgtttccctcttgaagttgcacataagcttcttgagggggatgttctaagcttggttgatggcaaattaaatggcgatgtcaatgtcgaggaggctgaaagagcttgcaagcttgcatgttggtgcattcaagagaatgaacttgaccggccgacaatgggtaaggtggtccaaattcttgaaggtctactcgaacttgatttgcccccgatgccaaggctacttcagtctatagtacagagctcatggaaaacagagacccaacactgatttgtaatgccaaaagaagtgctaggataaaataatgtctttccatggcttttttgtggcatatgttggtatgaagagagttttagcttgtaatgccttgtgtgctatgttgatgattttggacatgttgtgccataagatgttatatgctccgtttataaacacgcagttacaagtgtacacaatttgctttatttgttttgctatatataatgatgcgcatgaatgatgtgaaatatttttcggtcgacccggcaaataaatgatgtgaaatacatatttactctaggcctctagcttaataaaaaatattccgcagcaaacacagagccataagccttatcagccttgcatggagacaatgctagtttcagggacctttcagaattctggtattgtactaggaaatattactctcttgagtcataaatatactctgtttgtactaggaaactttcagagcatgtcatttgattttttttagcttttctcaagaaagaatgttgtaggttttaaaaatactactttgaccacaattttatactccctccgacccaaaataagtgcagttttacactattcatgaccaatatttgaccgttcgtcttatttgaaaattttaaatgagtattattttttttattattagatgataaaacatgaatagtactttatgtgtgactaattttttttattttttttcataattttcaaataagacggacagtgatcaaacgtttggacacagatattcacggctgtacttatttgggacggatgtagtaccatattacaaaagtttgtaattaaaatattgcaagtttatagtataatcttctaaggtaaatctacctataacattttttatgtttttaaactaagcactttttaaaaataaaagtttgcaatgttgatctaatcaatgataggcgatgtacccgtcgacaacaacaaggtgcccgtgatgacttcgtcaatctcagatatgctggcttagtttttcggagatacacatagagatagagtgtgcatgtatacgtttataggaggtgagtgtgtgtatgttgcgagcgtctgacgtttgtattgtgtttctcagaaaaaaaaaatatgccagctaaccaaaacactctaccgcgtaaaaattagagtgcatgtggctgccgttctccccggtcttgtagcgttcatgtgttccatgctttccatgatcgatacatcgattcaaactaagctagttagagatggtacggtttttgtcacgccctgaagttcccctcccttgctctaaattcataaaataaatcgtccgaagaaattgtttaatttaacctagagagaaaccctaaagtaataaatgcaaataataatcggaatcggcatgtggaatttttcttgggttctacatgtcaaaatacgctaacaggatttttagtggaattttcagagccttggaaataattttaaccaattaaaataagcaaagtgcaatattaaatccctgggaaaatccttttttcctttttatctttcctttttccccctctttttcctcctttgggccgccggcccatctctcccgccccctcccgaagtccaggtcgcctccccctcactccctcgggcgctgacaggtggggcccacctgtcagccctttccctaacctccggcagccgccaccatccgccgccgaaaccgccgcccacgccgccgcttcctccgccttccgcgtcccgggccacgtcgcccactttccccgcgcgccccgccctccccgcgcccacgccccactcccgctcaccccccgcgcccgcgagatggccgggattcaaatttgaatcccgcctctctctctctcctcctccacctcctccactactccggcgaaattgcgccgttcccggccacgactcgccgccccctctccccttatttaagcatcgccggcaccccctctctctttttccccatttcgccgacccctcccgtgctccccatcgtccccgcgccgtgcaaccacccaccgccgcttcttcccgctactccggccgccgctagccgtcgctaggctcgccgccgtcttgcgccgtcgccgccgttcgattcgcgtggccgagatccaccccgtccacccctcctccgtcgaagttcgtcgccggagccctcatcccctcgcgcacgggtgagcaccacctccaccgccgccgtcggccatggtttccgatcgccgtggtccatctccctctctctaacccctcccaaccttttctctaggtcctcccggagcccgtcgccgtcgtcctcccgtctctcatcgttgctgttcgccgtcgctcctccctcgcgccggccgagcccctcggtgaggatcggtctccctctcttcctctctctccctttgccgcgccgcccgccgcgtagcgtcgccgctagggtcgctcgcgccgccgcttcggccgccgccgccgtctttgcgccgtctgccgccgcctcccgtcgccggttgccgtcgctggcaaccgtgcgcgcgcgccgccgccctcgccataaccggccggccggcttgaagccgagccgagccaggccgccttcctcctttccccgtgaaccgccgcccggtgggccccgcttgccagccgcgcccctcccgccttgtgccactgcccggtgggtcccgcctgccagccgcccctctccctctcttagtgtcactgacccgtgggtcccgcatgtcggcgccgccccaccccttggatgacgtcagccctggggcaatattgcgcaataaattgattaagggtttttctttattagtaaaaacacagataatcttctaaaaatcataactaattcatccgagctccgattaagtccattcaagtctcagtaaattcataaaaatgtgtagaatccattaaaaatggctttgttatctgtttcagtagtcttatagcatgttttgcttgtgtgctttgtttgtcgcgtagatttcggccgtttcgtcgatccgtggtttctcgaagacgttgctgtggttccatcagtgcgagagcaaggcaagtcatacattgcaattgatcatattgtacctaatttacaaatgtcccgcatttctattaaatattgcattgttttaccatatcatgtgggatgggtcctattactcagctatatgttgtttcccttatgccattgataacttgggtattaaaatgactagatgttggtttaggagatgcttagccatgcttagttcaactagtgcacaaaaggggacaacattaaagcatagacttgattattggcaatagctttggattagtgccaccgcaatggtgttggctaattaaaatacattacctggtgggctgtgggtgcatggttttgctagacgtgcccatggcgattaaggaccggttcgcgggatgccctggaagaatttatcgtacttaccacaagccagcgtgggcaacggctgggcttgtagtgtagcttttctctagccgacgtacccaggcgagggtgggcgtgatggagttgggtcggccggggtgtccggttgatcggctgccggattcaccgcggcacgaaaggggggctgcccgttgcctgctggggacgggggcgaaccctaaggtgtggtgcgatcggttagagggggttatgcgaagggtcctgtcacggcctctttccggtatgtcgtggtggcatgtcggcgcacgggaacgtgtcgtggggctgtgtcttgtgggtacagttgtacacctctgatcagagtaaaactattcgaatagccgtgcccgcggttatgggcggtcgaccagattcaccgtgattagtttcaccctagttagcttttggaactggttagttcaggtggtggtttgggcctgttgcaacgtggtgtaacgttggacagtgattggttaatatggattaattactacaactgttttactgctttcaactactgctttgaaatgccggctttatgcaaaagaacctttagcctcccttggatatatcttgcatcatacctcctcttccggtatgacttgctgagtacagtgggtagtactcagtcttgctctcttttcccccacaccagagttgaagtccttctcagttgaagatgtctcgaagaggttggtttcgtcgctgccgtcaaggatgcctgtggaatggagtcgcccactgcaggagtcaagtcttcaggcttagctcgcttttctctttttccgctgcatttgtaatcttttatatttttgtaagacgtggatctgtatgtcaacaattgtcgtttgtgtaccctggctggtcctggacaggggtttaatgcacattcagcttagaaattctggttcgtgaatttctgggcgtgacaagttggtatcagagccgaccttgaccgtaggacaagccaaatggaaaaacctaagagccctctgaatccttttcattgcatatattctttgcaattggatttgtttcgggaaaaatttggggttttgcctctttggtttgtgggaaaaatcttggtcgttcattcggatcggatccttaaaattagctcggtctagggttttagaaaaattttatttggagttatatttgatagtcagttgggaatttatcgggtgatatgcattaggtcgtgtctatgttcgatggggcaattttatgcgcatcattttccatgcaactagtttatgcattaagctatggtttagtcagtcgcattagtgtctttatccgggttcatgaaaaatgttctatgcataaaaatcatcatgctcggcaagttacttgagtcatttgttgctttatttaatttggttttgagcatgtgttggttcctatccctctgtactctttagatgtcagacctattctccgatcgcaagcgccgctccaagcttcagagtcgccgcccttagctttatcgtcttcttagtctgtttgcgtgctagtttttgtgtttaggtttgttgcttgtgggttagtcggcggtcgatatcatgtgtgagtggtatgacagcctttattaggagttgtgtgcctctttttcagtgttttaatcaagattaagataatggcacttaatcttataagaaagattagtttccgagccgtctgttttcttcctttctcttatttctacctatcctcctccagatggtgaagacaaggaatgatccccgtgactccaacgacgccagtggcagcgaagagcagaccgatggagctcatgtcagtggtgcatctggcagcagatcatctccaccgcccgaaaacccaacagtcactcaaatgatgacaatgatgatgcaacagatgcagcaacattaccatcagatgttgcagcaggcgcaacagaaccagcagtttggtcctccaccatcacacgtgtccaaactgttagactttcttcgtatccagccacccactttctcaagcaccaccaacccaatggaggccaatgactggctccgtgctattgagaagaagctgaacctactgcaatgcaacgaccaagagaaagttgcttttgctacacaccagttgcaaggtcccgcttctgcctggtgggataactacgtggcgacccgtctagatgcaacggaggttacttgggcagagttttgtcaaagcttcaggaaggcacagattcctgaagggattatggcacaacagaagagagagttccgtgcgctccagcaaggaaccatgtcagttacagagtacttgcatgagttcaaccgccttgcgcgctacgctcccgaggacgtgcgcaccgatgctgagaagcaggagaagtttttgtttgggctcgatgatgaattgaccaaccaactaatctccggagtctatgaggactttgagaagcttgtggacaaggctatccgccaggatgagcaacgcaacaaaatggaccgaaaaagaaaggcagctcagatcagctttcctcaggggaacaatcagaagcctcgcttcatgacgggacagctaggtgggccttccaccctgatcgtctgtcagcaccgtccctatcacccgagtaacttcgacaacgactacaacggtggcagtcacaacaacagtaagcagcacaaccacaactcgactccacccccactaatggcaccagatcagtcagatccgccagctgtgtcagttcagtcagaacaacccaagaagggggctgtaggaaagccaggaccctgcttcaactgtggcaagcacggccactttgctggcaagtgtccgaagctgaatcgcactggacccaggttcatccaggcccgcgccaatcatgtgtctgcagaggaagcacaggcagcaccagaggtcgtgttgggcacgtttccagtgaactcatatccagcaacagttctctttgattcaggtgcctcgcattctttcatttccaaaagatttgctgggacacatggattatcggtagtggaacttaaaataccgatgcaggttcatacccttggaaatgatatgaggacagcacactactgcccctcggtgactatagagatcaaaagatcaccgtttctatccaacctcatccttctcgaatctaaagacctggatgtcattcttggaatggattggttgaccagaaacaagggagtgattgactgcgcaagccgcaccatcaccctaaccaacgacaaaggggagaagatcaccttccgttccccagcgtcgcagaagtccgtagcgagtctgaatcaggctgctattgagggtcagacagaaacagtggagaaaagtcccaggaagttggaggatattcctatagtacaagagtatcctgaggtgttcccagaagacctcactacaatgccaccgaagagagaaatcgagttccggatcgatttggcacccgggactgctccaatttacaagaggccgtacagaatggcagctaatgagttagcagaggtcaagaagcaggttgacgaacagctgcagaaagggtacatccgaccgagtacttcaccttggggtgctccggttatctttgtggagaagaaagacaagaccaagaggatgtgcgtggattatcgcgcccttaatgaggtcacaatcaagaacaaatatccgttgccaagaattgatgacctgtttgatcagctaaaaggagctaaggtgttttccaagatagacctacgatcaggctatcatcagttgagaattcgggaagaggatattcccaagacagccttcaccactcggtatgggttgtttgagtgcacggttatgtcctttggactcatcaatgcaccggctttcttcatgaacttgatgaacaaagtgtttatggagtttcttgacaagtttgtcgtggtattcattgacgacatacttgtgtattcaaaatcagaagaggaacatgagcaacatcttcgtctggtacttgagaaattgaaggagcaccagttatatgccaagtttagcaagtgtgacttctggttatcggaggtcaaatttctgggtcacgtcatttctgctcaaggcgtggcagtggacccatcaaatgtggaatcagttacaaagtggaccccaccaaagacagtttctcagatccggagttttcttggacttgcgggttattaccgtcggttcatcgaaaatttctccaagattgccaggcccatgacacagttgctaaagaaagatgaaaaattcaagtggtcagctgagtgcaaccaaagttttgaagaactcaagaagaagttagtctccgcaccagttctaattctgccagatcagacgaaagacttccaggtctactgtgatgcatctcgccaaggattgggatgtgtgttgatgcaagaaggtagagtggtcgcatatgcttcgcgacagttgcgcccacacgagaccaattatcccactcatgaccttgagttggcagcagtggttcatgctctgaaaatctggcggcactatcttattggcaaccgctgtgaagtatacactgatcacaagagtctgaagtacatcttcactcagcctgacttgaatctccgacagcgaagatggctggagttaattaaagattatgacatggggatacattatcatcccggcaaagcaaatgtggtagcagatgctttgagcagaaaaagctattgcaatgccttatgcactgaagacatgtgtggcaaattgcaacaagatcttgagcacctaaatttgggcatcgtggaacacgggtacgtagctgccctagaggcacggcctacgctcgtggatcaagtcagagcagctcaagtaaatgatcctgaaatagctgagctgaaaaagaatatgagggttggaaaagctcgagatttccatgaggatgagaatggcacaatctggttgggagaaagattgtgtgtgcctgacgacaaagaactgaaggatctcatactcacagaagctcatcaaactcagtattcaattcatcccggcagtactaaaatgtaccaggacctcaaagagaaattctggtgggtcagcatgaggagagaaatagctgaattcgtcgcactctgcgatgtttgccaacgggtgaaggcagagcaccaaagaccagcaggtttactccaacctcttcaaatcccggaatggaaatgggaggagattggaatggactttataacaggactgccccggacatcatcgggtcacgattcaatctgggtagtcgtggatcgactcactaaggttgctcacttcataccagtacataccacgtatacgggcaaaaggttggcggagctctacctctcgagaatcatgtgtctgcatggggtacctaagaagatagtatctgatcgagggagtcagttcacttcaaagttctggcagaaactgcaagaagaattggggactcgtttgaatttcagcacggcttatcatccgcaaacagatggtcagaccgagcgagtaaatcaaatcttggaagatatgttgagagcctgtgcgcttgactttggcggagcctgggataaaagtctgccttatgcggaattctcttacaacaatagttatcagtccagtttgcaaatggcaccgtttgaagcattgtacggacgaaagtgccgcacaccacttttctgggatcaaacaggtgagcgccaactgtttgggacagaagtgttaaccgaagcagaggagaaagttaggactgtcagagaaaggctaagaattgcgcaatctcgacagaagagttatgctgacaaccgccgaagagagcttactttcgaagcaggggattatgtgtaccttcgtgtcactccgcttcggggagtacaccgcttccaaaccaaaggcaagttggcaccacgctttgtgggaccatacaggatcttggaacgcagaggtgaagtcgcttaccagcttgagctcccatctaatatggttggtatccacgatgtgtttcatgtatctcaattgaagaagtgtttgagggtacctgaggaacaagctagctcagagcacattgacatccaggaagatctgacttatgtggagaagccgatttgtatcctcgagaccagtgagagaaggaccagaaacaaggtgatcaagttttgcaaagttcagtggagccaccactcggaagaagaagccacctgggaaagagaagatgaattgaaggccgcccatccgcacctcttcgccagctcttctgaatctcggggtcgagattctgtttaaggggggtaggtttgtcacgccctgaagttcccctcccttgctctaaattcataaaataaatcgtccgaagaaattgtttaatttaacctagagagaaaccctaaagtaataaatgcaaataataatcggaatcggcatgtggaatttttcttgggttctacatgtcaaaatacgctaacaggatttttagtggaattttcagagccttggaaataattttaaccaattaaaataagcaaagtgcaatattaaatccctgggaaaatccttttttcctttttatctttcctttttccccctctttttcctcctttgggccggcgggccatctcttcccgccccttccgaagt

SEQ ID NO: 7298 - DNA, 51968 bp, Oryza sativa
gggagcgccagccaatatggcgcactccccctagccacctcagcatcaccccgccacgtcggtggtgggacggcgccagcctctttggcgccgtcctgttgaacgacggcgccagccactctggcgccccaaaaaggaccatttttgggataagtttttctagggatctacttgcgaaataagtttttcaaaaggaccaaaatgtgaaaaatccagccgcattcatgcagacggctggcgagttcgagctcgccgggtctcttgccaccctcctcttcttctccgctgccacgaaccaccagagcccctcgtcgtcaacctcccagtcgtctcccactgtcactgctgcctccagcggacgggctcgccagccaccgcccctttccctgccagctagctcccggggaagagaggggataagtggaagtccacttacatgtggcccctacatgtattttttttctaactagaatgccacgtcagcaaaaacgaccatccatactgtcttacaccgttattcaacccagttttgcaaaacatcagggttcgaaatttctagtatcgcggtttgaggatacgattcaaaacgttaacatgagggacctaaagggaacttattcttccccgacaattataccggctctcatgggcctacatgagtcgccaggtggtgtagttgggcctgcattgagtggttgagccgcgaaaggaagcccataccaatggtagcgcgcgaaccaattatacgggctttgttgggcctgcaatagcggaattaatccagctcagtgacgtctctttcttctccgggattgatcgccggcaaattaaacctcgatctagcggtgagctagcgccatggggcatgataatggtcgcagaggtgaagtcaaaatgggtgtgcctctcattcaacgatcaacttcagatctagactcaaccaaaccccttaatttgaagccacatagcatgcaaaacaagagatcagtattaggaggcacatacgcgtggcgtgatctagcaaagtgtgttgatctctcttgttctctttgtgaagcaagggcatatgagtgcctctgctgcccacgcttagttctctcaaaataaaccgtcgcaagtttttttctaaaagctttgaaatgtacctataatataattttagttcaactacaatataattgtactatggtggtgtttgaatctcctgaagatgaagatgaagattaagtgtttcacgtaaaacgaggtggtaataatgtgtgattaattaagttttaattattacaaacttgaaaaacggattgatttgatagtttagaacaactttcatatagaaagtttttgcacgaaacgtaccgtttagcagtttgaaaagcgtgccacgagtatccaaaatttaatccaaaagttgttggagaaaagaacatggcctatatataactataccataacctctaaataatttatgtatgaagttacaggtatttttttttgatacttgtatataaattagataaaagttatttataatgtgattataatatagttatatagtgtaattacagtacaattacattataattatattgaatttttttaataaaaaactcgtatagtccctaaataaatcgtcgagggttgtcaaaaacacacttaaatctttcttgtttaatcagtgatggagccagaaagttttttaaactagtatttgcttatttgctatagaaattttatcatcaatttactgtaaatatattgaaatttaatgaagttttcgtcggtgagcctgggcggtggctccgccgctgtgtttaataaagaacgatgtgcaacaaaatctcatataaccatggatattcggatgacaaaaaccgggccgaagagtagtcatattcatccgtccacgatcgatccattcgatcgatctttcgtttttggtgtctttgctattatctagcggtgaccgcgatcttcatcatgcccttgtcgcagtcgcccgggaagccggagacgaagaaggtgacgccggggggcagcgcgacgcggtcgtcgccggagccgtacgccgtcgcgttggccggcgccctgcacagcgcgtagtccacgtcgcccaccaccaccacgttgtgcgcgctcgcgtcgtagctgaacactgcgttttacacgcacgccgcccgccgccgccgccgccgcgggcgccattagcaccggccatgacggatcagtttcagtaaaaagaagaagaagaagaagaagaagaagaagaagaagacagatgaagcaagcagagggagagcaagctaagctagctagacatggatggagcaattagctaccgagcacgtcgcccgccttgaagggcttgtagttgggccacccgacgacgccggggctccagccggcaccgtcgccgacgggccactccctccgcgccgccgccggttcgacgccgcattgcagcgccaggatgacaaggagcaggagcaggccgaggtgaacggagcagatggccttatcgccgccgcggccgccgcgtgccagcgccattggagcaggagtagtctcgagcgaagaacgcggaagagcttaaggctataggcctcggtaaaagtccttgggtcaaaggctctccttttgtggcaacaacaggcctcctaccattcttgctctctccattttataatataagatataatttttttctagatattttataatataaaacgtccatacatactatatagaattagctagcacatcctccttattgaaatataattaactagtacattctctaattttattgggtacatatattgtatttattagagtgatttaagctaggaggtgatagtaattgttttttaatgtttggattaaggataattatacactatattttgaaacggagggataataatttaaactcttaggcaaaacaagggataagtgttagcaggtattaattcttggcttcttgcctttgtgattgctcattgctcatcatcaacaccgggttcacattctctaccataatgatactatcattatagatactaacgtgtgggacaatagaagggtagaatccatatgtcaatgattgtaatggtagtaccaccacaaaaatgactctggtcctactctcattccaaggctttcttcgtgacgcttctagcatgagaggaaaacctgatattcttagagtgtcatttattttagaacaaattttgaattttaagattgtacttattttgaggtggtgtgagtatatattttgtaaaccaaacaacatttcacattgatttgtgaatgtattcagagctttaaatgcacaacggtttatacaagaattgttgaaaagtattttaatagaattcttgattttttagtgcgtgggttccatgtgcccacttactagtatatatggagtgcgttcatttcacttcaaactatatgtaaatatcattctcttgatccgttacaacttacaagcatacaaaattaatcatcttgaccaacttccttcctaattggtcgaaatgcatatatatatatagggcaggaaatcttttttctgccgtgaggactaatttcactacttgatgcatatgaattcattttttcttttaatccacggtcgagtgcgacgtccttcaccggcgagcatgcgttgcgtatagcttgttaattattgttacgacattactagacagtttgcatctgtacattagtggtttcttgatcatcatggccgtgttgttgttgcagcacaggcacagcttccttggctggatgagatgatgatgatgatggtgatgcctccttactctttccccagagaacgaaatacaggcccatgataaccaaagcagaacctatcacactgcacatatatagctagtgtcaaataaaacatgatcaatatgatgacaatagtaattactcactccatttcagattataagtcgttttaactttgtaatattactctatttatctaaaacttggtcaaactttaaatagtttgactttaacaaaagtcaaaacgacttgtaatctgaaacggagggagtaattaaacatgacaaatacacataactataacgtactaactccgttttaaaatataatgatttttagaattcaaattttataccataatataaggattcgatcatacacttattgtcatgattccaaagccaatcacatgcttgcaaagggaatataagtaattcaaaatttaagaattgacaactgaaatgactaaaagagaattttaaacaagctaaaaaaatattatatttttaaaacggagagagtacttacgttccaaggtgaagttgctcacggagaacgatgacgttgatagcagctgcaatgatctggattagaggcgtgaatgcagtcgtgaacaccggccctctctgctccacacaccatgacattgccaagaaccctattcctgacccaactatcccctgcatatatagatatcaattcatccatccatcagttgcaattaattaataacaattgttctaattaattaattaaggtatggtacgttaaaacgcactaagaatgcgcaataactaaaacatgctccttacatagtaaaatttttactgcgagttatatcgttctcagatatcatattcttcctccgtttaaggttataagtcgttttgactttggtcaaagtcaaattgcttcaagtttgaccaagtttgtagaaaaaaatagtatcaacccgagacaaatttattttgaaaatatatttaattaactaatttggtattgtaaatattactatatttgcgtataaacttagtcaaacttgaagtagtttgactttgaccaaaatcaaaacaatttataatatgaaacggatggagtagtaaacattttactactaggctcaataagagtatccgacaaatttgactactaagctcaataagagtatccgacaaatttgactactaagctcaataagagtatgacaatgattgctctcgcagttaaaattatacaatgttaagtttgttttagctatattgcaatataggtgtagtatagcacggagtatatctatagtcacgtaccacaaagagcacggtgatgatctgaagcttggtccttaagatccatgggggcaagctaaccctgtcgatggccaaggcgaccacggccatctggaggaagctgaggaagaacatcagggccgtccccgagtagagagccgggtacttcctggcgatcctcgactgcaggatgaaccacagcgaccagcaggccgacccacccagcaacgccaccgacccgatcgcccatctgtgcgcgccgccgacatgaccggcggcgatcaccgccgccgatgccatcggagaggaagaagatgatgatgaagaagatgaagatgatagcttggtgagcgatgggccctggtagagagcaaggaccattgctccgctgaatcctaacaccgtgcctcccactttagctatgccagctatgttcaggttaactttctccagcctgcacatatttcaatcttaaatttgattagaaattttaagtatctcaagatatttaaattttacactattttttttatctcgggatacttagtaccgaagatactaaaatctaagtaattttatcatttttgaaaaaaatattagaaaatagcatattttctagtgtaaaatttaatacatatacttaagcaccgtaaattttctatcaaaatttacactagaaaattcggtacctatcgataccttctcaaatatggtaaaattaccctaatttgttcttctatactcatttcatattttcatgcataccaattaaaaagtcctgttttccatgcagatgtatgtatgttttgagttagttaattattatatattctagctagggggaaattaatgaatgaatgaatgaattgtaattacccataaggcagagctacaaggaaggtgaagatgggagtcatgttgatgaaggcgcaggcgaatgttgcggtggtgtactgcagccccaggaagaagagccactgggtaagggacgctctgcacgcaggtacacatttgatttaatcaattcatcatttgttagtgcatatatatacacatataatgatctttcatcacgttaattaaactatctatgtagtgtatatatgaaaaatgacttgcccgagcaccgcactgaagaagagatacaccaagatttcagctgttagctttggtcttgtcttcctgcatccattccatgcagcacaatatatatcagttaattccttaaaacatacatctatatgttactatatatacagctacaatatatacaataacaattgtcgctaattaatctatcaattggcatgctaatatatactgatcgcgaattggtgaagaactgaatcgatcagaaattcagaatgcagatatgctatatacctctcccggaagtaggcgatcggggcgaggaagagggtggcgatgagctgacgaagcgtgatgaggacggtggcgtgcatcccctcgttcagggccatcttgatgagggtgttcatcaccgcgaacaccaccacaaccccaaccattgtcaatgttggcttccaactattgcagctacccatatcgattcaggatcgatcgatctctatctagctgatcaatggctagctagctacaaagctaatctgaaatatgtgtgtttgtgtgtatatatatatgtggttgttaattgctttggcactgctaagtatattggcatcaaggatgctgcaggtggcaagaatttatatgcatgcctgccctggcctccaagtgatgacaatctgacaatattccgttccttgcttaattacatgtatcacgcggtacgggcgtatttgccctttgctttaattaggtgcactcaagaatgatgccaataaggtatggtacgaacaaatgtattagttattaattagctttactttaattcctacaccactcaagatgaacaatttataattaattatcacctgcatgaccaaaatattttttttaaaaaaagctgaagaatttgttcatcaactttatgcaagcattttttttaaaaaaaaagaggaaagagaggtttggattctttggctagcttggaaaaggtacgcgttagattacatatataattaacaaggagtaatgatcctaatatatgtatgtgtcaaagacactgatgaggagagatcttccaaattaacacagttgttagtatatgcaaattaatccggcctgttcttaattttctcctgccttagatcgatcatatctatctaatactctagcagtggttaattttgtcctgcagctttaatttgatcacagggagagggatgctagctgtagatatatatatttatcaaaggccgacagcatatgtacagggagattgaaaggaaaagagatgctttctttggtgcgtcatccgtcgttggtcagcaaggtgacttgaggggaagggaaaaaaagagttaaaggtcatatagacttaatagtatatgctccaacaaggaaaagaatgatcgttaaaaaaagaaaaaaaatatgtacacctcaaattgacacaaatatatagtccctccgcttcatattataaatcgttttgacctttttctaagtcaaattttatagaaaaaattagcacaatcttaaacatcaaatagatgtttgttttgtgttaaaagtactactatatttttttaaaagtttgattaggaaaataattaaacgacttataatataaaacaaaaggaagtagcaaactatataaatcagataccatgcatgcatatatagctgggccagctcttttctcttcagggcatccaatgctcctccattgttgaacaagtattgatcatttagaacattcaatgctcgcatgaaagaattgatgtgccattttttttgccagattgaacacatgggccggccgggcgacccctaacaattctgtttacgttagtcatcttcatggcatcttagaccgttcttccctcgatgttcccaacctcactactctcattttttatgtgctctacccaactgctaaaagatacgtttctttaacaagtgtctatacaaaagttttattttttttcaaaaacatgcaaaaagatcgcatgccaatatattaaaacgagagtttagttacacactgtatataaaaggtgctataatttttaaaattttttaaagctaatacttaattattcttgtgataattcatcgatttttttacatgcgaagagaaagggttttcaatgcctccaaaagaacacggtctttaaagaaagagaaaatcccctatatacctatgaaagttcacataatcccttctatacccctgaattttgctcaatcctttatatacccctgaattttagtttggatccctttcatgccctttccgttagttgaccgttaaattcttttgaaaaagtccattttgccctttgctatgaagaaacataataaattaatgaagtatattgttggaatgtaaaaatttattggatgagactattatatttatgagtatgtgatgcaccatattatttgtgacaaatttagttttacatatgatataaaaagttgatacttatttattagttattaaaagttcttttatgtagcatatgtgttttcaaagtaatacaacagatttgtttattacttcagaacacatatgctaaaaaaatcttttaataactaataaataattattaattttttatatcatatctaaaagtatatttatcgcaaataatatggtgcaaaactatctcataaacataatagtctcatataacaaatttctatgctccaacaatatactctattaatttatatgcttctttataccaaaggacaaaatggacttgttcataagaatttaacggtcaactaacggtcaactagcggaaaggacatagattggatccaaactaaaattcaagggtatgtaagggattgagcaaaatttagaaatacagaaggaattaggtgaactttcaaggatacataggggattttctcttagagaaaccgagtgtaatattactctaatattattattttcttctgcttgaattcttccttttgctggcgaaaggaaccgtgtgtcacacgctggcacttcgtgtcggccatatatatttagcctcacatgtgcagcattagtgtgcattaatatgctgatttgtatgcccctgtcatatgtaagagtatatgctaaccgaccaggcatcatatcagaaacagtaaatattcaacctttacgtacgtgcgctgaataatttctctgcttttgcttgctctttttttctaggaacaatactgttatgatgtttcattaattaagcaatattaataatattccttcttttctgaaaaaaaaggttgcacgtatatgaatggaggggccctcgcatcataatttaaagaaaatacctctgaaacttcacccaatccctcccatgctcctgagatttacttatttccttccatacccctaaattttagtttggatctcttctatacccctttcattagttgacctttagttgaccattaagtttctatcacaaagtccaatttgccctttggtatcaagaaaatataaatttatgaagtatattgatgaagtgaataaatttatggtatgcgaatatttgcaatgtacgatcagggatatgaatcaaggaatgaccaatatgctcaattttcatacctgcaccatttgcagtgtggaagttcccttgtatttctccttagtcgtcagcttgtccaactcacttgtgagatggtcagttgccccagtgtgtatataccaattggtatcaacaccgtaggcatacgcagcagccgccacatgcctctcatccggcacataatttgcatcaaacctgtgccagcattcagcagcaacatggcctcttttgtagcatacctgacacacgggacgggtatcaacacactgctgctggttgccacctcgccctcgatttgctcgcatgttgccgcggccacggctaccaccatcaccgcgaccacgtcctgagttgctcccgccagcagcgctggtactgccaccacggggagcaaagttgctgcggcctccactgccacgaagtgctgcatttgccgatccttgttgcctcaagtgcagcatgttctcaaaattaagtagttgtgcatataattctgtcatggagatgggttcaaccctcatcccaagagcagaaacaaaggaatcataatcgccatctaggccatttacaatatatgcaatcatatcttcctcatctagaggtttcccggtagatgcaatctcatcactataagccttcatcttcccaaaatattcagagattgtcattgtacctttacttgtagtttggagcgccagccgcacattcaatgtgcgagcacgggtctgcgatccgaacatatcaccgatcgccttccatgccagcgccgcagaccttgctcctgccacttggttgagtatatcacgtgacagggaggagaggaggaagccaagcacctgctgatcagctgcaaaccactcctcgaaggccggattatccaccattactgtcttctcccccttttcgccttccttccgctcgatctgagctgccggcgccatggttttgccggtgaggtagccctccagtcatgccccgcgaacggccgccaggatctgtgccgtccaaatggcatgattttgtttggtgagcttttcagaaacatggacgccgaagagagggttgccggtggaggtggaggatgaagaggaagccatgacaatctatgccaataggctctgataccatgaaagaaaactaatatggagtaacgttatcggtgcggagaaaattgacatttagccactttcaaggatgggtttcgctgtaatgccattccgccaacttgcttcgctaaaatgccattcccacgctcgcgcaacacgctgcttcgccgtttttccaatttcaccggattaacacacaaaatcaggagtgttgtgaccaatgtgcccttgggtcattctttaggtcagtgagagaaaggggatcgagatgcgttggctcttgctcacggcggcgccctagatcgatctcgtcggcatcgccattccacccgccgccgcagtcacctctcgccctcacccagctgtagctcacggcggcgctgccatcgccattccacccgccgccgccgccgccgtcgccgccgtcgcagtcccaatctcgcgctcaccaatacttcaatcaaatttatcagcttatcaatctttccatcatcaactgaactccacttcatctctatagaaccatcaaccactgcaacatcacttggaccttcatcaacaacatgctcactcattccttcaaccatcttcctataactttcgatccacttgaaaaacttgcaacaatttggcacctatacatacatcagtacaaaattagccccaataaccaaaagcaagcaaatgcaacaaattcaaccactcacatcttgttcgttttcctcgcatttgaagaaaacctttccaccatgcctcatcgatctgcactctactactgcagcgccacacctagggcaacgaatgagaggaaggccgctagatcctacgggtagccgagcaggaaaggagctaccttgcgacatcccgaaatcctcgcttccagctgcataccttcgctgcatagcccccctagggttagggtttcctctcatctccgcaaatcagcgccggcgaaagtggcacagcggcggtggagcaaagcggcacagcggcggcggcagataagagcggcacggcggcggcggcgaagtagagcggcagcgttgtggcggagtagagtggcggcggcggagcaaagcggcacagcgcggcggcggagtagatcggcagagcggcgacggtgtagagcggcagcgtggcggcgcttgctgcttcatttggcacaaaaggacccccaggggcaatttggtcagcagacaactcacttacgggattaatccagtgaaattggaaaaacggcgaagcagcgtgttgcgcgagcgtgggaatggcattttagcgaagcaagttggcggaatggcattacagcgaaacccgtccttgaaagtggctaaatgtcaattttctcgtcggtgcgacggttcgtgttaattgtatcgtagcaaaacggcgaggaggagaagtacatatatgtatgcgtcagagattggttagccgggatcctatttacatgtaatcaaaacaaccttagctaaactaccggccacctaatctccaactcatatggtttacaatggataagcacatactctaacaggcggtagccatgaacgccagccctacacaagaacgctctgagcaaaacacaagaacacaaataaaaaagactacaagaatatggattctaatctcttggtggacgtccacccgttttttcgtgtcaactaaatggttatgaatttttttaaaaaaaattaacaagatagattaatatgtaatatatcactttacaaatatgtaagttcatatttgacttctacaagttgtaacaaaaaacttttttttaagttgtaacaaatatgttacaagaaacgggtggacgttcacccaagtgtttaaaacagtttccccatcttgctataatacttcacaatcggtgataatccttgttcttgttgatgcttctagttttgcaatcaccaacaattttttttttgttctggtccactgtcctcacaagttcagctgctagagaggccggtcagtcattttggtaattttaggcaggaaacaactgcataaccagcattggaatccatcaacacattggtgattttggtaattttaggcaggaaacaactgcataaccagcattggaatccatcaacacattggtgatctagtacactctgttgacacaccatgcatccaatcaaagtgatgagtatatctgtgttccttcctttacaatattgcttgcactggatctttcacagccacaggagccatctgtttctgcagaaccagatcgaaggggacaaaaaactatctgaatttccagctcaatccacagatcctagaaaacagacggccaaataaaactgaacaccatttgtcagcattttggtaaaggctctgaacttttcaggtgtaatgcaattcatggaaaggaaaccagaaaatgtccgtagttttgagtgaagcgaggaggaaggaacagagatgtgaagaacactccaccgacaatctgtgtacattttccattcgggtgccaatatatacagaactcctccattgatcatcttgctggtggcttaattaatatacgcaagcacgatcaatgcctcctgtcaacgcgggcacggcggcgccggactccggcaccggcagcattgccgcgaacgacggcgacggcgacctgcacggcgagcagagcaagctggtcgcgatctccgacgaggcgccaaacgtcgacagggcgctcgccaccagccgcccggcgaccgccgacggcgcaggcggcggggacgacgtctcgccgagactgcggcggcgtcagcggcggcggctgctggagatcaagaaacgtggtctggaggtcgaggagcagacgctggcgctggagcagcggcggctgaggtgggccgccgcggacgccgaggcgcgcagggaggaggacgcggagctggagaagatgcgggtggagaacggcgtggcgagggcggagaacgcgcggctgtggaggcggctgctccggcggcggcgggaacgggagctcggcgtcggcggcgtcaggtcgaacaagtgtcgcgacggcgctgcagcaatggaaggagaagagaaatctgtaccgtagtgtcatatgtttcttttctcaatttttttctttttcttttttctctgaattctagaaaaaaattgttgatgttttttttctcctcgaattcctaaaaaaaacaggtttaaccatcaccattataataaaatttgataactaaaaaaaagtactcctaaatctatgtcagaatttgatatatccatattcatttaccctacttaaaaattggtagtaccgaaattcattaaggccttgttcggtttagaggggatttattccacaccacaggtgtggaattattcccctccaatccctctctcacagagattaaactggacaaggcctattggaaattaaacatgccatgtagctatagagtaactctgggtgaaataattatacaagcttgaatgtgcaatgatgctttataaatgctactacctccttgtacaaatgtatgacgaaccaacgtcaaacgtaaaaaaatggagggagtatttacttatgttgtttatatgtattctcttgtggaatctcttagcatgtaggttcaatgtttccttcttcttagggatattgtttcccactttgtactttgtatgtagtttgtttgtgtgaactactccttaaaccataaccaattttaaattttaagttcaattttataattaattttgttcattgcttcatcaatcaatcttttttttgatccctaagagtaatataagtacaaaagtttgtactgaattatggtcggaggagataactgacctttagggacatacatgaaaatcattggtacagctacacgaaggcctttttaaaaaagttttaagcccatggatcatctgctaccatatggagtatttttcaggacacattccgtgtagtttattcggcccagattccaccaaatctcttattaatggtgcaaagttaaaaataaaacatttgctcacaatcataaaagtaaaaaggaaaaaatagacaacatgattataagccataatcatatgagaataagtataatgtctacgaaacactcttcccaccttcaactagtattacgtgcttggttcctagagcttgctagaagtaacaattgcgccaacgtcaaccgcccacccaaaataagccagaaaagaagcccgcccacccaaaataagccagaaaagaagcactcatattttgtggtcacgacaagaggtgtccacctgtcgacctagctacttctaaatgatcgccatcaaccttatatcgtaacaagttcaataacttgctacgtaaccccaccccctcccatctagatgaaaggggctcaataccgaagacctagaactccggtgaaccaatcaccgtttgttactaatccacaatcattgaggagagggagtggacctatgacgttgaccagatccaatctcactttgacttgccataaggagtaagccatataatagagaatcctccaagaagccttggaccctcggtttggaatagttctccctcacagttctcctcatgcgccattgtccgacagttgaatagagaacacactagctggatatcacaaagttgtcacgattcttcctttttacccctacgagttaatttatattacaataaaacttgtgaaattcagcctcttgttataggtggaattcgtttatacctcgcgtacatcgtgcttctaaaattctcaccaattaattactacattcgtcatccgttatattttgagacggagaaagtaaattttttaatgtaatccttgtatctctgtaacctttgttcttagcacagctaattttgtccgttagctctgtgtacattttttttagaggaagctctgtgtacagttggtttcttgcctacccgtttttttccaggccgtacgtgaaagttgcaactcatctatatatcctccatttgcacgcaaaaagcatacatactcgcacacggttcctctttcgtcctccactagtagcattttctatttatgatcgagtgaattcatccacagataggactttctcttttgtctctagccttagctaaaagtctaaagagcctcatcttttcgtttatgcttatacttatttactaaaatttaaattttcaaccttaaatttaaagatgattttgggcattttctatttatgatcgagtgaattcatccacagataggactttctcttttgtctctagccttagctaaaagtctaagagcctcatcttttcgtttatgcttatacttatttactaaaatttaaattttcaaccttaaatttaaagatgattttgggttctttcatcgaagtttatttttcagcctttatttttagatcgctaagacatatataaaaattttattcacaaattatttttcgtttacaaatatgtcgtttgggggtgtaagatcgatcgagtagttttttttaaaaaaacaaaaaacttgagtaagctagctaggcaggtggatgttgtattgtaccggtgtttggtgcctgacgatttaatgcgaaagctagcaagacgaccaatccttccaccctgcttttgtcgccatggatgatggtactacttagatgacgatcactgatattttgtcccagctcaaattttctacgtgctctattcacggatattgtttatgtcttatgtctatcacgccatggatggagtacgagtaccagatattgtttgtctagtactgattatagtttctagccatgcattgtttatcatcttcaggccccaattgatttttacgaaagacataaaaatttaaaggattttaatcgtttagaaagaaactacaataaagatctttgaaacaaaataactgaatcatatcatttcctttataactcctatgaaatagataatcctacgaatattttgaaacaaagttagcaaaaacttcaatctcttcaaagatacccctccgtttcaaaatgtttgacaccgttgacttttcagtacgtgtttgaccattcgtcttattcaaaaaatttaagtaattatttattcctttcatatcatttgattcattgttaaatatactttcacgtacacatatagttttatatatttcacaatttttttttaataagacgaacggtcaaacatgtgcttaaaaagtcaatggtgtcaaatattttgaaacggagggagtattcattttagtctttttctctcacccgatttttgtttttcttttacctaatcagactataattcttatgtttttctgtgttgtagataatcctacaaatattttgaaagaacgttagcgaaaacttctatcttttaaaaaaatatttattttagtctatttctatcactcgatttctgtttttcttttacctaatgagactataattcttatgtttttctgtgtttgtacatttatattcatgtgtttttttgtttaaaagagcacttagttttgtagctacagtaacatgcattctcccattaaatgttggccggtcaccaaaacggaatcgagcttcatgccataagaaggaagccggccggaagcgtagtaaatgtgtacgtgcatccatggacttcacctgtagtgctagagcgtacggtgagaaaaaccgggtgagatgttttttttttttgcgatgaacagggatatattactcatgctcagcacccaacaggtgagtgataaaattataagccagaaagtggttagagcctcgctacgccctttataagccagggcatggctgacactattttggttacggtgaatcttcatgataacaatatctctattcccagccatgaggtgccaatatccctattcccaaccatgaggtgctttatctccctagctaggaaaactagctctgatcgttcctcctcctttgactggatgagttgaattgcctgtaagcagtcagattctatgatgagatggtaacagcggcgaatctagaaattttaatttgtaagcctgagcaagcctaagaagatataatcatgtatttccccgcaaaaaaaatataatcatgcatataaaatccacacaactacatatagatagggttatatcgattaatatatatagtatgggagacttaggctgtgtttgagaaaggagagatagagaagattgggaagatacgcaaaacgaggtgagctattagtgcatgattaattgagtattaattatttcaaatttcaaaaatggactaatatgatttttttaaagcaactttcctatagaaattttttacaaaaaacacaccgtttaatagtttgggaagcatgcacgcggaaaacgatgtgtaatctatctccagtctcccagaacgaacgctgccttaatatattgttgcgttagcctctaatcactttgctaattgctttattaatcaagcagggtacgtgctagtacagagggcggagcccgggcaagtgcccgtacgtggttccacttccgcccctggatgtacacttgtacgtgcagaaagctggctgcccatgcgtaagattgctcatctccgctagctttggctaatcgcccccacacgcgcgcgcccccgcccgcgccgaagccacaagaaacgtgtttgcatgcaaggccaggccaggccaagcgaggccgcgcgcgcgcatcagctcgcgacgcgagccacctgtgccgctgtgcgcgcgcgccgcctggcgccacgcacgccatgcacgcgcgcgtggggtggaagggtgaactggagaggagagcggcgtcgcactcgtgaaaaccgaaacggagacgagacgggacgtacggcttggctttgcctactactgctgctgctgctctgctctctcctctctctcgtgagcaagcgtagtagcctcgctctctctcgcagccgcgcgcttggtgggagggggggattggggatgatggggagcgagtcggggagggcggtggcggcgatggtgtcgctgcagctgctcttctcggcgctgcaggtcttcatcaagctggcgctcaacgacggcatggacgcccgcgtcctcgtcgcctaccgcttcatgttcgccgccaccttcctctgccccatcgccttcctccgagagaggtcaggtcacatcccatatactactatgcccccactgtcctaacctgctttcttgctcttgttcttctgggggaaaaaagctcgaattaataccggaatgcatgtgcatgctctgtagtgtatctgtgtatacttgatgattgttagtatttgataatctcatgtctcacatgattattagtgctttcgtttacttgatcgatgatcatgggcttattgaagtttagttacagtgcacttgacgtctcagagtagactaagcttggttaacgatcaagggtttttttaagttttcttctttcttgttcataaatgtatttttctttcttctttatgtactattagttacgtgcatgtagttccaaataaaagggctagctcttagacgtttctcaactagatcgatctggccttgctgaaaaaccaagcgaactaagattttatctgaagtttggtgaattgatctctccatgtaaatatccaatgatcttttctggcttgcttccttaatttgtactctgctttcttgtttacttgtaccaactatcttacaatttatagtcacctgcaattttcttatctttcttctgtctaattttgcacatcacttatccttagttgcagtgctgattaagtagtatgcaattttttgctgtctttgttgcaattttagtttgtgtctaaagagatccaactaggttttcttaacgttttctgcatcatgtaaggggttcaacaatccatttctaggcctaaatatataattcatgctgatctcatcactaacaaacatattatctgagttgttggctgttaatgtggtagttgaaaatgatgagtggttgaaaattatgactagctatactgaagtagtaaagcaaacatttttctttctttttttatcatcctgcggaataagaatgaaggaaaagaaaccattttagaaattctatatgtaacatataaaccactccaagattaatagaacattgagtaatcatgtatttgacttttacatggcgagttaaaggcacattgcacctaacgacttttatttgtttgttagattctgcaattagtaatgataaatgttctgttgttcaggaagaaacgaccgcctctaaccatgaaggtggtgctgcaactattcttgtgcgggttgtttgggtaagtacttgctattataattcctaagttaaactcttatttcagaagttatctttttgtacaaacaggtcaatatccccccccctctttttttttgcttgtaattgcctctaactgatgtttttcaacacaactacatgttaattcaaagcttctttattagaagctctgtcatgttgaaggtatataaaagaaaagtcatgctgattgatcagaaacagatattgaatatatatgagtgttcacttttccttctttatgtttccatgaaaaaaataaattatgtgttgtgcattggtgaaaggcacttgcttcatgttaatccagttattagccttactgtgtaagtagtagtagaacaatgaatgtttatcatttgacagcagtgtgcccccaattcaccatatactgcatcacaacttatatggtatatcaactcttaaatatttcttggtactccgtaaatatttttccagtgattctgataaccaaagttcaaatgcagagttccataaacatttgtgtaaaatggatatattagtagtcaggaggttcagggtctatgttcatatttccttggtactcgctatatatttgactaggagccaaatgaagatcttacactatgtcaaaaattgagtagccgagttgcctcaacaatttcatccagatgtaaaatcttgaaacaaacgaaagaaatttataaactacaccaagaataataaaacttgaaaattacttccttcaaaataaatgatgcatttaccaatttttttttctgtattagatgtgttgaccacaataacttttgtgtccaactgcatacacaaggatcatgttgatctcgaagccgtcacctgagaataactagatgacatggcacacgttgcagcaggaatttttgtgccacggcaggaatttttttgcattgcataaagtgcgatggttacatgaaattggaactaaagcaaaaaagtataaccttttagaggaatagaataaaggaaatggggatttttgttaggtacaaacaaccaagaggttgtataactgctaaatctggacacaaagtgaaaatcacatatagaaaacaaaaaatgaagttacttaccttcattgatcaagaattatcctaacaaaatatatgcaggcatgtagcaaaatgaataagtccactagcacggactatgaaagaccttgatcagatcggtggtattgggctgtctaaagacgaggcttgaggggattaatccaatggtgaaattcttatggtgacgtggcttcatgtggtgcttgttttataacaataaatgacttgtagtgggtaccaattatataggtagtaaggataggcccgcacaacacatcacaattagtttcccttctaaattccataggaattgccatactctgactacccatgaatcgtgttgaattcacaattcacatggtacgcacaggttgtcatgaagatggtaattgctggacacactcatcaatttaggggcatcatactacaacttgtgctctactaacactagatttcagcaaaggttggtatacgcattcactccctgggaaattttggttgttacatatggccttcgattacatgtttatgtttcaaccaatcaattagtagaccactggcttacattttgaagctatatcgaaacgaaacaagcttaacattgtttctcatgcctaaatggcccaatagaccttcctaaagcctgagcacctagttatgtccttgacaacctggctagattgcctaattgggataggcatagtcaaggcaaactgttatcacagaaaaaaactttggttaattcaaaatatctccgaatgtggaagggtccctttgttgtgcaatatccttcatcttgaatggcattacttacctttcaatgtttgtgatttccaataatttagtgtagtactcattatatttaggaatttaaagcttcctgttgctcaaccgaaaactcatcgaacatctttagtacagtaaaagtgcatgagatcctctgtgcaatcagtgtggaacacaaatattgaggatgatattaaccatggcttggtagtttttctttctttctcttatgtagattactctggataatatgtgctacttacagattttctttctttctcttatgtagatgactgtttttctgattacacacttgcagattttctataaaccagaatctctatgtgcttgctataaagttgacttcagcaacatttattactgctatcagcaacctgacaccagcaaccaccttccttcttgctatattgaccaggttacggatttaccacttatagcttatatgtttaatttcaaggcatacagagatactccagcttatatctctgactatttctgtctaatattatcacctttgaatatatattacttcaagaactggctaaaagtatgttgaatttcaactacaacagttatgtaggagtattctttcagcagccagaacagtttatattttccgtcttatttgtaaaaaaaatatggatataacaaagccataatttttaagggttaacattagtttccatactgaacaaaacaacaggctcgagaccttaaaacttaagaaacctgctggacaagcaaaacttctaggaacacttgtaggcatgggtggtgcaatgttgcttacattctacaagggaccaaagatcatggtactcgaccaacttccccatcccaaatttgcccacctcactgaaaatccccagtcgcacccaatatcgacgggcaatcaaattataggatcgttccttggtataatcagctgtttcacctacgcgacatggctagtcatccaggtcataatcttacacttagtttcttctttcaacagtgcgcccactcaactgttgcagttctaatgtttggtattgatgcattttttttgccatttacaggcgaaagtgagcaaggtttacccgtgccactactcgatcgctgcaatggtgtgcctcttcggcgcacttcagtccacggtaatggcactttgtgttcacagggacatggagcattggaggttaggacttaacatcaggctctactcatcggcttacgcggtacgcggttcatccggcatttcatatttttcatggtaacagcatgatcgatccttacatttgttccgagtctaatgaggttagcacccttgttgattcaaccagggactcatagcatcaggctccgcgttccctctgctgtcgtggtgcctgcggaagaaaggccccctgttcatctccgtgttcagcccgctgatgctcatcttcgtcgcgctgatgagctcgatcattctcaatgaggcgttgcacctcggaaggtgatggccaccatttcctttctggattcatgcattgcagttcaatgtgtaatgtggacaccaattttctcatggcgagttcttgtgttgttctgctgtaatgcagtgtgcttggttctgtcctgattgtgggtggcttgtacatggtgctgtggggcaaagcgaaagaggcggctgatctgtctgaagatgaaaatcagggcaaggaatccatccctgtgaccactggcggtgagaatgaaatgaagtgaagagagcattgggcctacaggttgctatttgacagaaatgacagaaagatatgattctgaaattctgatagaaatatagaatgttcggtttggatcaggcattgatgtttctacatcgattcatctcgtgtattgtggacgctatcatttgtctgaatagtctgatactgttaatctgttattgccgtggatttgctgctattcccagatttgccttttataccctgtaatcttattagagctgtgattttcatgctactctcttgatcaggggcggtaccacccattaggcggggttgggcggccggcccagctacggcccgcgccgctctaaccctccatatccttcttgggccgcctaccacaacatccaattcacaactggcccataaataagcagcctaagtgtctaaattaatcctgcgtatatgatgctttcctgagtcaattcctcgacgctgctcacccccgccccctactatagttaggtgcctaatgtttttttctctctctcccttctaagcaaaataataatcattttattctaggtatgcgatatcttctcatatatttatgtggcggtatgtcatgagatccttcaaccagacctgccgaaaccatgcaaccagtaagggttcaagcccaagacgtcaagttcatcgggggcgaagccccccatggcgaagactgtgaagcaaagacggcgaagggtgaagaattgcgctggtatcccacaaggctgaaggcatcttgggcgaagactatacggcgaagagtgtatgacgaaggaaggtgacttcgccataacgagtccagcttcaagaagacccaagaggccatcccagccgctcaagcccggtggccattgggccaacgttcgccagtcggccctttagaggcccatatacctcaattacactgtatacccatgtaagtgtccctttcataagggcaaccatgtaaattcccctgtaaaacccaagccctaatagggaacatgtaataagattataaatagacccctaggacatgtaagagggggatccccaagaaaaattcaaaagataatacacttcaccgtttccaacaactgttgagtaaccacgtccttcgacgtacgcagttgtcacttcgacaacaactggcgccgatcgtgaggaggcgaactggcgcctgggtggatatattcatatatttattttttaaaagatatctatcaaccatgctttatgaattgactcatatttgcaaattgatatgtttactagtatctttttatgtatgatgaattatgtatggcgcaaaaattattactttattttaatatcatttttgttttttgtttgttttaatttattgattatactatatgtttatatgattacaaacataaatatggtatttgttgtgtttagttgctctttatcaagcatttttttcaggaatctcagaaagggattcagtgaacagagagcactagtctctgacagaatgcatggggattactgtttttacaaacgcatggttaggacttcgagcaatctacagaggagaaagcagtaaacactagtgattacaatagtaaaaaagaactattactactagttgtacttctactctactaccagagagccgaaaagaacagcatcatgacgagaggaacggcgagctgcacctgcaccgtcctggctcgaggcagggtgcccatccccacggcctgcaaaaggcgtcaccaccaaccaatggagcaaattgcaaaagttcgtcgtcagtcagagagcgagctactaggctagaaaaaggtatgatggatgcaaagggaaaaggaaaagtaatatgagctcgcaaagatgcagcaagaaagctctgagaaaaaggtttttggggagttacaagaaactaaaagaaatgaaatgaatcagatgtttgctgggttgctttggagtttatcagaggaggagatggcattggcatccaaagaggtgatgaacagttgtttgattggttggttggttggttacctgctgctgttcctggccgggggtgggcatgggcaggacggtggcggagtcggtgacgccggcggggagcggcaccgccgggctgctgctgatgaaggccgtgctcgtgcttgccgccgcggcggcaggcgacggcgcgccggcgttggcttcagcacccgcattgcctccgggaagcgcgccgcgcgggctccgccgctcagacggcagcgtcggcatgtcgccgccgccgccgtcgtccgagccaggcaacggcggtatcgccggcgcgggcgcgggcgccccgaacggagccggccgcggcgagtagtccggcaccacgaccgtcatcggtaccttctcctcgccgtagccaccgccgccgcgaagctaacggcaaacgcgacacggcgcggtcagtaagtgtgactgcaagtgatcagaacacccaaaccaacacaacactacacgcacgcgcgccaacgcgcacttacctgttcgacgtacgcgcccgcgccgcgcaggtggaagagcgcgcgcgccggctgcacggcggcgagcgagcagcacagcagcagcagcagcagcagaggcagagccgaaccgcctcgcatatctttcctcattcctcgatgctcctccggtgtccggtggtggcgctcgtccgaaaccgcacggagggaaggacgcccgtgactttgtagcgcgcgcgggtggtggtgcgtgtgccgtcggccggtctgcccgtgtgcagtggacacagcgtcacagtgcgtgcaccgggtcgctgcaggctacagtacagtgcagcgcgaaacagcaaaagaaagcgacagtggattttaaactctccagagaaacggtattaccttctttgcgtatcaaaagtttggaagtttgcttgaaattggaactatgtgacagaaaagttgtttgggtatgaaaggtttgatgtgatggaaagttagaagtttggaaaaaaaaactttcaaactaaacaggacctaaatagttatgaaaaaataataaaaacatgtagatatactttacaaatagtatacaagtttaaattcagcttctacatgtaataaaaatagtattaaacgcctgcatagagtattaaatataggctctatgcggctaactctaatggtacatattgcgactaatttgcgagacaaatcttttaaacctaattgctccatgatttaataatgtggtgctatagtaaacatttgctaatgacgaattaattaggcttgataaattagtttcgcaggtttattgacgtattctataattagtttttttattagtgcccaaacacccctgcgacaacctatataatatccgatgtgacgcactaaaactttacatccctgatctaaacaccccttaggctcccagtatgtaaaacgaagcagcgtttaacgcgtgattaattaagttttaggaaattttttttcaaaaatagatcaatgtgatttttttaaacaactttcgtatataaacattttgcaaaaaacaaaccgtttaacagtttgaaaagcgtgcgcgtgaaaaaacgaggagaagaggttggtaacctagacaaacgagctgaggtttaatctttcttgttaaattttttcaatcttttagagcaagtttaatagtatagccaactaatagctctaatttatctataaccaatctaatagctcatttatacaatagttacatactacactattaatacatagtcccacctatcatacacacattgtgtcttaaagtctgtgctacaactggctataaatgttacccgttgtttttctctcttctcatttatcttcttaaaatatgtttgtagctgtcttatagcctgctattgtacctgctcttagggcacccacaatggttatctataagctatctacaagagaaccatgtcagcatattttcctacttggaagatattaaatggagagagggagcaaagctatctactaacttagagatagtctatagagaaaaacgagacaatgcataagagagctatagatacccatgtagacatgctattgaggtgatttattattaatctagtctattgctgagatgtatatgttttatagagagcaacttactttattattgcgggtgctcttattataatagaatagttaccatagaaagcggaaaatgcgaagcaaaaagggcaggaaaggacgggctacgggggctaggcggccggccgggcggtgtgtgttggctgggcgaaacaaaaggctgcgacagataaagcggctaccttttctcgggcgtggtggcggcagcagcaaaggaggaatccaccgataattgaagcatcgatgggtggggggtggtggcgcggccaccggagcacgtggcctccaacacgacctccaaatggtcaaaaccctctctctgtgcgttgccgttgttgccaggttccccctcgattcgatcgattgattgaccctcccctcttcctcctctctcctcctgtgcacaactgcacaccgcacagtgagccccctgtacagcttggggctctatgaaaaagatgaatcgatggcgtcgcgacgtgcttgcctccctcaactttggggctcttaagaataagtctactttgcctccctttacaaatgggtccggttaaaacacacccactaaccataaaaccgggtataacccatcctctaacttacaaaaccgttgcaaatcaactccctcagcgatttcggaggcagtttcgttctacgtggcacttacgtgacggtttgacttagtatttatcccatgtggcatcgacatatcgctcaagtggtactaaaataaaaacaaacctaaataaaaaaataaattttgggcacatttgtcagttcttcagctcctctctcttccctctttatactcgacgtcgattgagatggagagagcaggagcagcgagaactcggcggagcgacgggagcagcaggacagcgggttgatggcagcatcgacggtgttggtgtcagcaaccgggagctcggcagagtggcttggcgggaacagggagagagcagaggtgaggaagcctcgccgccgcctcctctcctctctccttgcctcccccccggtgtcaccggcaacgaaatgcgcgtcatcgttgtggcagggattgaggtggaggcggagaacaaggtcggtgttgggaaggagagcggaggagaggaggcaacgacagcgatatagggagctggtgaacatgagagggtgctgagccagcatggggagtcgttccctttgccgagatcgacgccgccgtgtttgcacgccatttgcagtggatagctcatccgctgacctagccgtcgaactcggcggcttccaccgttgtcctcgccctctaccatgctctgtctcgccgccgctgccatccactgtcgtctgccggttgatgccattcaccatccaccttagaaagagaaaggttaaagaggagaaaaggtagctgacacatggaccctaaatttatttttattattttattcattgacatgtgggtcccatttaaggtttgttttaattttagtgccatgtaagcatcacgttgatgccacgtggtataaataccaagtcaacccgccgcataagtgtcacgtaggacgaaaccgtctctaaaaccacttggggagttgatttgctatggttttgagttggaggatgagctatggttttgaaagttggaggatgagttatacccggtttttcggttgagggatactattcaaccaggggtatgagatgagggaagcaaaacagacttatttcgatactcttatggcggatcaatactatatcattagggagtttgggactttgggttcgggcgcagcacggcagtaatcatcttcctgatcatacagcccaagggaagaggagcccatgtgtaatcccctagcccaactaaccggccgggcctttgttgggcttggcatagtgtgatgggccagaccagttacgaccaaatccaaccagggccctcacatcctgttttgaacttaggcaggtttagcataattttctcgtaccctcgtagtatggtagtttgttcggataagatcacaagactgcatggttcgtggtgaatttgcatacaaggccaacaaaagaggaaaataaaatcatgcgagtagtctctcatgctaatgagccgtttgtgattaaaaaaaagaaaaaacaaatatcgatccatatggttcacgattacaaatgggaggttaattttctctaaaaaaaacgctatcatatactccctctgtaccaaattataaagcctatattttttatacagtcttcaatgacatattttgaccattaacttatgacatgttatatttttaacaaaaatagaatataaatctagtgatataacatgtataatatttatcatatatatggttagtataattattacacaaaattatcaagtttaatttttcttaaaaagagcgcgccatataatttgggacggaggtagtataatttcccaatttgatcatctctcaaaatcgatctacccggtacacccatgctgctccgcctcgtccgccctctactccgccgccatgcacgcggcggcggcgccggcgccgccgcgagctctccgacatcgcgtacgtacgcctcggccaccggaagcactagtggccatctctacttggtgctggatgactggaaggaggggtacagcctgcacaagctcgatctcaatgccaactccggcgacggcggcgacgacccttccccgccgcggcgcctccccgcgcctctcctccggctaggtttccggacgctcggctcgtggccgcacatcagcgccctaggcagcaagatcatcttcatgggtcagcgccgcccagatcagttccgtgtcgacggcggcggcggcgacggcggcgcctcatcctcgtctacgacacggcgacggcggcggtggacgtctcgcaccatctcccggacgacatgcacctggtgaccagctacgacgccgtggcggacgccgggaagaacaggctctacctgctgctgcctcagttcgagcggtcgccgtcgccgtcgccgtcgccggagccgccgcgccggcggccgccatggccaggggcgccagaacgcggcgtggacatggcgccctacccctacgttgagaaagtggagagggtgaaggccgggaccaggctctacttgctgctgcctgatccgtttgatcagcggtcgccggagccgggccgcgccgccgtgggcatgccctaccttgagaaagtggagaaggtgtaccccaaggaggaggaggagaaaccggcggcgcgcggcggccgtggaaggtcgtacggcggcgccggcgacgacaacgacgacgacgagaaggacaagtactaccgcaacagattgaccgagcggtggtcgtggcggaccagcacttcgccgccgccattctccggcgggaggcgcatcacggggcacgcgctgcaccccgacggccgcaccatcttcgtctccgtcgagaagacccacgcccgccgccatcccggcgacgaggacgacgaggaggacggcaccttctcctacgacaccgagcgcggcggcgagtggacgcgccgcggcggctggcgcctgccgttcaagggccaggcgcactacgaccgccacctggacgcgtgggtcgggatcggcgcatcctcctccggcgccggcggccacccccgcctcgtcgcctgcgacgtcgtccatctgtctgacgccgccgacgaccccgcgccgccgccgaagtggacggcgtgcgaggagacgctgacgttcctgcagggcggcgcgccgcgggagcggagggtcggcggcgatcccaagctggtgcccatgggtgggggcggaggcaagttctgcgtcgtcgagagcgcgccgcgcgccgggctcgagctgatcggcctcggctcgctcctcggcgacggcgacaagttcgagctccgcgtcaccgtgttccatgccaagtacggcgagaacggcgagctgctcatgacgacgacggcttcggcggcggcggcggcgtcccacacctacgcgctgtcccgctatctctcgaatttccatgcgcccgcgttctggatgtgagccacgcgagttagaaattaaaatgcgtaattgcttcaaaactgataggtttcatcatttttggtacgacagcggcgacgacggcgacgacgaggtcgaaacagcgtacgagagcggcggcggcgacgacgatgacgaggtggaaacagagtacgacagcgacgacgaggtggaagcatggtacgacagcgggacggaaacatcgtacgacaacagcagcgacgacgaggaggtggaaccatcgtacaacagcgacggcgaggtggaaacattgtacgacagcgacgattactacaatagtttaaaagagaaagccttaggccttgttcttttaggctgggtttgggggggggggggggggggaatgggccaaaatccccgtgtgctatcccggccgggtcgaattttcttccgtggcccatgtatgcgttcgcctgggccggggtgggagtaattctccaccgaatccacaccaatcccacggggagagaaaaatcgcctcggagacgattttttttccaagccagccgcagcgctcggcctcctcgactcctcgctgcgctagggtttggaggcggcgcgaggtccgggaggcggctctagggtggagatccaggagcagcatatctccagccgctgccgctctccatcccgccctcggtcgccgacgatctccatccagcttcagccgccaccggtctccatcccgtcctcagccgccgccggtctccatcccgctttagccgccgccaccgctctccttcccgctctccatcccagccagtcgccggcgctcgccatctctccttcctcgcttcggattcaccggttgcgggagagggcaaggtcgagggcaacagcccggacaccaagaagcaagtctgattcttgatctcctcttttcccactcagaaaagattttgtgacttatctagtggatgaatttgttgctagttgatgtattgagtggctgtatggattgaagtatcagtcatgttctgcttagaaggaggggtgatgtggtttgtagtagtagaacctgaaaccacagaaaattccatgcacatctctatgtgtgtgcgcaaatcttgcctatcagttgctctgtaatcaaggaaatatatatttgaattggcagatcctatatttctgaacatgggctctcttctttcttttcttttttttttgtgagggagaaacctggtttgttgattctccaggaattattgtagatgcagtgggagcacacctaaaaaataaaaactagtgcactctgttgttgctgtctagaatgcatcactttgcttttggccaaggtcatttgagcttcagattgaacgaccaatactatatgccaattgaatgagcaagaagatacaaaattttttaaagtcatgctatgaggtggtcaggtggacactgtagtatacattctagttttggtaattttttccatggctttttgtttagcaaaatgcccttgttaaaacttgagaaatgtagctgtccatcttttgttcgaatacctattttactcttagcaatcaatttagcatatttatctattctgaactgctactatgttcacaactagttttaggaaactgggtgttcagatatattactagaggtcataccatacaaagctatataaattgctattgaatgacaaaaatataatctgttgtgctgaattaaatttcaggagaggcacaggcgtgtggggttggcaaaagtaaagctgaaggagttgatattactcaaggtatttgagaaaaaactaaatacagttgtacttacatttgcctgatatgaagcatttaatcttgcccttgcatatttactagagtaacagaagtaatttgaagttggagagagagagagagagattgtaggtacaatgttatgtgatcttgctcaggtggcagatggtctcagtttttttttgctagtgaacaggaggttgttattttcaagtaaacatcctaccctagaaggatatcctcactttattaaagttgctatctctgaggtttaaacaaaactaagtacacaaagtacttctggaactagtcaaaatctgaacacattattgatccccctcctcccattgcaatctgtttatttgctgaaagtattaaaagtatttatgcatgtagccaccttgaatgcctctaatttcatgtttaataatattgtaatacatatgcatattattatgttctcacacatagtttaaagtatagtaattctatatctcttttagtgataaaatcagttcgagaatggcggatgaaattaaaaggaggagagaagaggacgatgatatgatgctttttgtttttcctgcgatgtatatgctgtgcggtacgacaaatagtgagaaaatacctagacatatctcaagactatccggtaaagagcggcttcaagaaatccttgaaggacatgtaatggattgtaaagttgcattccgcatggagcctcatgttttcaagacaatagcgaattatcttagagaggaaaagttgttaaaggatagtagaggcttgaggattgaggagaaacttgggatatttatgttcatgctcgcccacaatgcaagctttcaagatctacagtatgaattcaagcatagtgggtctacacttcattggcatattaagtctattttcaagataatcccagctctcacctatagatttctcaagcttcctcatgccgaccaaacgcattggaagattagaacaaatcctcgcttctttccttacttcaaggtgaatctggcactcaaactagaaatgaatatctattccttttccaattaaataactcatgcatattctgtccttttcttccctttttgctgcaaaattgcataggggctattgatggcactcacatttctataactatagatggagagaaggcaactccttataggaacagaaaagggactttgagccaaaatgtgatggttgcttgtgatttcgacctaaatttcacttttatctcatgtggttgggaggggtctgcaaccgatgctgggtccttagatcagcaatgaatagtggctttcaagtcccaaatggtaaattttttctagtagatggtggttatgccaacacaccacatttcattactccttatcgtggtgttcggtaccatctaaaggagtttggacgtggtcatcgtcgacctagagactacaaggagttattcaatcatcgccatgccattctgagaaaccatgtagagagagctctaggggttctaaagaagcgatttcccatcctgaaagtaggcactttccatcggataaagaaccaagtgcggattccagcaactgctgcggtgttccacaacatgatccggttgcctaatggtgatgagggctggttggacaaccaacctgataatatagaacctactaattttgtcgatctaccagaaggtgacagtgaataccaaaatgatgtgccatctcttagcaataaaatgatcagtgggaataatattagagatatgattgctaagaagatgtgggaagattatgttcgtaactagcaagaatagtatagataatattttggttttgcatgatttgtatttatttatgcaatcaacatttatgatatggacaaattaatagtaagcaacgtagtttgtattttctcattcaataaaatattgcaatatagttatgatgtttggaagactatctccgaaagcaagcctattgcagcagcaacaaaggcatctacaaaagaaggcatcaccaaagagctgtagcatacagaagaagaaggtttctccaaaaggtagtatctaacttgtttttttgtgaagtattttcctttcatattaatgattacaaattttacttactataatctaattttgtctaatagcttaacaatcaagagcttcatggaacccgggactagaaaaggctttagttgatttacttcatgagcacaataacccacattaccggtgccaaaacgggtggacaagtgaagcatggaacaaggtcgtcaaagaatttcgtgacagacatccctatgtcaccatgaataagcaacagatccaagataaggagaaggagttaaaacgagattataggttgcttaaggaggcaaggaaacagagtggagcttcttgggataatcaacggtgcatgattgttgccgatgatgctgtttgggcaaacataattacggtatgatattttgagcataattgttttgtcctcatcaaatcactattatttgtattcatgccataattatctgtttttgtatcttgtgcagtcaaatgagaaagtaaggaagttcagcaaaaacaaatcttttcctctctttgaatccttgggtgaactttatgatggtaaatttacttgatgccataattctttgattccttgtgcttacgttcagtgcagccaaccttgttatttgttttcttctctcgttgtttggcactgctaccttctttctttggcttcttcacatatcctgcacctgtactatgttccttttgtatgatgtagtcctcttaggaaacaacagtaacatagctgattagttatgcatagtgacatttctcatatccgcatattggaaatcaatgccaaattatttggttgctcatgatgtttactaagattgaggctttaaatggctgattctgtttgctagtgaacacattcttttttggtgcagtatgatcaatgttccattagttatgcatctcccttctcggatctagtattttccctaataggtatatactgaaacttttgtatgggtagtgaattgcaaccttttttataggccaaactgcgagggcaacatgaatttcacttctattgagccattccaacatgctactctcatacaagtgaatgaatatcttgagagaagtgactcttttcctgatgtaaattgggttgctgatgatgatgagaccactgaagttcaagatgaagataatgcagtggagcatgaaaatcagggaagccacattactatcacctcaagagctaatggagaaaagaatgtcaagaagaccaaatctactgagagagagagagagagagagagtagaaaagacaccgaagaggaataagaggaatgatgttgttgatatgatggaaagttacttggagatgagaaaaagacaatctgaggaggaggaagcaaagaagagggaggaggaagcaaagaagagggatgaggcaagcaaggttgaagattgctcaataaggaactgcatcactgttgtggaatcgatggaggagctctcaaatgaagaaaaggtcaaatcttttggagtattcaaggacgtgcagaatagggagatcttcatgagtgcagggcctatgactcgtcttatatggttaagaacgatgctggtaagtttgaattactattgttactagcataatcttaatttgtgcaattctgaaattcaattcttctacacttaaataggtgcatttttttagccacgttgcactttgtttatgatgcgattgtgtaacaatgcagaccatgtaagaatgacctttggaccaaaaggatattgtctttccaggtacccgttcatacttttataattttgacatgattttcatgttatatttatgtcaggtttaggctgaagttagcataattttgacataattcttgttagtatgcctctgaacttttataattttgattcttgtcagcatgccccctctcttctgtcatgcagccatgctagtgtgtgtgcgcgcgcaccactactactagtacatatctacatcgatctacatacattccttgcctaccaccttcttcctaaaatcaatctatctatctatttatctatcgatctatcatgcgtgcttgctgtaactgattaactggcagtgtgatcatctctctctactgctgctacatatatgcagtgctatgctgcaggtataatgtgctatgtctgcctaccacaaatctaagctaattgtgacatggtaataaagcaggtgctagagtgattctctctgtgtgtgtatgtgagtgtgtttgatgtgtaattgtatcattgcttgtgctcaacaaaaacttgagtacaagtaaccatcttttgcatatttatctgatttgattcaagttcattttacctgttgtttagtttacatattagcaatcaccattgtctagtgtctaagacttgtttctttttggttgtatagttccatggcccatttgctagttgtgcccattggaaggaatcttttgcaagatagttcatagagaccgcttgaattgtgaaatgcgatggatgaaggacaatttttcctaactgcttcttaattcatgtagctgtgatggttgcaggaaccatttttttctataggattaacacttgcttgatcagacatagatatattatttagtttgatcggatagagatatattacgttcaaagaacctattttgtagcttgctttgcacaatggcaattggatgtttactgcctgtagaatttaatctatccaaaattataatttttaatattctcgactatttttagaatccatctgtggtaaatccatgattttctatctttacgctttttagaattattttgcacgttgaatttctgttccattttcatgatcgttttttatcttgtcatttctgaattattttgactttcgtgaccttccagctttttaaattttatccgaattttgcatgatagtttctcacgctgaatttgaatggtagtaatcccttctaatctcacctctaatcccaccttctactccaaattgctagccaacagggaaatcccagctagcgaacaggggaatagaggccaggagattgggggaacaaggggattggggggaagggattgggtgtggggagcggggacaacccaaaccccacgtgggttggttttcctttggattatttcccacagctagcgaacaaggccttagggggtgttcaatagtagagatgagtatggtctaaacaataaaagattatttagaaaccgtgtctttacaatacttgagacgataaatactctaattattaactcaaaaaatattccttttgttaatattctttccatttttttaccctcatgcaaccatatttcaatattacggtgattaagagttgttgttaagccattgttctgcataataacgatgttttgtctctcctatttctctttcttccatgtcaacaagtattcctaattaacaacgctaaaagaccactattgataaccattgtacatgtcttattttttataatttctgataatttatagttgtagaatctccatcttaaaaaatagttatagaatccaatgaatagaccacaagcataagctaatttccttaacttttctatattttcgttaagctacgttcttatcagccgcttcttagaattaaagcttcccaaaagacgcttttcgtggccacatgttatgaagtaactggttggctgtagttgggctagcataaacatcagtcacgagcaatgttttaaatagcgggctaagacatttcgtgattaatttagcgggctaggttatttagtggttagcttctcaaacagctacagcgtacaatttagccgcaactaaattgtacatgagagcaaataactagaacccttcttaaaccctggtcacgagaaaatccagaggagcttcacattttgtttaggcaggacgttcaccgtaatttcctcgtgtgattgcggtttgttgggataagattgcaatttgtatttttttttgttgcgaatctccaacaaaggaggagataatggataatgtttcaccgtcatcggagattaatttccctccttaaaaataaaaaacacacactaatttttcggtaattgcacgggttaattagtttcacaaaatcgatctaagcttccatgctgcgatccattctccgccgtcatgcaggcggcggcgtgagccggaccatgtgttcgccgccgtcgcgttcgcgtgcgtacgccgcctccggcggcacaggtggtggccactaccgctcccgctgcctccgtagctgcagctgcgacgagcacagccggcggcgacgccatctctacctggtgctggatgactggaaggaggggtacagcctgcacaagctcgacctcagccatgtctccggcgacggcggcgagcacgagcacaaccccatcaacccgcggcggctccccgcgccgctcctccgcctaggtttccggacgctcggctcgtcgccgcgcgtcggtgccctgggcagcaagatcgtcttcattggtcagcgccacccagatcagttcaccagcgccggagacgacgacgacgacggcgacgacgaacaggaacgcggtctcaccctcgtcgtctacgacacggcgacggcggcggtggacgtctcgcaccatgtccccgacgatgtgcgcctggcatgcacctgcgacgccgtggcggccgggaacaggctctacctgctgctgctgtctgatcagtctcactttgagcgctgcgagacgaccgcgccgttggcatgccctacgttgagaaagtggaagaggtggccaccgggaacagggtctacttgatgctgcctgatcagtccgagcgctcgccgccgccgccgccgccggagtccggcagcccagacctcgccgtggccatgcgctacctcgagaaggtagagcaagtgtacgacgacgaggtggaaacagcggacgacgacggcgacgacgatgagtacatggacgcagagaagaagaagcacgtcgtcgtagcgtacagcgagaggttgacggagcggtggtcatgggggagcacctcttcgccgccgccgccgcccttcggcggcggcaggcggcgcatcacggggtacgcgttgcatccagacggccgcaccatcttcgtctccgtggcgaagagaacacccgaccacgacgacgtcggcgaccgtcccgacgaggaggtcaccttctcctacgacaccgagcgcgccgagtgggcgcgccgcggcggctggctcctgccgttcgacggccaggcccactacgacgccgagctggacgcgtgggtcggggcgatcggctccagggccggccctcggctcgtcgcctgcgacgtcgtcccggcggccgcagccggagatcgccgcccggcgccgccgccaccaaggtggacgttctgcgagcagccgctgacgttcctcggtgcggagagccatcagagcctgggcgatcccaagctcctccccatggggggcggcgcgttctgcgtcgtcgtcgagagcgcgccgcgcggcgccgactcggtcggcgacggcgacaagctcctgctccgcgtcgccgtgttccgcgacaagtacggcaagaacggcgagctgttcatgacgacggcggcgggcgggcgcggatcgtgccagacgcacacctacgtgcggtctcgctatctcgtggatttccatgcgccagcgttctggatgtgagcaagcgaatgagtgagcgattccttggcagaggctgtatcttgcaaatttgcatgcgtttcatgaatttttttagaaataatattttttaatagaaaattgtaaaaactagctgggtggcccgctcaattgcgcggctagcacccatacaaaattatatatttttaatatgattttacttaaaatttattaaatagttatctcgttgtcttgagactttaaagaccaaaccttatcatccccgtgtttctaattttatgatttttaaaaatcacatcaattgctatcccttacttatgtcatatccttctttattatctggctcgatctacatggtttttattcattctctttggaaacctttaaaaattggatgttatactttttagagtttattgtcctgatgggtttcgtttttataatttatagaagtcccaacaaacgctgtcattatactcctctgtggcctctccattgcctcttttctttattgtcattgatattttcaaaatagaacataattatcgttagggttcatttttttactttctagaagttccgacaaaatgtcagcggttttgttagtgtactcctctacagcttgcccgctgcctcccttctttattgtcattgagattttaaaatcaaacatgattatcattggagtttatttattttttactttttagaagcgcgaaccttttaaaattggaccttatagtttttataatttattgtctcgttggatttcgtttttttatagtttttagaaatctcgtcaaacactgtcactatactcctctacgacccttccaccgcctactctttattatcattgggattctaaaaatcgaacatacacatctttggaatttattttttactttctagaagtcccaccaacaattggcggcgctggcattgtactcctgtacgacccgcccgctgcctctcctttttattgtcattaagattttaaaaatcaaatatgattattattagggtttatttttttactttctataactcccgccaactgccttgaccggttgcttcacgacctgtccgtcatccttccttttaatagtcattaggattctatctggtgttttattaatagtttttagatgttccatcaaccgccgccactctactcctttataggccttttacttaattaatctcctcgtgtgtttgagatggtcttttcttgcaatagtttttattttttatcaccaatttagttatttataaaaatatttataaattgtatttctagttgaaatcttttttttctttttctaatttcagattttattttattttttatttcgaatttcaactaatatcgtattgtgttcttttaatttattttttattttcaatttcagtcgtttcaaaattgtatttctacttgaactctctttttagtttatccaattttggattttattttatttttcattctgaattttaattaatctcgtattaggtttttatatggattctatttcaaaattgtattcctgttcgaactattttttttatttttctaaaaatttttgaatttactttattttttatttcaaattttaattaatcttgaatgggttcttatatggactcttcttctaaaatttcttatttttaattccgaatttcagttcttttaaaattatattcctacttggactctcatttttttctctgattaatgtgggaatttctaacctccacggcgaaggtaatgcctcctttcaaagctgatttaataatatgtttttctaatttcttgttttattttattttatttttattttaaattttaattaagaaacggggtgatagaatcatacacgtctaatcatattcaatggtgttattctgatttgatttccacagtcaagttgtgtcactttgcaattggaattatcatgttgctgttaaatccatacacacgtcgattcgtatctgactcggtctgccattgcaaccaatgtgtccgtctctaattcactttacgtaaacatactataatttttttaagttttctatggactcttattatatctcagccactaaaatctaaagggaccacaatctaacggtcggtattttttctttttcttcgattaatgtgggaatttctagcctccacagcgaacgtggtgtctttttttcgagctatcttaataatataataatagatagaagctgataagccaaaatcacaagtttaatatcctgttgaacaaccgagcctgtcgaactatggttgttcaacagggtagttggtccactaaaaaaataaaaaagtacttgaacagtgttgcgcagtgttgggcaggggccaatcgaacttccaatgttcaatatgtcccgcatgaacagtgttgtatagtgattgttctcttttttaaaatttttttatcctatcgaattgtggttgtttgatatgtacccctatcgaactataggtgctaaatttatgattttagctgattaacttctattttttataattttttattagaataatattatttctctaaagtttcagtttcatgttcttaagggttacttctttcgtctcaaaataaaatagcatatttcattcagtactaagttgctttattttaaaacggacaaagtaaggaagataatcaattagtggatgttcattcccgacgtcaagtagatcgatcggcggtttcttcgacggactctgaagcggagcaaggcatcgtcattcatacgtacatatgtattattcttgtccataacacaaaagatacaaacacagagcaagtcatatactatatctactctctccgtttcacaatgtaagtcattctaacatttttcatattaatattgatattaatgaatctagacatatatatctatctagattcattaccatcaatataaatgtgtgaaatgctaaaatgacttacattatgaaacggatgaagtacacaataaacaaatacacgctgactattttttggtgaaaaatatggcaatatagctactctctaaacaaattaaacggcgaccaccgcacaagaccttgttggacccacccacccagcactatactaccaacggccatctccatcgcatgaaaacaacatagcatcagcaaagaatcaatgattgattgatcgatcgatggcactctctatagactatagactatagagggaaaaaatcttctcgatttctacttactcgtcatgccatatagagaaagaaaggaacaaagaaagatatttctccctctatttcatattataatttatttgatttttttataatcaaacatttttaaatttaatcaagtttatagaaaatataatattattttcaacacaaaacaacatattaccaaaatatatttaatgttagatttttttagggaatatttaatgttagatttaactaaactaatttgatattttaaatgttgctacattttttttataaacttaaccaaatttaataaagtttgattagaaaaaatatcaagttgacttataatagtaatcagaggagtaccatacacgggcaccgctagagtgaggctcaccgctcacacaacatcacgaaagaaagaatcgtgttagcctggtcgttctttcgatttgtttacgtccacatgtgcacaagttggaacctcgcttttgttgtcctagatctggcacacaccaaccgatgtgtagtgtagctcaacattcgcagcatcagtgtgcgtgacaaattttcaggagctaggtgacatgggcgacttgggcggcggcggcgagacgaaggacgtcatcgacgtggaggcggtggtcgtgggcgccgggatcgccgggctcgccacggcgctggcgctgcggcgggcgggctttgcggcgcgggacggcggcggtggcggtggcgtcgtggtgctggagcggcacgccgagctgcgcgccacgggcgccgcgctcaccgtcttccccaacggctggttcgcgctccgcgcgctcggcatcgcgcacaagctcacccctcgctaccaaccctacgaaacgtacgtatacccaagcgcgcgcacttgaatcgatcgatcgccacgatggaaaacaaaagaaaaaagaaaaagaatcgaatcgaattgctgctgctgctgatgctgatgaacgcgcgcagatccgtggtgaccaacctcgagtccggagcgacgcaggtgtttcggtttggtgggcacaagagcaggtttgaattgatgcaaattaaaacttttttgaattcgtgatttgatcatttgaaccggtcgcgatttggctcgactcgactgaaatttttgaaggagcggcgaggtgagggtgaggccggtgcaccggagggagctgctggaggcgatggcggaggagctgccgccgggcaccatccggttctcgtccaggctcgcctccatcggcaccgagcccgccggcggcggcggcggcggcgaggagctcgctgtcgtggggctcgacgacggcacggtgatccggtccagggtgctggtcgggtgcgacggcgtgcactcggcggtggcgcggtggctgggcatggcggagccggcgagctccggccgctcctgcgtccgcggcctcgccgtgtaccccggcggccacggcgtgaggaaggagctcaggcagttcctctcccatggcctcagggccggcatggtgcccatcagcgacaccgacatctactggttcgtcgtcaacaacaccgtccccgcaggcaagccagcccaaatgcctcgaataaaaatttgttcaaatttgatgataagtttgttgcaaatgtgcttaattatgaattgggaatttaagttgttgcaatttttttaagtggagaacttttaaatctaactatgcttacaatatcatttcattgtaactatactataaatataatataacttttatataagtatttaaaaaattggatgtgttcggctatgacaattcaaactgattgtgacgtgtaaccaatttcatttgtcacaaacggttaaaaccagcacgtccgaacataaccaatatatacaactttatacgtaagttatataaagattataatatatataaatgtatgtcattacattatagatgcactgttaccatactataattatattttaaattacatttaacgttttctacagaaaaaacttgaaactgttttgttagtaatttctaatttattttttttttgcagagagagaagctgccggcgatccggagaagatcctacgcgaggtgactgacaacctgggccgccacctgccggaggagttcctggacgtggcccgccactcggacccggacaacctcacgtgggcccctctgctctaccgggccccgtgggccatcctcacgggccgggccgcgcgcgggcccgtcacggtggccggcgacgcgttccacccgatgacccccgacatggcgcagggcgggtgcgccgcgctggaggacgccatcgtgctcgcccgcgcgctgtcgtctcggtcgccgtcgccgtcgccggccgacggcgtggcggcgtacgtcgcggagcgccgcggccgcgccgcgtggatcgtcgccggcgcgtacctgtcgggctacgtccagcaggggagcaccagcgcccccggcgtgcgcgccgccgccgtcaagctgttccgcgactggatcttctaccgcttcgtcttccccttgctcgccgacaccatgtggttcgactgcggcgacctcgtcgcgccgccgccgcgcgacggcggcggcgaggaggaagcagctgactgcaagaagagccatgtacactgagaaagaaaccaatgtactatcagttgtacagtcactgcaggtgggaccggaccacctgtatcatcgtgacaccatcagcagggtgatcgatcgatcgatgacatgtgtttaatggtttgctaatcgcaatagttaccatttcgtttcattttcagatgtacaacgtgctcaataagcttcttgtgtgttttttggaagtgaggtagatgagatgtagatgtgatgtcatcatttgcagtgatctacatctgcaagctttttaaaaatctgttggggatagcttgtttgtttttgagatcagccacaaagatagatgctcgtcctcctgtgcaagcaagaacaggcgcaatgcatttccaatgtggcaaccacttgaaataccagaaaacaaatatatatattaaaatttcagcatggaatccactagctaaaggttgtttgcaaaaccagggtattactagtagcccatagatttcgcacatatatttactgcagactgcagacttccccctgggtttcacaacaaaatttgtctcttattaacgcaatgtctgttgccttcagtagtaagaatatattcagggttttaatcctgaaaaatgatctgaacatctgatacatcttgatctacctgttcttctcacgtgccaattaaacctagtacctgatgaaaagcgatcatctgtcccatacaatacattgtccaattctttggtcattaggccagcctgttcctgaacaaacacgttctgaacacgagacaattgaattgtaccacaaagtacctgagcacgtacagaaaatcaaaactggaaggccgtgtgttggtacagtgctacaaaccaaagagaaacccaatccgtttcaggccaacttgcacacctgacgaagcacctatgttccttgtcagctttctctctgggatcacaccagaaaccaccaagaaatgcttgcacacaatctaaagaacggacacaggagaagatagtcagatacacgtcgttggatcgacatgtagacatgaccggcgagccgttgattgattgattgatgtggagtgcaaggattgaattgtccatgatggagaaacaaaaaaagagagagaaaaaaacacggcctaaggctggggatcaggaatggagatattggctccctgatatccaggggtgtcatccggggaggcagctaagattgttcagttttagttagcttagctagctaagttagcagtacaagacaaagcttgagatttttatctgtcagggtctaggggttcttgcgtataaaggcttcaggtgaggtccattttaagccaagccaaagccgcatctggataagagaggcgattcaacagtgcttgtcccaaaaagatcaaggaactccaagaaaagcaaacagtgcttgtcccaaaagatcaagaaactcgaagaaattcatgtgcccatcacaccaaggtaagatcagtagagagaagaagaaaaaaaagacagaattacattgagcttttcgtcatctgtttatctgttcttgtatttgtgctcataatgctgaggattttggttgatttgtattggagcagccatggaatccatgagcattgaggaggagtacatcagcacgctgcacacgcgatccaacgcgcggttcttctcgaggagcaagcagcagctgtccggggtggagatggaggcggcggcggcggcggagcagcaggacgccgtcgtcgtccccgcggagttgcagcggatgatgcaccggaggacgtcgtcggagatcgagctagcgatggcgggctacttcgacgccagcgacgaggcgtcggagatctgcaggcagctgctggcgaacatcaagaacgcgcagagcaactacctgtccatggacagcttcctcgccaccatcgtctccgacagcgtcgccgccgcggcgacgacggcgccgctcgcagccgtgcggagcaacccgttcagcgacgcggcgacgcggagcagcttccggcggatccacgacaggtactcgtccatcctccgcgccatcaagcgcagccacgggaaggtggcgaggaagctgaaggtggcgagggccgtccggaaggcctcccgggcgtgcctcgtcgtggcgtgcggcgccgcggcggccgcctccgtcgccgtggccgcgcacctcctgctcttcggcctcctcgtcggcccgccgccatggcgctctgccccatggcgctgaagcggaaggtgacgaacacgaacgcggcggcggtagcaaggccggcgaggcggtggtccacgacggggtcgctgctgcggctgcaggagcagctcgacacggcggccaaggggacgtacgtgctggggcgcgacctcgacacggtgagccacctggtggcgcggctctccgacggcatcgagcgggagaacgccatggcgaggcggtgcgcggagagggtggccgccgacaacgtcggcgccgccgccgccgccggcgggaggttcttcccggtgcaggagatggcgaacgagctgaggagaagctgctcgagctcgaggaagctcgcggaggagctggaggagcacgtgtgcctatgcctcgccaccatccatagggctcgacttctcgtcatcaaagagatctccaagcaagcatgaactgaaaattaattacttgatacatgattaattacatctaggattaatatagtttaatcatagtgtacaaaatttcatgtataattaggagtagttgatagagatgattaattacagcttgtacataaattgttttttcttccttatatttagtactaacaggattcagggtaagtgacatggttagaaataattttgagaagatttcttaagattgagggtctatacaaagatcacagagttttggtctcattggccatgcccatgactcactaattaacattctttcgaaatattagcagatcatacatcattttttctttatgaaacgaattgagacatatgaccacacactcaagctgcttaatcacaaatatcagacacctcctgtgttcgctccttcgggttgggaacccaagcttctccacaacaaaacagagcggtacattaacatgtaacatgtgattaattaagtatttactatttttttaaaaaatggatcaatatgatttttaagcaactttcgtataggatttctttttacaaaaaaggcatcgtttagcagtttgaaaagcgtgcgcgtggaaaaggagagtagggagttaagaatcagctcttccaaacagagcatattgcagtggcataattctgattggcacatcaaatttaatgagaaattagccatatattattctatcaatccttgacccagaaacttgggcttgtgggttgcacttgggtccttctacagattttgttgcttgccggaaatttttgtttttcttttacgcgattagatttccgctctattaaatagatcagatatgtatcaactaaaagtgtacacgcgaatacatcactctggcacgcgcttaaaggggcggagtcaaatgacaaatatctagtctcatcgtaatcctatttataagcacatccaagtgtaaaatgagcgtaactcaattggttcattttcttgtggtggaaccaacctatttggttcagtttctcgtggtggaaccaatccatctgtattaatggatagagagtatttaaagtcgtgtgtctgcatgtatattggcgagatatagttatgactatgtgggcctacatattagcgatcatatctctttgactgtaagttagaggatttcaatatctcaattagcacttctctttgttacaatgcaaagttatagatcggagaagtactcttttttttatgccttattgtttcttacatgtcattatatatatatatatatatatatatatatatatatatatatatatatatatatatagaaggggtcatatgcacacaggccctcgcgtgtacacaccgtgtacaccaactaaaaattatcacaaaaaattttaggaaaattcatacatgtactttcaatagtattacatctacgtgcaaagtagcatcttcaaattcattctacatagagaataacaaaaaagataaaattctgacaaaattacaaccttaaagctgtcagattttttgttttttttgttacggctaaaatataatgaatttgacgttaaaattttaaccctaggtgtaatacaattgaaagtatgggtatgattttttctagattttttggtgacattttttagttggtgtacacgtgtgtacacgtgagggcctgtgtgcataggatatgttgccatatatatatatatatatatatatatatatatatatatatatatatatatatatatattaaaattgttagtgctccatggtgcccatgctccaaaatcatcccccgttccatccgtgcaaataaaaactgagtattaatcaaattagcgggtttaacccgataagaaatatttgtatcaggttatctcgtacctttccattttttcatttgcatgcatgcatttccaaatgaattacggattttgaatgtgattgtatataattagttggattgattgctttccatgtatatgaatttaa

SEQ ID NO: 7299 - DNA, 144309 bp, Oryza sativa
  unsure (1)..(144309): unsure at all n locations
gaatctttgatatgcaaggccaagataaacaccttagctaattaagtaaactcgaggtgaaatgaaactgttaggcaaataatcaaaagcccaggagcaactttctgagggcgttcgtgctttttgtaacattttctatcttccaaaatttaacgagaaagttactgagtaaagtatgtggttgctttgaaatcatggagctgacgtaatgttgttgcttcgttgttttgtggaatgcaagttgccatgttctgtgctggtggctgtgaattgtgacacatgaaccatgctttattcatgctcataagtcatcactattacttgtatgccatttactatgtattttcactgatgtatgttgtaatatacatgtatgcaacagtttattggaaaaaacagcggcaggcaaacgttgagataagttcaaacatcttaaaatgggtatgcatctgatgacagtaaatttctatatttataagtaaattaattaggtcataattgcatccttacaaatcttcatatatacgaagggctacagaaccatattggaccaaattgtgtagaataccttgctattaacagataaattaattactgtaatactaacttataggagccccagcagactcaccagtttaggcttgttaagtggggcaaagtgtcacgaactcagatttgagtcggaacgaactttctcctgtgactcgaattggaagggaaaggaagctggcttgaggaagaagaagaacagagacacgagaaagcagaggagcaggagggagattagaattgagtttgaggtttcagtttgaatacaatatttcatatctcgctctctcgcacctgccgactatatagcaatgcgccatctagtctctctcactgacagtggcccagcctttcgctactgggtccactcactcgacgggaagcgtgtgttgggccgcttcatcctttggatcgatcttgctgctgggccgctgttgccgtctcaggttgaacgccttgctcagatgccgccgtgacatcccctcctccttgagtggcaacttgtccccaagttgttgtagttggaaagcgacgacgtagctcctgctcattctcccaggtgacggcggcaggttcaccgccagaccacttgatcaacacttgttccaccatcttggatcctttgtgaacaaatcgacgatccaggacttgaagtggtaccggagacgcctctgttgtcggacgaagaacaggaagcctgggagacgctgtttcacttggtgccaaagcttgcttcaattgggatacgtgcaccactagatgaataaggctggaggagggtaacaccaagcgataggccacttcccccactcgctccaaaacctgaaagggaccataaaaacggaaagagagtttgcgatttactcgactgttgtacgaagggctgcagcttcatatacacccaatctcccacagcaaaaactcgttcagaacgacgattatcagcctgaaatttcatccgagtctgtgcacgcagaagatgctcccaaatcagagtttgcattttctctcgctcatgaagcaatcagcaagctcagtagactgacaagctgtagtagctgtcaacccaaaataccgaggtttgtggccatagagaacctcaaaaggagttgatcccaaagcggaatgaaaggatgtattgtaccagtattctgctaaggcgagccatttactccaatgagatggacaagcgtgcacaaaacaacgaagaaaagtttccaagcactggttcacatgttcagtttgcccgtcagttggcggataataagaggaactcatccttaattgagttaccgtggagcgaagtcgaggccaagcaaacaattgtttaactctgtgataagtaacatgaatgcctgaatgcccacccactgcagtagtatgaaggtttgctaaaattttctgttgcacagctgtattggtaccaatccatatacgatccttgaaatataacacaccatttctcagagaaaaattgggtacagcactagcactgatgcataaggtctgaaccttgctacacgcgtcaggatcaagtgagtaaccagacaccacttcctgaatccaatcaggcacagcaacagacaaggcagacaattccaaagtggcagaagaagggtacctggacagagcatctgctgcaccattatcagtgcccttcttataaatgattttgtaccgcaatcccagtaatttagtgagagccttgtgttgccagggagtggtcagacgctgatcatctaggaaagagagactgcgatggtccgttcgaatgaaaaattcagcgtgttggagataagggcgccaatgttcaacagccagcataatggccaagctcttcttttcataagttgacaagccctgatggcgaggtccaagagccttactgagaaacgcgattggatgctgatgttgcataagaacagcaccaatgcctttatcggaagcatccgtctcgacaataaatggttcagaaaaatttggcatggccaagacaggagcagtaatcaaggcttgttttaatgcttgaaaggctgcctccgtttcagatgtccaaatgtacaactgaccctttcgcagcagattagtaagtggtttacttaagatgccatagtgacaaacaaatttgcgataatacccagttaaccccaaaaagctacgcaattctttgactgaaccaggcaccggccaattctggaccactcgaatcttgtcgtcatccgtcgacacaccattaggagtgatgatatgccccagataggaaagacgttgttgagcaaaagaacacttactctgtttcaccttgagctgatgcttgaccagaatttggaacagttgtcgcaggtggttcacatgatcttccaaagttgcactgtaaatgaggatgtcatcgacaaataccagcacacatctgcgaagtaaaggagataagatgctgttcattccaccctgaaaggtggcaggtgcactggtcaagccgaatggtatcacacgaaactcataatggccactatgtgttttaaaggcagttttatgctcatctgacatcttcatacgaatttgatgatagcctgccctaagatcgagtttggtgaaccactgtgccctcgacaactcatccaacagctcatctataattggcagtgggtacttattcttcacagtgatagcatttagatggcggtagtccacacaaaaccgccatgtcccatcttttttcttaaccaatagcacaggagaagaaaatgggctggaactaggttgaattatacccttgtccaacatttccctaacttgctgttcaatctcgtctttttgagccggtgtataccgataggggcgcacattgacaggcactgcaccagggataagagggattgtatgatcaaaagattgagttggaggtaaacccattggttcatcaaagacagaagcaaattcttgaagaacatgttgaatcttgacaggaatttgttctgaagattctttgtcatccaaagaacatagctgaacaaaatgagcaactgctctcctgtcatcgaactctttcagttgttgagtggatatcatttggcactgttgcaattctggcacaattccttgaagagtgacagattttccctgccaacagataaccaaggacttttgtacccaatctactgacattggactgcactgcattaaccaatccattccaagaattgcatcataattggttaaggccagaatcttaaaggtggtgtagaatacatgcccttgagtcgtccaaacacaatcaggtaactcagctgtacaagacaaaacagctccattggccatctttacctgtgttgtagcaagaactaactgtacccctgacaactgatctgccaccttggaactgagaaaactagttgtgctgcctgaatccaccagtattagtacctccttaccctagatataacccgaaatcctcattgaacccacatgttctgccccttgtattgcctgaactgatacaaccattaccacttgttcttcagacgtaatcaattcagccgattcagaaaaggaactctctccaattgcatctaaaacagagaataattcctgaactgcgtatagctggacaagagtttgcgcatctatgagtcggagaccacttttcagcacaaatgtaacataacccctgagctcgcctttgcgcctttagagcaaccatcttgttagaacccccaactggccgaccaccatcaattccctttttgtcatcgacctttccaactgcagatagaactcctttgcctggtggtagaggaagtggcaaagccccttttaatactgaattagagcgaatgtgcattcctcctttagagtccttcacaccagactccggtggagcttccagcacttcctcctgcaaagacacaatagccagagcagactccaaatcgtggagacgttgtaacaatactgcatttctaatctctcgacgcaatccttcagtaaagcgatgcactagatactttttgctaatgacaggatcataggacaacaattggttcatcaactcatcaaatttctcatagtattcccaaactgttctcgactgtctaattgtatccatttgcctaatcaacacatcatgctgatccctatcaaacttagtggaaactgctatgcaaaaatcatcccaaacaggaaaccgcacatgagccctagacgaacgtaaccaggatgctgctcttccatagaaatagatggtggctacacgaacccacaaccctggataagtattgttcacatcaaaatagtgctcgcatctcatcctccaatcctgagggtccgtaccatcgaattttgggaaatctagtttaggaactctatgattatactgtctaccgccttgttcaaaaccaaactccccaacctctgaatcagatttgaaattctccaacgaatgcaaaggaactgaaggagattcaaacgtacccttgtccggagttgggatcagagtggttaccactccagatgccctcctccggaaattctgttgagcgccgtggccatgggcccaattgcttccgccttccgccgcgacttgatgtgaagaggtcgtcggcgtaggcagcaacagcgccttcctttcctcgtccgtcgacggaacccgaggggaaagcgtcgtcggtgaagcttgcttcggtttgccgaggagatccagctgttgacgaagtttgccaacctcgtcgtgcaaatcctgaatcgccgattccacttgaggccgccatcctccgactcctgcatccagcttcgccacggttgctgcgtctccgcttgcttgtcgttcaacgacttcagcgaatcctggatgtcgccgagaattttgccgaagtcgaggttctgcttctccatggcctcaacctgcgattgcaaatgggacgtgtaccttggcttctccaggatcgatgctctgataccaaatgtcacgaactcagatttgagtcacaacgaactttctcctgtgactcgaattggaagggaaaagaagctggcttgaggaagaagaagaacagagacacgagaagcagaggagcaggagggagattggaattgagtttgaggtttcagtttgaatacaatatttcatatcccgctctctcgcacctgccaactatatagcaatgctccatctagtctctctcactgacagtggcccagcctttcgctactgggtccactcactcaacgggaagcgtgtgttgggccgcttcatccttttggttcgatcttgctgctgggccgctgttgccgtctcaggttgaatgccttgctcagatgccgccgtgacacaaaggaaacatggaaaaacaaagctatcatcttgcaacactgcaacttgaaaatagctaggaaaaggaatagcagatacaactcacccagtatcagattgcagcaacactgcaacagaaaactgcataaggttcaccaggccaaatctgcaacagaaatttgctcggctcattaatcctattaaaaaaagcatacaaaagccctagaaatggagaatcttatgtgcaacatatcatatacgatgaacttaggcataggctgttgcagatatacaaactccatgataacaagcataaacaatattttgaaccaaatcaaccagtgactgatcgactgctatacattaacaacgacttttgtttaagttgcatgaacgatatgttgaggtgatgtgaggtcattgatcgatctcgcagttgtgcatcgtgaaccaaaggtactatctccatgtttatgactagtacatctgtacgcgcagagtaattgcaatacaatccatcatccatggcatggttgcatgaattttaaagagtcatacaaaccctatatagaggcagattgaatgccctaaaatgtcacagtttatcagctcatctcatcccgggtagcaaattcagaagtcctcaccacctattcatatgcaaaattgatggcagacagtgaaaattcatacccggcgctgcaagcatgaactctacatgcatgatgcagcaagagagcgaaatcccagaaaaaaaaaacgcaccagagagcaatacaacgcatgcagtcagcagtctcgtctacacaattcaaaatccggccctgtttattttgtactactaccgatcgggcacggatcagcacaaatcgtagcgattccacgcccaaattggaggtccaaaccctaacacccagagatttaggaaattgccccccaaattcaaaacaaagtctctatgtataatcccaagctgcaaccatcaaaccatgaacaaacccaaaatgtacctaagcgatcaggccaaccaggccaggggccagtgcctctccgatccgcgcgtcgtcaggtacagccggagcccggaggacatcacgccgcggcggcgccttctccctcgcgagataattttttttttaagacttttgtctcgggaagaaacttctagaggtttctagaagatactggagttggagaggtggggggcgatctggctgttgaggaaggcaggaaagccatctgtttttttttttcctttcacttccttcctgggctttatttacaactatcggcttcgtgaggcccaagggggaagaagaagctttcaaatatgggccggaatctggcaaggccctggcccaacaaagagagcagagtccaatacagaaccagccgattcgcctcctcctgcacaagctgaagctgcaacgcaaccgccgcctccgccgctggcgcgctggtcggcggcgatggcgggcggcgctggggggccggaggatcttgggaagccggagctctctcccctgaggctgtagcccgttgctgtagccgcggtagtgctgtagtggggaattggagggggggcaaaagggagatcgtgctgggatgggggcgagcctgcacgcgtcgtgcttctcgcggcgcaggagcccgaagacgagggcgaggtcgtcggagagtgcgaggctgccatggccggcgtccttgcgaggttaagcgcctgcccctctaggcctctaacttcgcatcctctttcttcctccctatgttgcagaatcctcttacgaaaatgttggtgggtgttccaggaaatatcaacaggaacattctttgcagatggagatggaattggtaaaaccttctttactattcagaatgttttcctgttagcactggcttgagcattcttacatatctatgttctgttctgttacatcttatataggtgaagtttgatagtttgacactttattcgttgccattttgatcatttgtattgtagtgtacatgcaggtgataattggggatgcatttttatgtcggaatggaagaattgagtagttgtttgcaaccttcagtacaatctactggtgagtagtttgtcttgtttgagtctgacagtccgtacgagactatgtcaagatcaataaaagcatgcaatctattcatatgcataattagctagatgactttgtacctttgcaggtaatttgtttcattacagatgatgcagttttgggactgatgatgaatgataagttagctagctagcaaacattagaagctaattttaaagttgctgaacttccgtagtaactaaactctgaaatacactatctaaagtatgtgacactgcctgataaaatgttaaggaagtgtaagcatttcttgatacaaatgctctctcttatttgctgatgatctaatctaatatttattttgctccatataattcatgctcatgttagtgaaggtataaattgcgagcactttcaccattaggcattaagtgctttagcctgtgttgctttacttttcctgtgaatattatccacacctgattatttaaatcataccctttttgataagcatggatgtagtctataaattctataagataaagcttaagttcagttttgttctgatagtacagattagataaagatggcatcgattcttatctctgtctatcgttttttctttcctgtctagtatccatcttcaatgtcttttagcaaggaggaacgaagaaaagaaacatattgtatattttaccttttatttttgcttatcttggttctaccatcaatgcttgcactattttgtctttaccaatggaaaagcgaagcactgcacatgtgtaagttaaaggaactcttttggcttacttctgcaatttcttaagtcttaacatgatataatggcttgatattgttgagttgccagttttgtaatagtagtttgagtcatatataagtatgcattcatttttggaaaaaaaaatatggaaagatgagagggtgagaagtgagataggacgtgggatttctcttttgatgaagaatctagcaaagtgaagctgacaagcatagcacagatcaacggtgcttttcctctttgctttgacaaataccaaataaggctaacaccgatggtagcttcaaaacaagaagatcatgtaaattcatccttgttatcaacaaattgcatgcattatcactgagaaaatatctgatgctgtctgccgaattgccaatattgtcaatttggggaattaccctataatacataaaagactttgatatgtaatacttgctgctgatgctaaggttctgagttgaaaactgcaacaagcaaataaaatacattttacttccattttttttctgcatgggttactttgtctcattttgctgtgtggatactaaagtatatctcttgcttgtaacttaagattggttatatagactaggactccaaagcataaagtgatgagttaagataacattaataagagagcttggtacagtcatatcacgtacacatagatgtccacagctgcatcactgaggaagtgttagtgcaatggttagaccaagaagtgcttgaggcaaaatgtgcaaacaattttgtgtatatcaggaatcgagtattcccaacctttggcacatacatgctcttgatattttacatgaaactcatatgatagcttcttttttacagaagaataagttgaaactaaaaaaaaccttccagtgattaccttcatggtgtatacaagctattgcctgaaaattttggttgatcctaactctcttcaatgtttttttctcttttggggcactatctcatctaaaatccctgcgattcaagtacctctctcaggcattcgatccttcgccatttgcgtgctcatctaactatatacagacacaaactcacagccctttagtccactggtggtatatgtatttgacaccaaaatgttgttagttctcattatcgaccaaatttaggaaatgtgatttttatcatttatatttaatcatctcaaggggtactttgaatgactacttaagtaatttttttgttattacacattgatgagacatcaaactatgctgacttggataccagagtggcagttggactgctataggcaaattgaaattagcatgcagctctggggaggaaacatcactcacggtttatgtaatgccttaagatcacacattgacttatttttgtgccagaattgaatatgaaatgcagctgtcttggacacctgagtgggctttgaggttgtatatgtcaatactgcatgaaagaaacatgcagatttgtggacaaaggagcactcatggtttttataatgcttcaagataacaagtttaacttatttcgtgttagaattgcttttttttgtcggctaaataggtgctttaccagtaggattggtgttgatggcccaagcagctctaaggcgacaagtcagcccccaattcgctagctagctggttctggcgcacacaaagtggaggggatcaaaacaggcaatagccaataaataatttgtttgtgagtgctctaagaatatgtagctgctccatttgctttgtgtttaagcttaaatgattcatctttcagtacttggtgcagtctccttgttcctacagttatatagttgaacttcaagttgcagaatctacataatttatatcaagtttgcaattgattccctttggatctgttaattttaatgatgaaatttgatgataaatccagtaaatttaaattgacaaacttatctgggattttttttctgcatttaggggtactgtttccataaattaacaagaaagggcaccaacgttattttgttttttcgccgggaaggccgaaggaggccatccgagtatattaaaaaggaataaagttacaagaaaaaactcgacagaggctgtcgaggtcggaggtgcatcgaaatgcacaaccaaagccacatgctaatcacacaagcacaacccactgagagaaaaacctagcaccgagacgacccccgctatgcgtggccgatcgccgccgggccaacgacaacaccacaaagacgggactctaaaagtgatgcccctaaggaggtcacgacatcaaggatgccgccatcgcccatctaaggagatgtggttttcacctagagaaaactcgccaagggagaaaggtatccttgccagcgccctcaagggggttacgacgcccaaaagcgtagccgctgccagcccgatgaatcatcaggcgaggctttcacccggaaacccttcaaccttgcttgaggttcgtcgcccatcaactcaggaaccacctcacaagcagatcagcacgaggcctccaccacactgcgccggcgcccctccacctgccgaccaccacacttgctgcatagagctgccgccaccctaggaactggcccagacttcctccgtcctgccacccgtcgacctccttgccagctttagccgaaggataacccggaattggacggcgtcgtgtcggcggtctgagctcccctcgctaaccggctgccgcctcaatccaacatagaaactccccacagagaaggggaggagctccaggaagggcgagggtgcaggctggcagcgaggaagacgacccactgccgccagctcccttagcactgccatcactcccttcactccctgcctcagggcctacgagccgccatgcccaccccaacgccaccaccgctgcaccagaaggccagaccgccgccgtccgaccgcccatgctgcgccgcgccgaccacgggccacgatctggccgcgccctccgggaggaccgccgccgccgccgccatccatccgcccaggccgccgcccggatgcagttggccccgccctccatgagggctgtcgccgctgcgccaatccccggccgccgccccgtgctggaccacggtgtcccacggccacccgcgccgagccgcgacacgcgcgccgcctctgagccccggccgtcacgccggggataggtgtaacaccctgaaaattcgacgacaaaaatctaaactctaaaaatgcggattttcaaaaactttttaaataaattgcatcatgccgattttattcgattattttattggagtttgggttcggagtttataaatcgcgaataatggataattggttaggaataaaccctaaaaagtaaatggacaaagtaagtaattaaagtgcaacttaaaataagatttggtgaggatagaaatgagtaaaatattattacgaccatatttatatccatcaaatttaaaagcaatggaatgagaattaactctaattaagttcaagtaaattacaataataatatataaaacatggaataaattaatctagaatgaatccatggattggaatggcacaaatattgagtatacttcatttatgcaaaatttgggaattaaagaatcaaatttaaataataaatgggccaaaatcgggttaattagaaaacggcactgttcattgcacctaaagtgttcgacgaggtcccctagccctagcccctcctttgccgcgttgccctcgcgccccgcgcgccgcacgccgctccacctcccctctgccgacgccgtcgccatcaccgcgcctggccgcccctaaccccgcgccgccgtcgccgtcgtttccgtcgcgtcgccgcgccgccgtccatcgccttgcgccgcgcaccgccgctaccgccgtgccgttgcgcgtcgctcgccgccatcccgtcgcgccgtcccatcgcgccgcgcgccgtcacgtcgccactgccgagccgtcgccgtcgtcgcctcgcgccccgtgccgcgccgctcccccgagccccgtgccgccgctactaccgcgccgcgccgcccgttccatcgtcgcgcgccgtcgccgttcggccgtcgcgtcgccgctgccgcgccatcgccatcgcacgtcgcatcacctgccgcgccgcgcccccgagccccgtgccgccgctgctgccgcgccgctgccgctcctcgcgccccgcgccctgccgcgccgcgtcgtcgtcacatcgccgcgtcgagccccgcgccgcgccaccccgacgacgccatgaggccgccgcccctctcccctcttccccattatctctctcccccctcccttatataagcccccctactcccactcttccccttcatcctcacctcctctcctgtacccacgccaccacgccgccgcgccgtcgcatagagccgccgcgccgccgccacgaagccgccgcgccgcgctgcaccttgcgccgacgtcaccaccgtcgccgtcgccgccgtcgccgccaccgccgtcggtaagccgctgcctccaccacttgctcggccgccgtcgccgccccgggtagcagagagccgagagagagagagagagagagagggagaaaccgagggagagaaagaagaaggaaggatgagagaaaccgggagggagagggagaaggaaaaagaaaagaaaagggagagagagaaggaaaaagaaaagaaaagagagagagagaaagaaaagaaaaagaaaaagaaaggaaggaaaaagaaaaagaagggaagaaaaagaaaagggaaatagataggaaattagagggagattagggaagtttagaaaatttaaaataattagcatttagttatagactagttatagacgtagaattgcgaaatttaatataaattatggattattcttggtaatttctacaagaaatcaattcgcggtagtagtttaaatgtaattaagaactaaacgattagatgaattcttatagactattatagattattttgggtaatctctataagtaattgatttacggtagaaattcggatttaatcactaggaattttagacgtatattatatttagtcgtttagtcctagactaaaatttaattgtataatattataagataattttaggattccgtccgatatttagcttgcgatagaaatttccaacctattatatggatataatgctcgggtagattaaattaaaaacttatgataacaaaatatttatacccgcaaaatagtttaggatataaaaatcgaaattgggtttgccctagttcgcgaatagtaaagttaatataaaagaatcgacttaagcgttcgacttccatttggatttatttggatttttatttgaattctaaccgaattcaaatcaattttcacacgtaactatagagcccgagggagttgcggatccaagtgaaggccaagacccgcaagactttgagcaaggcaagtcatcactatttctttaacatgttgatcccaattgtaaaattgttttgtttacaaataaaattgcatgcaatgatgaacatcctacttgtgattatgccatgccttgattattgtttgccccttattccttcgtaaccatgtttacgtatgagtccctagtcaattatgacaattgcttagaaatgctattctagaatcatgcatactcatatttatcaaatgatgcttgggcaattacttttgggaaggtaattgagatgcggcatgtggagacatgagcgccacattgccatgatgttgatgacatgatttgtgaaaggagaaataaaattaaacaattgttttcgactggggtggacgaaggatttgggtggtatctgggaaaggctagtaccgtccccggtcaattaaggaccgagccatgaagttaagcatgaaacgacccccgtacaaccgtacttctcgaatgggtatagacctagcggattagatagccgagcggaggcagtatccctgcatagatggttcacccctgagtgaggcaggtgcgctacgatgggacagccgttgaggtagggccgagaggcgtgccctacatcggtgtcgccattggtaggactgccatgagtgtgtgtgagagagaacttaacttgaaccataatttaatatgtgtgagacttctcttttccgggagcgccagaactcctcacactgctagaaacatggacacctagagtgcatgaggatttaagttcatggagcggatactgccaatgcgaggttatcgaaaagctttgccgtgacgcgtctcatgtgttgggacgaggctcatgtgttgagcagtcgcggagtgcgggtaaagtgtacatccactgcagtgtgagtaaaccaaatctattcgaatagccgtgctcgcggttattgagcaccgggacatgtattacacttggctagactctaaattctttaacttgtgtgggatgggatattgcatgatgatttttatgctgatggagccacttcctgagaggcgggaatatggacgtcctcagaaaaccataacgactcaatggcgggaagctatccttgggatcacaatggatggtggacagaaccatcattatttaatatgaacactggtattaaaacttgatcagtctatgctaggtcttaggcttgtgaaaagaattacaaaacttgctttgcgcaaaagaaccatagccatcctttgaattcctctgtcatgtgcatcattgctgtggtggcttgctgagtacggttggtactcacccttgcaaatataatcagaagcgggagatgaagcttcggaggatccctatgcctactactaggagggagatgaagacgatggcgctcagtaggtcttagttacggtcgttgcctgtggcaatggcgtgccactgccttaactccactgccttacctacttctgtttttggaatgtattccggaccgctcggtccgatgatttaagactgtgcctgcgggcttatgatgtaataattcgtactagactctcgtgtatgtgcacttgatatttcagctatgagttcgtgtgtaccagactacttgatccagggaaatggtactgtttacacgattgattcctgttataaaaacgggggtccacaatagggcggccagatccggccaccgccggatccgcccgccgtccgccaggccgcgccgcgccgccaccccgcgctggcccgcgacgccccgcggccgaccgcgcgctgccggcgagccctggccgtcgcgcctcccgatccggacgtggggcggccaaatccggccaaagaagtgccagatccgccgccaccccaagctgccccgccgtcgtcgcctctggtcgtggtggtagacgtcgtcagcccaactccgtcctcctcgcaccaaggaaagggttgctgcagtggaaggcctcgccgccgccttcccggctcgccgttgacgagctccggcggcggcgaggtgaagggagaggaggggggtggcggcgcgggcggctagggtttcgccccccgagccgcccgcgcgagagcgacgcgggggagagaggaagagctcatctgtttccaacgttattttgttgctgggctggccaaagattaggccgactaaatttctttaagattaagagtttgtacaactgtacaagtgttaaatatttcgacaagaagctgttgaaattgaatggagtttgccgagaggcaccctcccaaaagcaaaagagattacacctctgttgttataacgttatgcatgaaggtattcctgtttctcctttgcatatatagttaactagtttattcacttcctttcttcaaagtagacaagattgtactaagaaggagcaaggggagtcacatagtttctcctttgtgcctttgtctatattttgtgtgttacatggaattgtgtttgactaggtccagctaagtcacgcaccaactattaaaggtcaaatttgtaggtccttgccagaatgtttacagtcgtccatgatgacctttgagctgtcttatttctgaaacacacaaatccatgttccagcttaatctctattcttgcgtatgttctttatagtattattaggcagacaatagatggtgctgcttgtggccccccgatccccagaaaacccactgagatgcagcccacttgccacaagcaaagaagcttccaattgtgcaccttctggcctttgccaaaagcatttgtctcaactggttgtcaggaccaatgggatagcccgtcgtactaaaccaaataaataaatgaaaccatattatttgttgtgtcgaagagtctataaatacttcatcacaaaccagcttatggttctatcttaggaagaacagggcagacccacgcaactaggtgagcccaagatcttcagttgcaggattccgaagaaggcttttgtccatacaccaagggtagagatgtactcaagaaggatactgctgcacaccccattctctgggcaaccctctggccctagtcagccggtgtctggagccaccatcgttgaaggtggttctcccgggagcaactttgatgcaaacatcgtcatgatcctagctgttcttctctgtgcactgatctgtgcgcttgggctcaactcaattgtccggtgcgcgctaaggtgttcaagccggatggtggtggatcctgagccgagtcgggtcacgcggctggctcagagcgggctgaggaggaaggccctccgatccatgcctatccttctctactcaactgggttgaagctcaatactgtgagtcctatgtgtgcaatctgcctctccgactttgaggacggggagcatgtcagggtcctcccaaagtgcaaccatgggttccatgtcagatgcattgaccggtggctcttggcgcggtcgacgtgcccaacatgccggcagtccctgtttggggcaccacagaaggcctctggctgctccgagtccgagggaagccaggccgagccagcgccagctcgccctgtgctggcgccacttagacctgaaggtttggttactccatatgatttttagagccttccattgcttctagttgttgcatcaagcataagggagtgtggtgaaatagaactaggttgtgaacgtgtgatttttaggtgttactgccaaactggcttgtactgctgtacattgtgtggtagatctgtagtaaaaaaaaattgctgtacagattgatttggaattctattagtgtgttaatacctgatgttgctcgagaatgaggcgtggatagaaaaaaaaaggtgctattggcttctgtgaatcacattttctatgccattttgtagggaagaaataggagtgaagatttcagatctaatcatatggcagtgctgcaccaacaatcaaccattatgttggttggaaatcaagcattagttgctaaggttcaagtcagtgggacaagcatattctcctgcaattatcgagagatcagggctttgttatctgaatgcattgtggtcatctatgtcccagaattgacaggtgggtccacggccgactatgccctgtgcactttggctattttgtgctgtctgctccaaaagcttgaaaggtaagtggccaatccacacacaatcttttctgcagcttcctggaaagctaatgcctttaaagaatctgctagcttagcaactgtgtggttcatatgaatttgaaagaaaaataacaaggagatcacttaactgtgcacactgaaaacgaaaactgcttggatgcccactgaatgggaagataaactctttttctgaacttgcagtggttatgagaatgttgtagcagtgttacatatagcttgataacagtttcactatacacaagggcccactcagaatatatgttatgtgataatgttgtcgcaatgttacatactccttccgtcttataatataagagattttgaaaggatatgacacattctactactacgaatctgaacaggatatgtcatatccttccaaaatcccttatattatgggatggagagagtactaatttggtaacagtttcactatacttaagggcccactagaagatatgctatgatgagaatgttgtagcagtgagtagaatttgataatagttattttatttgttctaaggccccaccaagaagatacgttacgagtatttgaaaaggatgttagcactgctgttgccccttacaagaaaggagggccaatggttgatagagttcatctgaatgccttttttttttggaacgatatcatccgaatccgattgcttttaagaacagtttgtagcgtatgaagtctgaactactcatgttgaagctggcaatgatattgtctgccaattttgcgaacactaataatcaaaatcttcttcagccttgtatttgacatagacatgtttttcttttggatatatcaaaacgaaggaaaatactgttatcaactattcaaagaaaattacgagtcctttgtgtactttggggaaggaaagaaaatagaggtctacgaaacaactattttcttctatattttctatataccaatttccacgcaatggattcttccttcaataaagaagttatgaaagcgacattttttttctgcaatgaaattaagaataatcttataatagtcagtatgaattacaattcaatgcgtctgacctttgacattttagatctcaaatcaaccaccatcaaatataaaaaagttatgaaaatgacatatttcctacagtgaaattaagttgagatgccactagtgataagaggtgtgtggtttcaactctgaagtcatgtgttcaatccctaagttttttttcttaaaaattgtttgaagggacatctctcccttcaaatctagtttttttaacagtgaaattaagaagtcttacaatattcagcatgaatcacaatcttaaatgcttctgatcttcgacatttagatctcaaatcaaccaccatttctcgggcggagctagagtgagatggagggggtgccacttgtttaatttactctgttttatatcaagtttaagctaatgcgggtgtctaatttatagtgaaaatatgccagatatagctatattttttttgaccgggttccttggcaccctccttaatactctagctccacccctgatttctcccactataacaagatatcatatttcttcgagaggcgttgcctatcattaacccaaaatggagccgcaaaggggatgataagcctagtccacaagtggcaagttaaagggaatatggccattggggggggggggggggggcatatcatgtactagtaaagctatatgatctccatctatctggttgatatgactgcagcatcatcttgcaacctcaaatgctctctcagtggggagggttcatttcagcccctgattcctttgaaagcccctcggactgattgaccaagcataaggtgaaaacacagcagggggggatcatccaatgagcggctgcgtgactcttgttcgttcgggtgggtgtagttggagtatgatacggcagccgcgacggaggccaaaccttagcggaaaagcatgatgagcacgccggtcacctctcaattatcatcgctgatcacctcttataagatcctttccggagctttgacgcctgatgtccgttgctccacgccttgacatggttcaccacagcttttgaacaatgtgaataattcctgtgtctcataaagagtgcacttttcagtttttatacgacgtttgactcttcatcttatttattttttattactatttttattgttattagatgataaaacatgaaaaatactttatacgctactttttttcttaatttttttttcataaatttttcaaataagatggacggtcaaacgttggaaataaaaacccaaaaatgcgttcttgcagatggactgatgtgcgtgatcttgcagatgaagctacaagggcagtagagtgtacatggtttgtaccacacttaggccctgtttagttcgcaggacgaaaagttttggcgtgtcacatcggatatacggacacatatttgaagtattaaacatagactaataacaaaacaaattacagattccgtctgtaaactgcgagacgaatttattaagcctaattaatccgttattagcaaatgttactgtagcaccacattgtcaaatcatgaagcaattaggcttaaaagattcgtctcgcaattttacacgtaatctacgtgattagttttttttttctatatttaatactccatgcatgtgttcaaacattcgatgtgacagtgtgaaaagtttttgcgtgggacctaaacagagccttaggttgtgttagtttgtgttggttgggaacatatccctccgccacggaaaatgaaatagctcattagcgcatgactaattaactattaactaaaactaacttgaatggattaacatgatttttaaagcaacctatatattttttttaaacacacaccgtttaacagtttgaaaagcgtacacagcctttatgtatggaatgaaacccatctgtgcatcttttcctattattccgttgcaaccgatataattgtataaagttatagaatatgcgttaaatatacaacatgaaaaaaaattgcacaatctcttatgcggaactatggccacgttgattatggattttagaatttcgtttgcacacttcccaagttcttaaacaatatatttcatgcaaaagaacattctacataaattttttttggagtgcttttcaacaataacgtttcaatatttctttcgtttataccattaaatagcaatacaaaaattaaattatccatcaacttacaactatctcaaaccgggcatatgaaccctatgactaatgtgatttggtcccaaagtttgccctcctagtcgtttggtggcttcaattgaattgacatgtaaccttatcctatcaaaacttacggatttgaccctaccaacaatcttacaggcatcttcatcgtttgttcttcagcttatcaactccgactaaaaactattctaagttgatattgttgtttttcttcgtagcttattttccagcgttgccatttaagtattaaaaaccatatacaaaaatctttatgcacagattaatcttaaatggtttataagaattacagcttatcatcagttgcaaaccggtggtactgcttgagaaaaccaaagtctcttaatcctgtgcagaatgagtgtgtccacaagcaatgtggcccaccaggccgctgttaggccagaatgggcctacgcctgggccgcatcttcaatcgggctaaaaaaaagtcatcatctccgctcccacccaagatcctctgacgtctgggtccaccgatcctcccccatcccgtcccagccaatagcgtcgcgcccttccccccacccgcggatcgcggccatcgttagactcatcccagccgtccacctaatccgacgctccaaaccccaccccccaaaaatcccaaaatttttcgcgatcccgcgccttccgccaactacaaatacccccgcgcccccaacccgaaatccccacgcctcaattcaaaaaatccattcgaatttcgcagcaaagagatcgagagagagatccatcaatccatcatccatggcgcgcacgaagcagacggcgaggaagtcgaccggcgggaaggcgcctcggaagcagctggcgacgaaggcggcgcggaagtcggcgccggcgaccggcggcgtgaagaagccgcaccgcttccggccgggcacggtggcactccgggagatccgcaagtaccagaagagcacggagctgctgatccggaagctcccgttccagcggctggtgcgggagatcgcgcaggacttcaagacggacctccggttccagtcgtccgccgtcgccgcgctgcaggaggccgccgaggcctacctcgtcggcctcttcgaggacaccaacctctgcgccatccacgccaagcgcgtcaccatcatgcccaaggacatccagctcgcccgccgcatcaggggcgagagggcttgatgccgttattgttcgagttcatggcttgttagatctagaagtgttaattaacccatggatctgtgttatcctgtaatcactcgcttgaattgggttcgcattgatggaatacaatctgttcttggcaaactgtgggatttgtttgtctgtttcgtgggttgtttgatgctagtatctgaagatggtagctaggcaatacgtttctgtcagtctgcatgtcgatgggtatgcggatgatttgggaatcaaccaccctatatttcattttatttgtaggcttgcagtggagccatgaaatttcatgtgtttggtaatttttctctttgattgtcagatattgcaattttttttttcagattttccttttgaagtaaaacactatacgaaagaatcctacagtgtcatattaataaatatataatatttacaaagtacaatttacaccaaaggtgattacaagttctctagccattgtttaacttttgggaaataagattgtttcgccctttggataaccacggcaaattcttgtcttaaagagaaactgatctgaagaagagaatttatgtttctgaagattctattgttcctccagatccagatactccatgccattgttatgactatctccatatactcaattttttcagattgaatgcagaaaaaggaaaatgctttatactaccagtgtgttttgggtcaattcgatcgacacattcactgttaccaaatctgatactaactgataagcactgaggactgatatgttatgggcttttggatcaattcttgggcttgttcttccgcgaagggccaactggccatgtctgaactcacaatccaaaaggaagacaattattaggagtatcaattatcataaccatccaaaaaaagatcatacgagggaagacttgcagaaggtttcagagcaatgatcactgtccgtcaccaactacccttcatcaaattgtttcataaaaacaaagactagcagtggactggtaccaggttacagctttgggattgtcggcaaagccagttcatacttcgccatgcggctccgaccatgtactgcaatcacacaaacagcgagaaaaaagaatatgagcattaaacaaaggctaatgcaggtgtgagcctgcgccccacaattgctttcatctgcacgactgactttaatttccctccagtaatcaaatcagtgggaatatttacaaccagtactccatatctatctatacacgtacagtagttgatgaactaagatgaccatatataggttcagtcctagttcatgctcacactctctgctctgttgagttacccaatttgaatagagtaaacttatctctacagtaaaggattcagatatctcaaactgtagatgtaaaaacaaaatgatttgaagaactaagaatgaagaaacttttaagaggcacaggggtatggcctcctgaggctctaaaaggttcaggcaaggaccatgtgaagttacaaccgatgccacattttctagtaggcagtcaggatccctggaccagcattccattcattgcactcatgaccaatcggcaatcgccatgcgagtccggggtaaatgattgatcaatattccagcacaagaataatatttgtcggattctcgatcacctttgctctagacaacaacttcatccctttcccaatgaaaaaaaaagaagaagatcactgtacactagacaacaaaaatatgtcatgccttttccaataaaaaaagaacccatgccatcctgctcaattccctgataacatttgctacccctttttctcatgtgctcctcaccatttcctaacacctatttaagtgccccaagtggcaagaaacttaagtatccattccaacattgtggcagctccctctgaaatcccctcttccaatcatatccaccagctcacagtttgtgatccactatgactatcctccttgtcattcttgggcttcatctctgcagcctacacctccctgcaatctctgctgcagcagacacgctctctcccggccaatcgatcgccggcgacgacaggctcgtctccagcaacggcaagttcgcgctcggcttcttcaacaccggcagtaagtcctctggaaatgacactctcagctactggtacctaggcatatggttcaacaaagtcccaaacaaaacccatgtttggatagcaaacaggggtagcccggtcacagatgcaacctcatcacatctcacaatctcccccgatggcaacctcgccatcgtaagccgagccgatagctccatcgtttggtctagccaagccaacatcacaagcaacaacaccgttgccgtgctcttggacaccggaaaccttgtactacaaagctcctcaaactcatcacacattttgtgggagagtttcgaccatccgaccgatgttttcctccccagtgcgaagattggtctcaacaagatcaccggcctaaaccgccgtatcttttcgagaagggatctagtagaccaatccccaagtgtgtactctatggagtttggacccaagggtggttaccagttggtatggaactcatcggtagaatactggtctagcggcgaatggaacggccggtacttcagcaggataccggagatggtagtcaagtcaccccattataccccattcattttccaaatcgaatatgtgaacaatgatcaagaggtgtacttcacataccgcatacacgatgaaaccataccactgtacaccgtgctagaagtaactgggcaaagaaaggccttggcctggttaaatgacacacagggttggcaagcagtcttcacccatccaaatgatcagtgtgaagttgctgctacctgtgggcctttcacaatctgcaatgacaacacatttccatcttgtagctgcatggaaggcttctccatagaatcacctgacagctgggaactaggagacagaacaggtgggtgcaggaggaacattccattagattgtgttagcagcagaagtgacatcttcaacgctgtaccggccactagattgccctacaatgcccatgccgtagaatccgtcacgactgcgggcgaatgcgagagtatttgccttggcaagtgctcttgcacggcatattcatttggtaattacaatggttgctccatatggcatggtaaattggttaatgtgaaacaacaaactgatgacagcacctctgctaatggagaaacacttcacattcgccttgctgctagagagcttcaagctagaaaaagcaataaagggttagttgtaggggttgttgtatctgcaagcctctctgctttgggtatcttaacacttgtcttgctactgatcatgatcaggaggcacagaaagaagttgcactgtcaagcattgaacagcatttatgctggtactggagttataccattcagatatagtgatttgcaacgtgcaactaaaaatttttcggagcaaattggggcaggtggttttggttctgtgttcaaggggttgttaaacgggtcaaccgctatagcagtgaaaaggcttgtctcctattgtcaagtggagaagcaattcagggctgaggtgagttccattggagtcattcatcacaccaatttggtcaaactgattggtttctcttgcaagggtgatgagaggttgcttgtttacgaatacatgtcgaatggctcccttgatactcatttattcagaagcaataacagtgtaaccctgaattggagtactagatatcagatagctcttggagttgctcgaggactggcttacttgcacgagagttgtcgagattgcatcatacattgcgatatcaagccacaaaacatacttctcgatgatttgttcgttccaaaaattgctgactttggaatggcaaagcttctaggaagggattttagtcgggttatgactacagcaagaggaactattggatatctagcacctgaatggtttagcggagtggctgtcacgccaaaagttgatgtgtatgcttatggaatggtactcttggaaattatatctggaaagatgaactcgcatagagagtctaatagttatgctgatcacatcgtttgtttccctcttgaagttgcacataagcttcttgagggggatgttctaagcttggttgatggcaaattaaatggcgatgtcaatgtcgaggaggctgaaagagcttgcaagcttgcatgttggtgcattcaagagaatgaacttgaccggccgacaatgggtaaggtggtccaaattcttgaaggtctactcgaacttgatttgcccccgatgccaaggctacttcagtctatagtacagagctcatggaaaacagagacccaacactgatttgtaatgccaaaagaagtgctaggataaaataatgtctttccatggcttttttgtggcatatgttggtatgaagagagttttagcttgtaatgccttgtgtgctatgttgatgattttggacatgttgtgccataagatgttatatgctccgtttataaacacgcagttacaagtgtacacaatttgctttatttgttttgctatatataatgatgcgcatgaatgatgtgaaatatttttcggtcgacccggcaaataaatgatgtgaaatacatatttactctaggcctctagcttaataaaaaatattccgcagcaaacacagagccataagccttatcagccttgcatggagacaatgctagtttcagggacctttcagaattctggtattgtactaggaaatattactctcttgagtcataaatatactctgtttgtactaggaaactttcagagcatgtcatttgattttttttagcttttctcaagaaagaatgttgtaggttttaaaaatactactttgaccacaattttatactccctccgacccaaaataagtgcagttttacactattcatgaccaatatttgaccgttcgtcttatttgaaaattttaaatgagtattattttttttattattagatgataaaacatgaatagtactttatgtgtgactaattttttttattttttttcataattttcaaataagacggacagtgatcaaacgtttggacacagatattcacggctgtacttatttgggacggatgtagtaccatattacaaaagtttgtaattaaaatattgcaagtttatagtataatcttctaaggtaaatctacctataacattttttatgtttttaaactaagcactttttaaaaataaaagtttgcaatgttgatctaatcaatgataggcgatgtacccgtcgacaacaacaaggtgcccgtgatgacttcgtcaatctcagatatgctggcttagtttttcggagatacacatagagatagagtgtgcatgtatacgtttataggaggtgagtgtgtgtatgttgcgagcgtctgacgtttgtattgtgtttctcagaaaaaaaaaatatgccagctaaccaaaacactctaccgcgtaaaaattagagtgcatgtggctgccgttctccccggtcttgtagcgttcatgtgttccatgctttccatgatcgatacatcgattcaaactaagctagttagagatggtacggtttttgtcacgccctgaagttcccctcccttgctctaaattcataaaataaatcgtccgaagaaattgtttaatttaacctagagagaaaccctaaagtaataaatgcaaataataatcggaatcggcatgtggaatttttcttgggttctacatgtcaaaatacgctaacaggatttttagtggaattttcagagccttggaaataattttaaccaattaaaataagcaaagtgcaatattaaatccctgggaaaatccttttttcctttttatctttcctttttccccctctttttcctcctttgggccgccggcccatctctcccgccccctcccgaagtccaggtcgcctccccctcactccctcgggcgctgacaggtggggcccacctgtcagccctttccctaacctccggcagccgccaccatccgccgccgaaaccgccgcccacgccgccgcttcctccgccttccgcgtcccgggccacgtcgcccactttccccgcgcgccccgccctccccgcgcccacgccccactcccgctcaccccccgcgcccgcgagatggccgggattcaaatttgaatcccgcctctctctctctcctcctccacctcctccactactccggcgaaattgcgccgttcccggccacgactcgccgccccctctccccttatttaagcatcgccggcaccccctctctctttttccccatttcgccgacccctcccgtgctccccatcgtccccgcgccgtgcaaccacccaccgccgcttcttcccgctactccggccgccgctagccgtcgctaggctcgccgccgtcttgcgccgtcgccgccgttcgattcgcgtggccgagatccaccccgtccacccctcctccgtcgaagttcgtcgccggagccctcatcccctcgcgcacgggtgagcaccacctccaccgccgccgtcggccatggtttccgatcgccgtggtccatctccctctctctaacccctcccaaccttttctctaggtcctcccggagcccgtcgccgtcgtcctcccgtctctcatcgttgctgttcgccgtcgctcctccctcgcgccggccgagcccctcggtgaggatcggtctccctctcttcctctctctccctttgccgcgccgcccgccgcgtagcgtcgccgctagggtcgctcgcgccgccgcttcggccgccgccgccgtctttgcgccgtctgccgccgcctcccgtcgccggttgccgtcgctggcaaccgtgcgcgcgcgccgccgccctcgccataaccggccggccggcttgaagccgagccgagccaggccgccttcctcctttccccgtgaaccgccgcccggtgggccccgcttgccagccgcgcccctcccgccttgtgccactgcccggtgggtcccgcctgccagccgcccctctccctctcttagtgtcactgacccgtgggtcccgcatgtcggcgccgccccaccccttggatgacgtcagccctggggcaatattgcgcaataaattgattaagggtttttctttattagtaaaaacacagataatcttctaaaaatcataactaattcatccgagctccgattaagtccattcaagtctcagtaaattcataaaaatgtgtagaatccattaaaaatggctttgttatctgtttcagtagtcttatagcatgttttgcttgtgtgctttgtttgtcgcgtagatttcggccgtttcgtcgatccgtggtttctcgaagacgttgctgtggttccatcagtgcgagagcaaggcaagtcatacattgcaattgatcatattgtacctaatttacaaatgtcccgcatttctattaaatattgcattgttttaccatatcatgtgggatgggtcctattactcagctatatgttgtttcccttatgccattgataacttgggtattaaaatgactagatgttggtttaggagatgcttagccatgcttagttcaactagtgcataaaaggggacaacattaaagcatagacttgattattggcaatagctttggattagtgccaccgcaatggtgttggctaattaaaatacattacctggtgggctgtgggtgcatggttttgctagacgtgcccatggcgattaaggaccggttcgcgggatgccctggaagaatttatcgtacttaccacaagccagcgtgggcaacggctgggcttgtagtgtagcttttctctagccgacgtacccaggcgagggtgggcgtgatggagttgggtcggccggggtgtccggttgatcggctgccggattcaccgcggcacgaaaggggggctgcccgttgcctgctggggacgggggcgaaccctaaggtgtggtgcgatcggttagagggggttatgcgaagggtcctgtcacggcctctttccggtatgtcgtggtggcatgtcggcgcacgggaacgtgtcgtggggctgtgtcttgtgggtacagttgtacacctctgatcagagtaaaactattcgaatagccgtgcccgcggttatgggcggtcgaccagattcaccgtgattagtttcaccctagttagcttttggaactggttagttcaggtggtggtttgggcctgttgcaacgtggtgtaacgttggacagtgattggttaatatggattaattactacaactgttttactgctttcaactactgctttgaaatgccggctttatgcaaaagaacctttagcctcccttggatatatcttgcatcatacctcctcttccggtatgacttgctgagtacagtgggtagtactcagtcttgctctcttttcccccacatcagagttgaagtccttctcagttgaagatgtctcgaagaggttggtttcgtcgctgccgtcaaggatgcctgtggaatggagtcgcccgctgcaggagtcaagtcttcaggcttagctcgcttttctctttttccgctgcatttgtaatcttttatatttttgtaagacgtggatctgtatgtcaacaattgtcgtttgtgtaccctggctggtcctggacaggggtttaatgcacattcagcttagaaattctggttcgtgaatttctgggcgtgacagttttccaattgactggctctcaatcatttgcagctttggagtctttgcccactgtaattgtgcacaaaatacaggttagacccatgccgaccagaagtcatccagctgtgcactgatcgagcaaaccaaagaccaaagaaacaggggtagtctaacgcgcaaacgcgtgaattcacacgcttcaattctagtaatagttaaaaaaaagttatgtttagcaactttcattagatatgattaaaaaagaccgtcatgattcaagaaactttccacagaagatttgaaaataatttacaggaaagactaaagaatactcggaaaacaacttccaactattccatgttgagaaaaagaatctctctacttgccactaacgactgacttgtccttttacaatccagttgcaatcatgtacaagttgcagtatcactgccttttctcctgtgatggctgatggaactgtcgcgtttaatataatccagttgcagtatcaagtaggagtacaagttgcagtacattaaatgtacaagattcatactatgaacatcaatttggatgtcataaagaacttaaggactagctatttacaaacaataacgtcaagttggatcttggatgttataaaagactcagttaccatggctactccctatgtccctcccattctttagccaacgctcgatgccatctcaccgggacaagagctcgccgccggcgacaagctcgtgtccagcaatggcaggttcgccctcggcttcttccaaaccgacagtaacaagtcctcctccaatagcactccgaacatttacctaggcatctggttcaacaccgtccccaaattcacccctgtatgggttgccaacggcgaaaaccctgtcgcggatctcgcgtcgtgcaagctcctagtttccagcgatggcaacctcgccatcgttgcaacgacccatgccaagaactcctccatggtctggtccagcaaagccaacatcccaaccaacaccacccatgctgttctcctggacgatggaaaccttgtcctgcgtagcactagcacaaccaatgcatcatccaccattctctggcaaagctttgatcacccgacagacactgttctgcagggtggaaagatcggctggaacaacgccaccggtgtgaaccgccgtcttgtctccaggaagaacaccgttgatcaagctcctggcatgtattccttcgagttgctcggacacaacggccctacctccatggtctccacgttcaactcctcgaatccgtattggtccagcggagactggaacggccggtacttcagcaacataccggagacggtaggacagacatggctatcactgaattttacaagcaatgagcaagagaagtatatcgagtatgcaattgcagatcccacggtgctatcacgtaccatactggatgtctccggccagctgaaggcgcttgtgtggttcgaggggtcgcgggattggcaaaccatcttcacggcacccaaatcgcagtgcgatgtctacgctttctgtggacctttcacggtctgcaacgacatcacattcccctcctgcacctgcatgaagggcttctcagtacaatcacctgaagattgggagctagatgaccgaacaggtggatgtgtgagaaatactccgctgctctgcaacagcaataaaactgcagcaggcacggcagataagttctatcctatgacttctgttcagcttcctgataaagcccagagcataggagcagctactagtgcagatgaatgtgcagctgcctgcctcagtagctgctcatgtactgcgtattcctacggtgaaggtggctgctctgtttggcatgacaagctgctcaatgtacgacaacaaggtaatggtgttctctaccttcgcctttctgcaaaagaagtactggaaagtaggagaaacaatagatggggggtgatccttggtgcttcaattggtgccagcactgctgctttgggtttgatctttctgctgatgatttggatcagaaaagggaagagatataacctcacaatggataatgttcagggaggcatgggaatcattgcatttagatacgttgatctccagcatgcaactaaaaatttttcggagaagttgggggccggcagttttggttctgtatttaaggggtcgctaagtgactcgactatcatagcagtgaaaaggcttgatggtgctcgccaaggagagaagcaattcagagctgaagtgagttccatagggataatccagcatgtaaacttggttaaactgattgggttttgctgcgaaggtgacaggaggttacttgtttatgaacacatgccaaagagttctcttgatgcccatctcttcccaagcagtggtgcagttttgagttggactattaggtaccaaatagccctcggagttgcaagaggactagcttatttgcattctagttgccgagactgcattatacactgtgatatcaaaccagagaacatacttcttgattcatctttcactcctaaagttgcagactttggaatggcaaagtttctcggaagggatttcagtcatgtcgtaactacaatgagaggaaccataggatatcttgctcctgagtggataagcggaacagctatcacatcaaaagtggacgtttacagctatggaatggttttgttagaaatcatttcaggaagcaggaactccagtaaacaatcttcgcgtgatggcgtgcatgaagcttgtttccccgtgcaagttgcacgcaatcttctgaacagagacattgacagtctggtggatgcaaacttgcatggtgaagtgaaactggagcaggttgaaagagtttgcaaagtcgcatgttggtgtattcaagacaatgagtttgatcgacccacaatgagtgaggtactacagtttctcgagggtctatctgaagttgagacacctccaatgccaagattgcttcatactcttgcaggaggtttagattcgaaaataatgtaatcactagttttgatcgttgttcgttcacctaggtagttctacacgtcacatttctcatctgccgtttatatcgtaagcttccttgccgcttcattatgccacccttgtaatgattgtaaccattattcccactcccagcagattgttaaacttacgtgttacatcctaataaatcagggggaaacttgacctttggtctgaagttcaaatacttgacccgaaatttcagatcaggaatgctagacatcatatgacagattttaggggagaaatcacgtgaatttccgaccttctctacctacgattcatgctccaagatcttctccagctccggcaactctagcaagctcgtgagtagtttgctttcggggttggtgtcaagtggtggcaaaggtggacggaggggtttcgtagcttagaggaacgaccgggacagtggcagcacgatggtgggccattggccgtgggggtgacaagtgagatggctatggcgccaccttggccacgggagaggaggtgacgggctggtgttggtggcgggggaagcttgtcattggagtggttaggaggtagtgggaggtggtgattgatctggtagtaggagctgccgaagacggaggaggatggtggcaccgaagctagggagtgtaaataagaaatgagatgaaatggggctgagaggagggggcttcgtggtctggcaagcctcaatggcgttggaggtgatgcccacgagggagagggtggtggggtgggtaggcgacatcggtatgggaggcatcgagatgcacgtgttgcacctggacgtcgacaccaacacggttggccgcgcccttggccgtcaatgccgacgcggatggcaacgcgtggccactatcgccgccgcccgttccttggccgtcgacgctaacgtggatggtggcacatggccgccgccatccgcgcctagccactgctggaggaagacggctcggccgccggtggagagtgatggctgggtgggtgaggaaatgaggatagggtagagggtggggaaattaaggtttggctttgtatatgataggctagatcggctttttgggcttgcaatattagtattaatagtctaatatacaccctcggggctctgcgggtcatccgcgggtggctgccatcccccgcccccgcccatggccggggcaccgacccggactctccacaggtcaaaatcagcacccgtccccgaccccgtaggggcggccccacgggggaaattgccacccctatggatggttatattttgatccaacagttaaaatttcataatatggaacccctagaacattctagtttatatatagacaatgtcattttagatattcatgagaacgtaaatgtcatctggaaatcctggagccaggatggagtcaggatggagtcaagatgtagaacttatgttaaattgataaaattggtgtttataacatttttatatctgtatgtagtatttaatctatgacatgtcagtttgaaattgaattaactatggtaaaagaatcttacaaaatgttgtactccctctaagctgataatattagtcgctttgaacaagggtaaagtcaaactttaaaatctttgactataaataatttctaaaatatttatcttaaaaatatgaaaaccatatgtgtagattagtattaaaaagtacttcaataaaatcatactccctccttcccaaattgattatcatataatggaatccaaaattttctcaaattgatcatcatataactgtatggacacggatttaatcggaatacaattaatacatcatgggagaatgtgtgcatggtagggtgtaattggcatggtgttttaatcgatgcatgcattgtgggagaatgtgtgcataatgtcttgattgatacgatttaaattatccttggtcttggtgcataaacacatatgatgatcattttgggatggagggagtatatttgttgatatttctatatatatactttttggagactgtgtccttgtccaaaacgacaagtattatcaaccccaagggagtattccaaatgagacctagatgataatagttagtgcacgtgcaaggcacatcgacatataaagaattgagtaaatattcttatattcttattttttttatacaataatggtgagaaacactggttgatggaaaatattttgaatcccaacgtttgcaaaaatgagaaccgttgcaaatactatcaattgagtccataggtaacaagaagaaaatttaaagttctacaacctaaactaatattttattacaatgaaattataaatgcaaaacttgtaaacaatttctagttccaacattagtccatgttagttgccagatcagttcccctcaggagattaggtattgtattacaatccagttttgaccattctaatcctaaggtaaccttgaagaaatcgtgaattttgttttggtaggttttctcgaacatatggatacatataggttatatgatgcattcaatacactactaatttatttatttcaaacataacaaatgaaatgtgtgcacgtgcattcaagaggagcatacatcccactgtttgttcacaacggaacactagtgcctgtatcgactatactgaccatacttatctaaaaattaggtatagatggttttaaagcatttagtagataacatatatataattcagatgagtctatagatatggatatactcgtcaaatggtcaaccttcaaaaacgttgcaacaaaaaaggatgtttctatttcaccttagcattttccgctagtgatctatttggtctccaagcattagaaaaaaattgatactatgtctacaaagtgcaatgagattgttggttaaaatagagattattaaaatggctaaagtatgtagttttgaagcatcattggtaccagatatccatcaatcttttatctatcactctcattggtcaagcaagactgaagtcacgaagccctacataagcataattctctttgttcctatgcgctagaaaagaatcaattggtacgttctatatcaggggttactgaacaaaatataacccctaatataaatgtaacccttgacaagaagaattatgcatatgtagggcctaaggacttcggtttggcttggccaatgagagtgagagatatagtgttgatgaatatctggtaccattgatgtttaaacactactcataatttggcaattttaataatttctatttaaaccaaccatgtcattacactttgcagccataatatcgatttttcttctaatgcttggggactaaagagatcactaccgagaaatgttaatgcaagctgaaatagaaaggtccattattgttgcaaggtttttggaagttgaccatgtgacgagtacgtacatgtctataggcgcatagatatgtaaattatatgttatctaataaatgctttaaaaccatcttattcctgatttttagaaagtttgtactccttacaatcattagtgtactgttgtggccaaatagtggaaactatgcttatcatgaaggtatgtgcagccatttcatttcttttatttgaaataaataagttaatgtgtatccagatgttcaagacaacctactaaacaccattgctattcatgatttcttcaaaattggtctcaggattaggatggtcaaaacatgactattttacgaagattgatggaataaaatgtttacaagttctccatttagttacattataataaaatactccctccaattttttttttaacattggttagatcaacatacattagcaaacatgggtagtaataatttaggtcgtggaaccttaatttttgttgttacctttgaactcaactgatatatttgtaacagttctcatttttgcacaaatcgagactcaaaatatctgttgtgaattgatgtttctcaccattgttagtgtaaagaataacaatttaagagtatttactccattctacaaataacaatttaagagtatttactccattctacatatgttgacgtgccttgcacattcacgttaattactccctccgggtaatcatatattcgtatatgacatttacaaaacttgagaacaaaaatagtttgattgctttgtccgaagcgccatgtacttatgactaaagggagtagtttcaatatatagtacggttaactcttattcggtttaatttctacgccaactttaatcataattttttattagaatataacacactaatatctaagaaaaaaacattctgtaaaggtacttataaagaaatatctatctatatgatttttatgttttcaaacttaaagaggtattatattgacggtcaaggttcaaaaagattgatagaataaaattaatcaacaatatcatagatgtgaatacggaggggagtaggagtaccttctttttccttccccctgcgatgggagattggatctttgctccagaatccaaatcctccacgacagtggtgctggtgcgtgagagattgggtcgtgcgtcttaccaggcgcccaacgacgagagctacggccgcgccgccgcgcgacaagcataccacaccgacgaggtccccccctccgccgcgaacgccgatctcagcacgccgccatcgacgaggtcacgctccaggtctagggctccgcatcggcttaccagtttgccgtcgcctgcaacacggctgacggcgctacgaggacgaggcaatgggggaacacgggcggcggaaccgagagatggagcttgggcctcatgttgcctgttgggccttgggttcagggccgctcggcccaaaatctccgggagatcagcgaggggccgtgcaggcctccaccagctcggagtatcgtatcgtgtaggaataagtctatttaccatctctcatcttcgtgtcgagtttaattgacatcccaaaaccaccagatatcttcaccaatcaccactcatcttgacaaaacaattcaaatcagagtgatttcgttgacgtgaaattctagtcagaaaaaaaaaataaaaagcatgtgaggcccatatgtaagtggaatacatattcgaaaatttcctatcggatccctccgatatgatattatttcagccgaaatttttaaaggagtaaaggaagaagatgtatgccatttacaagagtctcacatgttttttattttttttctgactaggatgccacatcaacaaaaccatcatccatattactatggaacttgatttggatagtttcgttaaggtgggggtggagtttttgttactgtggtttaaggatgtcaattaaactcgatataaagatgatactagaaggtaagtggacttattcctatcgtgtccgagcccacgtaaagtggaagcccgctcctgggaggccctgaagcgcagctgcttatctgcatctaggcgtctcatctagtggtcacctgagtagcaagttcgtgctccctccgtccataacgaaaaaaaaaactcaaatactagagaagaatctaatattaaataattagaaggggtgaggtttcgaatccagatcatctagcccaccaccttgtggagctaaccggaaaacccctaggtgtttctccctccgtccataacgcacattggactagtgatatctaatctaattttagtttgtcatattttataacggaggagtactctatttcgtcgtacatatctaaagttttggaaaagatttggttcaatatttaaaattttgacagttaattgtgtattataatatgtttataaaatacataagtttatagtattatggaagtatttctaaagaaaatttatgcatatcattttttttcttattttaaactaagcattgatttggtcaaatatttaaaacttagcaatcaaatatgatcaaaaacttatttggaacatcaaaaaatatttatgatcagagtactcaaagctaaacctttagggtgttctacgtccgtaatagtatctatgctacttaaaatatcagtagttatggtgtccattctgccacattggccctttacttttgagtatcacaatctatattattataagaccctccagcgaattatcttccgtatcttccgttttactgctggttctccctaaatttcaaagccacctacttgtctaataaagaaaatcatacgagtactacttagactaaatatatgcttaattgacttaataagttagaaactcaatttgttttatgttgaaatgcacgggctcttggctagttaggatagaaggcatcatttgcctctgggatatttcagggtggcgtcgtacaattggtaagagtgtgaagatcttgcatcacggttgaatatatttttcaccaagttaattcggcggatgcgcttgcctaaacaccatgcactagaaaaaccatttgtgtagccagtccgtaacacatttatacatgcgtttagccaaccactgcagcttaaggcctataggaatcaatgatttatataagcggattccacagctgcatgtaaaaatagtttttcacatgtggtttatgaccctaagacaaaaaaagaaacgcgaatattagagaaggaagcacactaccttgtgaaactagccgaaaaatccatgggcgtttctcttatgaccctaagacggctttaaccatcttcataatggtttttctttttgaccgcttgagataaataaagccaagaacatgcaaaaataattttagtagcgatgtttttctcacttttattaagtttattcgtaaaccttatggtaaaaaatatttaatttattcttacaatcaagtaaatagttcacagcaataatatgatgaataatggcaatatgagattgacacctccccgctatgaattattcatgcggggggctaggaatcatactgacgaaacgtgctcaactcccagagcacaaaatccagtgaataacagaaggtcaagcacttcaagtactgctaaactttttcttcaaacttttaacttttccatcacatcaaaactttcctacacacataaactttcaacttttccatcacatcgttccaatttcaacttccaatttcagcgtgaacttaaacacagcctaaagtgctatatatggatgatgtacagaagttgtgcacatatcttatattgcttggcaagatttgctccggtctaacaaaaagtatttcgaggtaccgatatctcaagataccgaatcgttttcaatcgttggagttaaaaacaattttaaagagtgaggtaccgatatcgtaagatatttttttttctcaccagagcaaatctcattgctcggcatacttgctgccactggcttctgcctttgccacaaaggcactgcttcgcaataatggcaaagataggaaaagctatatggtgaattggtgattggtgagtggtgactcgtgcattaatatggaggtaatacgcatctgtggcatatatgtctcgcatttgtggcatatatgcctcatatgttgtgttccctgatagttcacatggagcacagagctatagtctagtgccttttagcccacatatataatgtttacatgatcactaaaataaaacgacaagatacttgttagtaaaagttaaacaagttggaagctgactagtctgacaggtgtgcaccagggatttcaattttgatttaattcctgttgcaacgcatgggtattctactagtagtataaaatttgaatcctataaatttttatgtcttggaacaaagatagtactagattatcatgaacacgtgttttaaactgcttagatgatgtcatttttttaaaaaaaactttctaaagtttttttaaatcaaataagtctattttttaagttggtaacagtaacatatattactaatcaaggactaattagtaagcttgtcagacacacagctatttggctgatcagccatctcaaaagcggccttaaaagaaaacattaggttggagcccactcgctagctagtaaatacatatactccgttttataatgtaattaaggtgttttaattttgttctaaactaaattcctctaacttgggactaaatttatataagaatagttaaaacaaagatcactagtatggccatctctagcattgcaacaccatcaagacctagggtgagaagtataatatatgtacgactgtcatttgtcacacatagtagacatgccgtggatgtttggcaattcatagcaaaagatcttacatcaccgtcgaaacattatgtaattaattgggttaattggatcatgctattataaatttgtgtattaaaaatgacattacaattcatctgttcatagccatgccaggctacaaacagatgaattgtaacaatatttttctgaaaaggcaaatttgcaatgacatgaatccaattaatcttaattaattactatttccttttggctactataaatgaaagaagaactgaatagtgatcgcccacagttgctcaccatggctcttctcatttttgtagtactactattcgccttaagcatcccagcaagttctgccacgatcgacaccatctcaattggcacggcgttggccaaaaacgataagcttgtctcagaaaatcgcaggtacgcacttggcttctttgagacacaaagaaaagcatctcagaaaactagcaagtggtacttaggaatttggttcaaccaggttcccaagctaaatcctgcatgggttgcaaatagggataagccaattgatgatcccacatcagtggaactaacaatcttccatgatggaaatcttgccatcttaaaccagtcaacaaagtccatcgtttggtctacacaagctaatatcactgccaacaacaccgttgctacgctattgaatagtggaaatctcatcctaacaaacttgtcaaactcattagaagttttctggcagagctttgactaccccacagatacattttttcctggggcaaagcttggatgggacaaggtcacaggccttaaccgtcagattatttcttggaaaaactcaattgacccagctaccggttcctattgcaaagagttagacccttctggtgttgatcagtacttgcttttgccattgaattcctccacaccgtattggtctaccggtgcatggaacggcgattacttctcctcaatcctggagatgaaaagccatactatttttaattcatcatttgttgataatgatcaagagaagtactttagatatgatttgctagatgaaaggactgttagtcgtcagatattagacatcggaggtcaggaaaagatgttcctttggcttcaggactcaaaagattggacactgatctatgcccaacctaaagctccgtgtgatgtctatgcaatttgtgggcctttcacagtctgcatcgataatgagcttccacattgcaactgtataaagggcttcaccgtaacatcactcgaggattgggaactggaagatcgaacagatggatgctcaagaaatactccaatagactgcattaacaacaaaaccacaacacattcaactgatatgttctattctatgccatgcgttagattgcccccaaatgcccataatgtggaaagtgtaaaaagttcaagtgagtgcatgcaagtttgcttaactaattgctcttgcactgcttattcattcatcaatggtggatgctctatttggcacaatgaattgcttaacataagaaaagatcaatgtagtgaaaatagcaatacggatggagaagctctttacctacggctagctacaaaagaattttatagtgcaggcgttgatagtagaggaatggttattggacttgctatttttgcaagttttgctttattatgtttgctaccactaatcctactactggtgagacggagtaaaactaagttctcaggtgacagattgaaagattcccagttttgcaatggaattatttcatttgaatacattgatttgcaacgtgcaactacaaatttcatggagagacttggaggaggtagctttggttctgtatttagggggtctctaagtgattccacaacaatagcagtgaaaaggcttgaccatgcatgccaaattccacaaggagataagcagtttagggctgaagtgagctcaattggaaccattcaacacatcaatttagttaaattgatcggcttctgttgtgagggtggcagaagattgcttgtttatgagcacatgtcaaatcgttctctcgatctccaattatttcagagcaatactacaatatcctggaatactaggtatcaaatagccattggaattgctagaggattgtcttacttacacgaaagctgtcaagattgtatcatacattgtgatattaaaccagaaaacatccttctagatgatttattcattccaaaaattgctgattttggtatggcaaagcttttgggaagggattttagccgagttttgacaacggtgagaggaactgcaggttaccttgcacctgaatggattagtggtgttcctataacaccaaaagtcgatgtttatagctatgggatggtcttgctagaaataatatcaggaagaaggaactcatatacctcatctccttgtgttggtgaccatgatgattattttccagtgcttgtggtccgtaagcttcttgatggagatatatgtggtttggttgattatagattacatggtgacatcaacataaaagaggccgaaacagcttgcaaggttgcgtgttggtgcattcaggataatgagtttaatcgaccaacaatggatgaagtggttcatattctcgagggtctagttgaaattgacatacccccgatgccgaggctacttgaagcaattgtagctggaagctcaaatccaacatgtacctcatctagttttttcggatcaattcgagaatccttgtaaatatttatagttccttttttcctacaaatatacatacacgtatatatattaggaaatggcatgaacccaacctctacatccaaccatatgtacccagccaaactacaaatatatatgtatgcatgagtgacggactgatgctatgtgcagctattattgttgacatttctgctacgactcatgctatgtgcaactattattattgacttttctgctaggactagggatttgtaacctgtcatcattcttcttttccaatgaagttttttaccacctattgttgatgtaatctacaattttgttgtccataattcaatagaaatttaggtggatagatctaacaaatctatgatcttaggatatgctatgtgattcatgcgacaagatcaatggaaaggtcgttgtcttgcgtcctcgtggccagcgtttgaactctggtctcaatgctggacctcactgttctgctaatgattaaatgctagtcattactctctgcgtctcaaaataaatgaatctatgataatatgtgacatcatcatcatcatcatcatcatcatcatcatcatcatcatcatcaatgaagaatgtttatttgtttcctgattgagccacgtatactgtaaaatatgagccattggatctggaaagaacgacttaaaagtatggagggaaaaagaagagtcaggacacttccattagaaggatctatagaaggcatgtggcatgcaagagtaaaaaagacccaacttgtataaatttgacaaaaaaatattattgaaaatcgagagttaaagctagaaaaataagagtttgcaaaaaaaatatgtcaccacattttttatttaattgccatcacttttctctatatgattggtttcttctatatgtaagtatgcttttatctctcccgtctcattttccaagtagataataaattacttttaattctaattcttttatgcattgtgtattagaaaaaaaatacaatgtaagcatcaaaatttacaatgtaattacagtttaagttttaaaatttacaatgtgagcgcatgtaatttacagtgtaaaaacgatttgactaatgttgtgaaaacatagtgccgtaaatatagctactccaagaaaaaaattaggaagaagataaaaatagtggaaaagagaggaaaacccacatgtgtcccgtttccttgtcaccactcaccacatgtccgcctgtcacaccatcattgctagggaggaggagatggtggcacaagtcgagttgggatgaagtgcgggcgtagatggagaaataaaaaatgagcaaacaagagaaaagaactgaggagaagccattgcacgccaactttgaaatatttaactatttgccacttgtataaggattcgtcactgaaccatatgtcataaacacatgaggacccacatattatagactgtgagtgtcaaatccttaattgccatatcttaaaagtgaaaaaaagttaaatgccccagtaacgtctggtggtgccgcctcttctcgttcgcgttgccacgttccatgctctctttcaagaatgtctaaaacaacaagttcctcaaaagtttgttagaagttattatattttaaatatttgcctaaaggattttttaaataaaaaaggtcatttgggcagatatttaaaatataatacatgctactaatatacataatttagaaccttccagtattatatttatagtaaatattacacattaggcatgttaattatttataatcacgaaaatattgtttgttacagataaaaaattgactacacttcctaccaaatcaatattcttcgagaacctatttacattatacaaccatatagcatttaatagacaggggctagagccgcgcgaacgcgcggctctactggctagttacatagtataactaatccggacaagtccatgtctagattggttgtactgtgtaatacattgatggagaagtgctttttattcccggttcataacccccaaccgggactatgaatccggaactaaatagatattttttcttttgtttttctctttttcattgtttttagcattgaatattgatttcacaccatcccctaatcatgccaagaaatcctaaatccaaatcatcacatatcacagaacatctccaaatcctcaaatagatcatctccaaatacatcacaaactcttaaaacaattacatcacaagttctaaaaaatacatcacagattcacatcacacacaaatcaaatacatcagaggataaatcataaattgtgaaaaaaaaagaaaagccggccggccactgctgcctcccctcctcccctcctcccctccgcgccggccggccgccgccgccgccaccgccaccgcgccgctgcgccggccgctggccggcccaccctcttcttcgctgtgtggaaggaaaaaaggaaagagaaggctaggagttagagataaggaaagagataagaagttagagaggaaaaaagagatagagggaggagtttgttgtgtggacgggaaaagaggatcggtactaggattatatagtgtgttttgatttttattcctggttagtaacatcaatcggaactaaaaataggtttttagtcccgaatggtgttaataaccgggactaatgatcctagggccctgacacggcctgacatggaatcaaaagatgaattttagtcccggttggagttaccaaccgggacaaaagatgatttttagtcccggttggtccaacaaccgggactaaagatcttcctcttataaacctggactattgtggatttgggtcgaccgaccaaagatagtttctctaccaatgataatatatcgatcctatgttgatttattttgggatgaagagagtacgtagtaataatatgttatttctcctttaatattttttatgctaaatttctccattgtgtcccaagaatgactgaatgggcagtggtcaagtggaggacagacgtttttatgctgaatcttgccgattacttttatccatcctctttctcaatttcatcatggtgatcgcctttcaaacaaacaaaggaagaccaactcaggatagggcctatttagatcccaccccaaaattttacactctatcacattgaacgtttgaacacctgcataaagtattaaatataggctaaaaaagtaactaattgcacagaatacaattactttgcgagacgaatcttttaagcctaattgctctatgatttgacaatgtggtgctacagtaaacatgtgataatgatggattaattaggcttaataaattcgtctcgcggtttactaacggatactataattatttttctattagtggccgaacacacatgcgataccctacataatacccgatgttacgcgtcagaactatacacccctatacacccctgatctaaacacccccataatcatgtatgacagttacaaaacctgagaacaaaaatagtttgattgctttgtatgaagctcgatgtacttatgagtagattagtagtttcagtatggggcagatcgtttgtgctggtttgcagccggctatatatggttgcgattgtgctgtatgtacagtgcaagcagtaaaacttatattgagcttagtcctgttgctgctgctgcacaactctcttctgatcagcccctatattaccggtaatgtacctggacactgtaagttttggtcccgtttgcttcttaaaatgggacatcttctttttaatataaaacgtcggcaacagcctgaccgttcgaaaaaaaaaatatattaccggtaatgttaactcttaattattcaattttttgcgcacgactttaaccataattttctattagaaatagcaataatacctaacaaaaacttactttacgtaaaagtacttgttatattgatttttatgtttttcaaacttaaaaatattatatatattgaagttcaaaatggattgatagaaaattaatcaacaataccatagatgtaaatactgagggagttggctgcgatgggagattggatcgtacgtgctccagaatcctccaggacaatggtgcgtgcgagattggatcgtgcgcggcctagcttaagagcaagcttaataagtttaatactccaatcaaataacaaatttatacaatagttgcttactatactattaatacatatggtcccacctgacatacacacaccgtgtcttggagtccgcgctgcagctggctacagatctatagcccgcttctcttctctcttatcttttatctcattaaattatatttatagctggctaatagtatactattgtagccgctctaacaggctaacggacgagcgctacggccgcgccgccgcgcgacaagccggccaccacacccgcgacgaggttccccctccgcctccgcgcgccgatttccagcacgccgccatcgacgatgtggccgccgggtgcgtcgatcggctggtcgaagtacaccgaagcaatggggaagttccggggccacgaggccttacggcgcgcgtgcacacgagtggatcaaatggcccgctcaaccgccgtcacaacaaaacagggggcaaaaaaaaaaaaaaaaacctccatcctcatcgtcaaattttagcatctgcattacatcgcaaggatcacaagctgactgggcgaggtggcccatggatgaacaaatgaataacagaaacatgtccttttgcagacaaaaaaggaactagttggggccaaaacaagatgtaataagggagaatcatcagtcatgtagtggtaaaattcaaaccctgatacgtacgaatattacgcatatgtaggtgggtttttatcataattttagtgagatcatggatgtgtctcgctggtttagcatgtgttatggggcgtattcgtgtgtgcgtatgactctcccgtgtaatctcaaaacaagaaaagaaaaacaagaggcacaacacgttttgatggcacagatgaatatagggtagtgttacaatatatacttcttttaaagagtatagtattggtagcggtgaccggtgagtaataaatcttccaccacctcacaccaccaacatttttttttaaaaaaaagagagaaaagaatgatgtgggcctagattgtcaactactctcactattttttttcgataattacacggtacaacgcagacattcacaacgcacgcgcactcaccccgatgagcatcttcgaagactgggccggcaaatcttttgagattgacgaagtcaccacatgcgcctcgctgtcgacgggtacgtcgcctaccactgaaagcacaaagccgttaaatcctgcaaaattcgctcccatgtggagtcgaacccaggacctcaggtgctactgaggcacttgtaaccaccatgctttatttaagagtaaagtgtacggacggtccttaaacttgtagggatgtgtcatctttgtccctaaactctcaaaatgcacatccaagtctcagaacttgtcatactgtgtcatctaggtctcaaatcaccaaaaccccttaggatcctacgtggcgttgatgtggcataccacacagacatgacatggcattattttggactgacaaatatgacccatttaaaatttttcctttttctttttttcttctctttttttccctttcttctcctttctctgtgacctgagcagaagaaaggaaaaaaagaagaatgagaagaaaacgaaaaagaaaaaaaaagaaaagaagaaaaaaaagaaaaggacatgtcacgcccatgtggcatgccacatcagcgccacatagatcatagaggggatgtgtcgatttgggacttagatgatacactttgacaagttctggcaccttgatatacattttgagagtttatggacctatatgatacaacactacaagtttaaggaccgcaaatgcactttactctttatttaactccatactttttataggaagataaaaagactacatgttaaccctaatgttaacattcatatgcaaaattcatatgaagtgcttcatgtaaattggcacttttgagttaaccctttgagcaaattaattggcatcctcccatccttggagaggtcatcatacgctgatacgcatcagtggcatactgatactggcatgtctcacagatcgtgctccttgctagtcgacatgctcagaactagtctactgcattttggccactcaatattgttacacatcactaaaaactaccgagtcacctgttaacaactactaacaagttggaagcttcaaaactgactagtcgaatgggtactttactttacacgacttaccagaggcagagattcaaacaataggtacgtgtttgctgaatatttacttaagatcggtgtcaaatagccatcacttttggatttgtacatccataagggatgtagagaccggattgatatatattatctttatactacctccatattttaatgtatgacaccgttgattttttgtccaacgtttaaccattcgtcttattcaaaaaatttatgcaattatcatttattttattatgacttgattcatcatcaaatatcctttaagcatgacataaatatctttatattttcacaaaaattttgaataaaacgaatggtcaaacattggtaagaagtcaataacgtcatacattaaaatacgtagggagtataagaaaaagccatcactttcttgtataaagactttggctcaataatcaccgctgcagcccgccatggtttaaggtcattgtccatcaattttagaaattcatgcatgtaaaatttcagtgggtatgagtacatgtgcccgtacaaaatgagtacatttcccgtaatacgggaggtctctactttctcagataatttattggcgttcgtataggtgtgcactcatgggtgtgtgtgtgaatggtctgactgtggtgtatcttccattataggccgtgtttagtttcaaagtttttcttcaaacttctaacttttctatcacatcgaaactttcttacacacataaacttataacttttccatcacatcgttccaattttaaccaaacttttaattttgacgtgaactaaacacagccataatatctttttagaggaaaactgacaggctcatgtaaggtatggttgtcatctattaattcatccattcagccatttagaagaaaagaacaggcggtgcctctctgatgtggccgtctctagatggttgtttgcattgctgcgccatcgaaatctagctgaaaaaagtattgtaggtacgattgtcattcgtcacacatggttgccatgccgtggatgtttcgcaattcataacaaaagatcttgcatcaccaacgagacatgtatcaactgtgccatttttccctccaatattacataagcattccctccgtttcaggttataagacgttttaactttggtcaaaatcaaacaactctaaatttgactaactttgtagacaaaatagtaatattttacaacaccagcaaagtttcattaaatctataattgaacaaattttcataatatattgtcttaggttaaaaatattactattttttctacaaaattagtcaaacttagagtagtttgactttgaccaaagtcaaaatgtcttataacctgaaacggagggattactatatatgtttctacttctctatatatgcctcagttccctactataaatgaaatcagaactgaccagtgatcacatatactacagttggccctcatcatggctctcctcatttatgtagtgctcctgttctccctatgcatctcagcaaatgctgccatgacggacaccatctcaatgggcaacgcattgggtagaaaggacaagctcgtctcgaaaaatggcaggtatgcacttggcttctttgagacagaaagagtagaagtatcccagaaaagtagcaagtggtacttaggaatttggttcaatcaggttccgaagataactcctgcttgggttgcaaatagggataatccaatcaatgatcccacctcattagagctaacaatcttccatgatggaaatcttgtcatcttaaatcggtcagccaagaccatcatttggtctagccaagctaatatcactaacaataacaccagtgctatgctcttgagtagtggaaatctcatcctaacaaacccctcaaactcttcagaagttttatggcagagctttgactaccccactgatacactttttcccagggccaagcttggatgggacaaggttaccggcctaaaccgtcgtattatctcatggaagaactcaaaggacctagctgctggtgtatattgtaaagagttagaccctagtggtgttgatcagtccttgcttacaccattgaattccttcacaccgtattggtctagtggcccatggaatggggattactttgctgcggtcccagagatggcaagccatactgtttttaattcaacatttgttcacaatgaccaagagaggtactttacatatactttggtagatgaaaggactgttagtcgtcatatagtggacgttggaggtcaagccaagacgttcctttggtatgaggatttgcaagattgggtaatgaactatgcccaacctaaatctcaatgtgatgtctatgcagtttgtgggccttacacaatttgcatcgacaacgagcttccaaattgcaattgtataaagggcttcacaataacatcacatgaggattgggaactagaagatcgaacgggtggatgctcaagaaatactccgatagactgcactaacaataaaaacacaactcattcttcagataagttctattctatgacatgcgttaaactgccccaaaacgaacagaacatagaaaatgttaaaagttcaagtgagtgtgaccaggtttgcttgaataattgctcttgcactgcttattccttcagcaatggtggatgctctatttggcacaacgaattacttaacataagaaaaagtcaatgtagtgacagtagcaatacagatggagaagcccttcacatacgtcttgccgcagaagaattgtatagtaaaaaagccaataaaagagtaatggttattggagtggttatttctgcaagttttgctttattaggtttgctaccactgatcctgttattgctgagacggaggagtaaaacaaagttctttggtgacactttgaaagattctcagttttgcaatgggattattgcatttggatacattaatttgcaacgcgcaactaaaaatttctcagagaagctcgggggaggtaactttggttttgtattcaaggggtctctaagtgattccacaactatagcagtgaaaaggcttgaccatgcatgccaaggagagaagcaatttaggtccgaagtgagctcaattggaatcatccaacacatcaatctagttaaactaatcggtttctgttgtgaggctggcacgaggttgcttgtttatgagcacatgccaaatcgttctcttgatctccaattatttcagagcaaaactacaataacttggaacattaggtaccaaatagccattggaattgctagaggactagcctatttacatgaaaactgccaagattgtatcatacattgtgatattaaactagaaaacatccttctcgatgcttcattcattccaaaaattgcagattttgggatggcaaagcttttgggaagggattttagccgagttttgactatggtgagaggcaccgcaggttaccttgcacctaaatggattagtggtgttcctattacactaaaagttgatgtttacagctatgggatggtcttgctagaaataatatcaggaaggaggaactcacgtacctcatgttcttgtggcggtgatcatgatgtttattttccggtgcttgtagcccgtaagcttcttgatggagatatgggtggtttggttgattatagattagatggtgagatcgacataaaggaggctgaaatagcttgcaaggtagcgtgttggtgcattcaagacaatgagtttaatcgaccaacaatgggaggtgtggttcagattctcgagggtctagttgaaatcaacatgcccccaatgccaaggctccttgaagcaattgctgctggaagctcaaatctgacatgttccttagcttcttttgtatgaaatatttcagctcaagaatccctttaaatacgtatagttccttttgatacaaatatatgtattgagtgacagacatattgtttgcaactattatattgttctaggactacaaggggatttggaattcctaccatcttccttgtctctctctctctctctcaattgagttgtttatcacctacttttgatatattctaccattttgctatccattatttagtagaaatttgggtgggcagatctaacaaacatctgatcaggatctgctccatgattcatgcaatagtgagatcaatggcaaggtcattacgttgcgcccttgtggccacgtttgaaccctagtcttaattctaaatctcatcgttttgcggttttgctaatgatgctaggaagtaataatatattccttctccttgcacctttttatattaaatttctccatagtgtcgtaagaataagggaagcaccattggcgtagtgatatagtcatggatgcatgacttcggaccccattaggattcaaatcctagtgcccacaaatatagttgtgtgcatcattaattggtgcagaggctgaaagttatactttatttttctaaagaaattccaagaatgagtgacaatatcattcgaaaagagttgcatttgttttctctacaattgggggatggtacaataccagatatcataggcacaaatgaacaatttatgatgactccaagatactctttttaaaagaggtcatgaacaatatccactaacagcaagaagtgtgggatgagaggttaagaatgtctgatgaggatatagttggattttaactataactttttgtatggaagagcttttaaggagcccagttggctttcctataggtttttataggaagatgtgggcacacataaaggaggtagtgaaggagatgctagatgagctttatgaaggagagctagaggtgaaaagacttaactatggaattataggaattatatctttaatctgcatgataaaatatgtgtgattgaacaatacggaccatttgtttgctagatattgtccttaagatatgatgaaagaaaagtgtataaatggaacactgtagatttctgacagatgtatgggctgataaaatatccccaagagtaaatagtccgaacttatatagaatccagcttggacacaatgtaaggagctttttaatgatggcgattggtgagtggaagttagagtttaggaggaacccaagtgaggctgacaaaaatgatttgatagagttgctagatgtaaggcatgatggggagagtgtaaggtgatatggacaactctggggaataaaaaagatctatacaattaacaatgatccctgcacaggcagattaccttaggaggtgtaattggctctgaaatgaatctgatttggttgagtagaattcccatgaagattaaacaattctttgtacctaacaataatgggcagaatcccttgtgcggctcaactggttaaaaataaactgaaagggagggacataattaagcttctaaactttatcataaacctgaaactgttaatcatatcatcttttaatatcgtttagctgttttttttccttattagagatttttttgttcgaattgcgtgttttgtaaaatgcagaaattttagagtttggtgtaattaaaattttgaaggctttgcttggtttgaaggggattgagggggaattcttaagaagaagaagaagagggaggaggaggagttagaggatgcaatgtaagttttataccctgcaaataatttaaaatcaaactcaattgcatttgcagatttaaaacatatatactttatgtacaaagttataatgagttttgtctctctgtatatttcagagaccgttgagtttaattttcagttcagtaatagcatgacaccccctgttacataatgcttttagagtttgtgtcgaatatatctaagtagtcgattataaattaggacttggatttgtaataggtgttaataaaatagtaaggctataaaaacaaaattttgagttcgacttgtcctaggctcaatttaagcttgattcgagctctagactagccgagcttgggctcctgtcaagcctaataatatataatttttattatttactttatatactaatagatcaaatatgctgccatttatatgtatccacacgataaaatagtttatattaatatcatatatttatctttattctttttcttctattcacaaatataactaaatagaaattaattacttttatttagagattatattcttaaaatatatgttaactaagcttgatggtcgagctcgaaccgagttcgtctggaagcttaaaggttacacaggcttagctcgagcctaggtaggtgagctcgctcgagctcgtctcgttaacatctctagataatagtaaagtcagactattatcttaggttatgttaaattataatcgcgtactttatcatagatgatggatgtctgaccagtggcctaacggtcgatggttgtgcccaaaattcgcatcaaaagcttggatgctaagtattcactacttactggactcaagttacatgtgatcgatcgttccaaacagaaaggaaatggtttccaacgctgcattgcacctgaggaccaaacaaagtcagggttttgttcgatcggattccctccattcaaatcacttccaaattccgttaccctttgcatttccactctccaaccaaaacgcctccaatagtcatctgtccatcagtgtcactgatcaggcagccaatccacacgatgcaccaccaattaatacgccagccctgcaccattttatgaccaggaattaatgggacctggaaactggaagcaacatgagactgactgttttaagttctaaggccctgaatggatcattcagtccctagactaaaattagtctctagactaaaaactttagtcccctactgtttagatacaggaactaaagacatgtggaccgagacagagaagagagaggctatcactttagttcttataagtacctccaagagaaactaatgaattatagtcccaatatacacttttagtcttttttttttgtcacatctgtttaaattcttagggactaaaagggactaatgaattagtcccatgaaccaaacagagcatgacacaccaggttctcgttcgtgccgttgccgctacagcactgctagctcgcaataacgctgaagttcagttcaagattctgtggtaacttaaacttgttgattttttttctttttgtctggaccatcaggatctttgcatcactatacccagggtcattttcccagtcaaagccactgtaattccacacaaagtctccatgccgtggatattttgcaaagcataacaaaagatcttattacatcactgtccagatatgttatcactgttaccattttgccctccaacattatgcaagcgtatcctttgttaacttattatcccctatgggcctcattaacctactataaaatgcaagaagaagtgaagagcagtgatcacctatcctacagtttcactatgtctctcctcattttcatagtactattgttctccctatgcatcccagcaagttctgccacgacggacaccatctcagctggccaaacgttggccaaagatgacaagctcgtctcgaaaaatggcaggtatgcatttggcttcttcaagacagatacaaaagcgtctggaaaaactaacaagtggtacttaggaatatggttcaatcaggttcccacgctaactcctgcatgggttgcaaatagggataagccaattgatgatcccacattattggagctaacgatctttcgtgatggaaatctcgccatcttaaaccgctcaactaatgccatcctttggtctacccgagctaacatcacaacaaataacaccatcgttattctcttgagtagtggaaatctcatcctaacaaacccctcaaactcttcagaagttttctaggagagctttgactaccccacagatacatttttccccggggcaaagcttggatggaacaagatcactggcctaaaccgtcgtattatttctaagaaaaacttagtagacccagctactggtatgtattgcgaagagttagaccctactggtgttaatcaggtctttcttgcactagtgaattcctccacgccatattggtctagtggagcatggaatggcgagtacttatcctcaatcccaaagatggcaagccataattttttcattccatcatttgtgaacaatgaccaagagaagtactttacatataatttggcaaatgaaaatattgttagccgtcaaatattggatgtcggaggtcaatcaaagacgtttctttggcttgagggatcaaaagattgggtaatggtcaatgcccaacctaaagctcaatgtgatgtctattcaatttgtgggcctttcacagtttgcaccgataacgagcttccaaattgcaattgtataaagggcttcaccataacatcgctcgaggattgggtactggaagatcgaacaggtggatgctcaagaaatactccaatagactgcatcagcaacaaaaccataacccgctcatcagataagttctattctatgccttgtgttagattgcccccaaacgcccagaatgtaggaagtgttgacagttcaagtgagtgtgcacaagtttgcttgaataattgctcctgcactgcttactccttcagcaatggtggatgctctgtttggcacaatgaattgcttaacataagaaaaaatcaatgtactggcagtagcaatacagatggagaaacctttcacattcgtcttgctgcacaagaattgtatagtcaagaggtaaataaaagaggaatggttattggtgttctttctgcatgttttgctttatttggtttgctgctagttatcctactactcgtgaaatggaggaataaaacaaagctatcaggtggcacaaggaaggattatcagttctgcaatgggatcattccatttggatacattgatttgcaacgtgcaactaacaatttcacagagaagcttgggggaggtagctttggttccgtattcaaagggtttctaagtgattacacaattgtagcagtgaaaaggcttgaccatgcatgccaaggagagaagcaatttagggccgaagtgagctcaattggaatcatccaacacatcaatttagttaaactaattggtttctgttgtgagggtggcaggaggttgcttgtttatgaacacatgccaaatcgttctcttgatcaccaactatttcagactaatactacacttacctggaatattaggtatgaaatagccatcggaattgctagaggattggcctacttacatgaaaattgtcaagactgtatcatacactgtgatattaaaccagagaacatccttctcgatcattcattcagtccaaaaattgcagattttgggatggcaaagcttttgggaagggattttagccgagttttaactacaacgagaggaactgcgggttaccttgcacctgaatggattagtggtgttcctattacaacaaaagtcgatgtttacagctatgggatggtgttgctagaaataatatcaggaaagaggaactcatatgcctcatgtccttgtggtggtgaccatgacgtttatttcccggtgcttgtggcgtgtaagcttcttgacggagatatgggtggtttggttgattacaaattacatggtggcatcgacaagaaggaagttgaaaaggctttcaaggttgcatgttggtgcattcaagacgatgagtttagtcgaccaacaatgggaggagtggttcaaattctcgagggcctagttgaagtcgacatgcctccaatgccaaggcgacttcaagcaatagctggaagctcaaattcaacatgctccctgtattctcttccagcaaatatttaagttcgagaatccttgtaaattaaaaggaactttgtaattcctgacatctttcttctttttaagttgtcttgttaacatagtaatttttttacagtcttgctatctgtcgttcaggattcagcaaagtacaaaactagcacaatgttcacctgaaaattaaggaataattaactatttgccactcttacgagtggttctaaaagatttaccactggacccacatgtcatagacacatgaaggcccacatgtcatagacacatgaaggcccacatgtcatagataacgagtggcaaattcttaattgacacatcttaaaagtggcaaataattaaatgtcccaaaaattaactccatgtgcaatttctgatctcttcagtcttcagaataacagtcacacatgaatggctttattcgtgagtttactgatcgctggtcgacggcgtctgagataaagcttgtgttggcccggatggtcgattcatcacttttactctgaacaagtttgaaagccagatcgactgttagttcatcattttgttctttctctctctctctcttttttaacaaaccggcacgagacgatgcccgtttcaattaatatagaaggaagaaaggtttgcatcccctaggggctgaaaaaaaaaggtaactatagctatacaaatgccgattgtagctcaagcaaacgctttgcccctgctgaaagcccatgtttaatgtttttgccacttccttgattttattgaccagacgatgtactggggactccttggagcaggtacaatagcaggctataagccggctataaccatatatcgagaagaaaaaagaagagagagaagaaatcaggctacagatttgtagccggctgcaacacggactctaagatattatgtgtgtatgagaggtgggaccaggtattaatggtgtaatatatttttatagttaactattgtatgaatgaactattagattgattatagatgtttgggagacagtagtggctatactattgaccttgctcttatgcatcctcattcattcagctcttaaagtggctgaaatctgtatcgccagtcaacaagtgatatggtgtagcaattctgaatttgccaacgactttgtgcgcttagcaggctgttacaacttacagctagtagcaaccaccatttcaggctttcagctggctttgccacgcctctcgctatccatttgttcagaagtcataaacctgtatatcaaagagcctgtccaagatcgtcgagatcggtcagacagcaacgctgtcgcgtttggttctggccttccggtgaatgatcgaattattatgtgccaatttcacaaggaacatttgtttaatggccatgctaatcatgattatattttaaaggttaaacagacgacgatttctctccggatatcactgccacagtgccactggacgccaactttgtctccagctatttgaccaggttatctctgagctccacagtccaaaacatcggaaatgataagatattaataaacatctcaaatgatatagaagtccaggaagacatgattaattttagtttccaaagttgaaaacaaacagatgttgagcacagacttggatcattcgccactacggtacaatttgcgagctttcagatgtcatttgtgccacagtcaaattactaccatttaccaacaacttgatccaaattcaacccgatcgatcattgacagaaatcacccataccttgagattctttaattcgccggccgatacagatgctaaacataaatttggatcattcatcactagcgctacaaatttctggttttcagaaagtcatttatgccactattgaagtactccctccgtttcatttatgaatgaatctatacacatacatatatatctagattcattaacatctatatgaatgtggacaatgctagaaagtcttataatatgaaacggaggaagtatcatttaccaacaactgagtccaaattacaacccggtcgattgaccatttgacagaaatcagccgtactttcggattctttaattcgccagccgactaattggtcacaaagccctaagagtcggttatatgtctgtatcatgatgtaatttttttactgccatatatgctaggtcaggccaatgactccatccttctttctgccttcaaatatgttaccatctgccaagtcccaacgaccatgcaagcttactcactttccctcttgcagtgtgttctctcgtatccacacgcgcaagccgcagttggcatcctctgtcatcctttttttttagataaaattgattaaacccggcctctacatccaaactggatgtacacagccaaggcatcctctgtcatctacctcacccaagtacctttgcagctgtgctagctagttcttgatttgttcaccatggctcttcccatcactgtcctgttcctcctcttcacactgcacattcctgcatcctgcaaggtgacagacaccatctcagctggggagacactcgccggcaatgacatacttgtctccagcaacggcaagtttgcgcttggcttcttcccaaccagcagtaagtcctcccacaatgcttcaaactggtacctggggatatggttcaaccaggtgccaaagctcactccagcatgggttgccaatggagatgagcctgtcactggccccacttcgccggaggccacaatctccggtgacggaaaccttgtcatcttagatcaggccacaaagtccatcttctggtcaacccaagctgacatcacagcaaacacaacaatggtcaagctattggataatggcaaccttgtcctgcagaacacctcaaattcttcggttgtcttgtggcaaagctttgactacccaacaaatacccatctcgccggtgcgaagctaggccggaacaaggtcactggcttaaaccgccgtcttgtttccaggaaaaactctgtagacccagcttctggcatgtacagttacgagttaactgacaacaatggttctaccaggttcatccttgcagctctcaactcctctataccatattggtctagtggagaatggaacggacattactttggttccataccagagatgacaggtcaacgcttaattgattttacttttgtcaacaatgatgaagaagtgtacttcacatataccttactagataacgcaacgatcatgcgttttatgctggacatctctggtcagaccaagatatttttgtgggtggagcatgtgcaagattgggtaccaacctacaccaacccaaagcagtgtgatgtgtatggcatttgtggagctttcacagtctgcgaagagagcaagcttcctatctgcaagtgtatgaagggcttctctgtacgatcacccaatgactgggagctagatgatcgaacaggcggctgtgtgagaaatactccattagactgtggtataaacagaaacaccagtatgcaagacaggttccaccctatgccgtgtgttggattacccagtaatggccaaatcatagaagatgttacaagtgcaggtggatgtgcacaaatttgcctgagcaactgcacttgcacagcatattactatggtaatactggatgctctgtttggaatgatgaattgattaatgtgaaacagctacaatgtggtgatattgctaatactgatggagcaattctttaccttcgccttgctgccaaagaggtgcaaagtataaaaagcagtggacgatcaatattcattggcgttgccatcactgcaagtgttgcttcctttgctttggcactcttcttgatagcgaagatcccaaggaacaagagttggctgcttggtcacagaagaaagaattttcatagtggtagtggagttattgcatttagatatgctgatctgcaacatgcaacaaaaaacttttcagataagctaggggcaggtggttttggctcagtattcaaagggcttcttaatgagtctactgtcatagcagtaaaaaggcttgatggtgctcgtcaaggagagaagcaattcagagctgaagtaggatcaattggaatcatccaacacatcaatttagttaaactaattggtttctgttgtgagggtgatagaagattgcttgtctatgaacacatgccaaacctctctcttgatacccatttatttcacaatgacgctacagtcttgaaatggagcataaggtatcaaattgctcttggagttgctagaggactagcttaccttcatgatagttgccaggattgcattatacactgtgacattaaaccagagaacatacttcttgatgcatcatttgttccaaaaatcgcagattttgggatggcaaagtttctgggaagggagtttactcaagttctcactacaatgcgaggaactatagggtatcttgcacctgagtggattagtggtacagttattacatcaaaggttgatgtctacagctatggaatggttttgctggaaatcatctcaggaacgaggaactcaagcaaagaatttgcaactcgtgatgactatgaatatttccctctgttagtggcacataagctgctggatggtaatgctgggagtttggtggaccaaaatttacatggcgatgttgatttggagcaggtagaaagagctttcagggttgcatgctggtgtattcaagataatgagcttgatcgacctacaatgagtgaagttgttcaatatctcgaaggtcttcttgaagttggcatacccccagtgccacgactacttcaagctattgcaggcaacccatattcaaagtgagcactaagcagaatttttcttatacaaacatcttaaattgagaacttatcataatcccagaaatatatgtgcggctgagaggcatgataagagcatgatatttttccatgacatcattttgtataatatcataaaagaatatgacacatcaacattccatgccagcactcctaactgcatcttttttttttgttatatgtgcaggtagttgatgggtacctgaaccaagcttcagaagaggcaggccaactgtaagatacaatagagcaccgtgcacctcattcttgacacgaaagtagctctgatgtaatcctggggcttcccttcagtagttgcctggagtctaatctgtcaaaataaaagcagtgatgatttgataatccaagtctcctgcagaaaccaaagtcctctgctaatctgtggcacagctttgagcacctgataagtaaatttctcgccggtacaaagattatttagaacaagcttgccggtataaactgctgtctaattgtgttgttcccagtaagaatttgtcaaccttgtacctggaatatatcatgagtaaggtcatcctcaaacaactgaaatctccccagccacacttggttttttactgaaccaagacacactgcttgaacaagaagggatcgatcaatagctcaatttgatgttagccatgttatgtcaatagcaccaaactgtacatttagcaacaatggaagaggatagcactttaaatataccttatgagacgagataacagctgtgcatcatttacaggattcttcttgtgaaatggagattaagacctcacgagactgcataataatgtattatatgccaaccccaaaaatatttgtgagatgtcttctggtcctccaacaaacagcagcggcaatcagaatcagtcttcggtatttggaacatatcaccccccaaaataatctaatttcgtcgtaactctgatcagccaaaaaatacttgcatcaacgttatgtaactgtagacttgaaaattgaaatgtacaaactgctaagtgagagatgaactctaaatccccattaacctttgtctcctcaagcgcgcgccaatttctaccggaaccctagtccattccaagcgaaacgaggatcaaacaattcgtctcgctttggcgacgctcgcgggggcacctgcgaaaggatccccaaatcgtagaggaacagataccagtgtatgtaggggcgacgaagaaaacccataccttgccacggagaggctccgtcccatttctcggcgtctccgccggcggcgccggtggcggcgaccggcgaggtcggcggcggcggctggccgccgacaaggaggcgaagagagagaggagagtcagagagattctaggccaccagcacaggccggcccatcacccccatgcgagcgagcttttctgcgcgaattcgcccacaaaaaaagtccacattacgtcccttagctatgggtccgagtttcatccgcgtccctcaaccgcgaaaccgggatacacattgtcccccaagctataaaaaccagtgtaaatcaacacgagcccctcaatgatttgggtgtcgattccatcttagggcacccacaatggttatctataagctctctacaagagatccatgtcagcatattttcctacttggaagagattaaatgaagagagagagcaaagctatctactaacatgaagatagtctatagagaaaaacgaggcaatggattagagagctatagatacccatgtagacataccattgaagtggtttactattaatctagtctattgttgaggtgtacatattttatagatagcaccttaccattgcgggtgctcttatgtgatacattgacatagttttcatccgatgtggcgtgtacttataatcttcatcctatccctatcagttcatccataacctctaaatgaattaactttaatcctcttgttttttcgcctagtccccctctctctcagctcaaataatcacatgacgagaggacgacgagaagaagaaacagagaagaatgccttttttttccttactagcaaaagtgcccgtgcgttgcaacgggtgaaaaaattctaatgataatatacgtttttcatgaataatcatgtcaatgacaatgtttgtattttaatgagcggcttgtttttttataaatggtgttttttttcttgcgcgattttctcaaaccattcagaaatggcacatttctttctaaaagtttttttatcatttttcttttgcttttttacttacaatgaaaaccatatttttctctcttttgtgccttttttttctagtgtgttcttttgtctttttttacaattattttctcacgcattttttttcttgttttttcttcaaatgttctttttttgcttttttccaatacaggacttacgggaaatagaacttttgttgttgttgtttttctttttatgcacctttctgcttttgttctctctctttttattatttttaccaaaaacgaccacaagtatcttgttgtaagattatagggactcaaatgtaaatataaaaattacagggactcaaatacaaaagtacaaacccaaaaaataaaataatataaaaatggaatgctctcgacatgtaggtttcgtttttgtaaacagatcttcaatccggcacattattttatttcaccaagatttgagagataacacggtacagattgaaactgagaggaggggtggcgggtatctcggactcaaaaggactggcgccttttatttttcgggggaatcggatctatagtcggatttttttcgtttttgagagagaaccggataggagtcggacttttttattattattttttcgctatttttttcaagatttttttcgtccttttttttggcacgtacggaatcggattattttttcgctttttttttatcggacggttacggtttttttatcgctcgtctagttttttcgccggtttcttttcgcccttttttgcagggaatcggaatttttttgccctttttttatcggacaattacggttttttcgcctggtttttttctcgctcgcccttttttttttgccggttttttgacggacgatggaagcatctcttattttttaagtagtagagataaatccaatacaaataattatgaaaaattctaaaaaaaacaatgtagggtatattgacatgtattgttctgccagaaatcgaattcaattttgacctacacattaaggaactaaaataagaaaaattcaaatgtgaacaacgcgttactattctatgctgaatttatcttttatatcctacctccatcccaaaataagtgcagccatgaatatccgtgccgaacgtttgaccgtccgtcttatttgaaaaatttgaaaatatttagtcacacataaagtactattcatgttttatcatctaatagaaataaaaatactaatcataaaaaatttttaaataagacgaacggtcaaacgttgaacgtaaatagtgtaaaactgcacttattttgggacggagggagtatatcttacgtgtgagttgagtttgtacccaagattttatatagtggtgtgtgtacaaatcttctgaatcaagtaccgactgtttgttctgaatcatttttggatgagtctgtttgttccttactcctgaaaagttaggattaaattttagattaaagtggcatgcttttcaaactactaaacggtgcattttatgcgaaaactttctatatgaaagttgttctaaaatatcagattaatccattttcaagtttgtaataattaaaactcaattaatcacacgttattaccacctcgtgttacgtgaaacacttcatcttcatcttcatcttcagtagattcaaacaccaccatcactctatgcttatatagtgtccttctgaactattcttctctttaccttagaaatataaataaggtagattagttgtatgaattgatcaataaatttgagctaatttattcgtaatcccccttttcaattcggttttcgtgtggggcaagttttgacaagcttttctctaacttcattcttcttctagaatttgatctaaccgttagattttagggtgtgtttacttcacaccaaaattggaagtttaattgaaattggaatgatgcgacggaaaagttgaaagtttgtgtgtgtaggaaagttttgatgtgatgaaaaagttgaaaatttgaagaaaaagttaggagctaaaccagaccttagtgtggaatttttgttagctctatagtgaagtctggtttctacaagcaaagtttgtcatagttctatcggttactttcaattaatctaggtttcagtaaacatatgttttcgttcagattaaagtttgttagatcccctcaattttatccattgcttttatgtctcttgacaaaaaaaaaataaaccaggcttattcttcaagatttctattatatggatttgaattgccgacgttcagtccgaggaagctttgctgtttttctccgttggcttcccacgtactgtagctgcgctactgtagtactgttttgaggctttttgcatattagggtgactaatttagtgttttagtgatattagaataactttattactacctccgtccaaaataagtgcagtcatgagaatccgtgtccacgtttgaccgttcgtcttatttgaaaattttataaaaaaaatttttaaaaaagaaatagtcgcacataaagtgctattcaagttttatgatctaataacaacaaaaatactaatcataaaaaaatttcaaataagacgaacatttaaacgctagatatgaacggatagagtattattttcactgcggttttgcattttttctaagaaaagaaacaggtgatcattcacttcttgtcatcgacaccaccccgatataaaatctaatgcctagaaaaaagtattacgaattgcttctttcttaaaatcgaatttaaaattaagtttcaaaatttaaattcacggataaaccaactagcaaactactccctttattctaaaataagtcaacctcgtaataggatataacacaattcatatcctaacacaagattgatttattttgttacgaagagagcatgaagcgataccgagagaaggtgaccgagcacaatctctagaaaaggcaccggaaaagttgagaagtggactggataatcattttagcattgaacattgtttttagttgcagcacgcgtagccgtacagacgaccagaagcaacgcaacaaacagagtcaatgataagcgtcatcacctgtttgctggggttgggatcacctgcataatggcagccatccgtttttttttaatgaacggatcagatcgttagctacaatatcgatgtatttagtactcatcgattctttccgtagtgatctacagtaaccagatgcatccttcaactccaactctaactccactcctcctggagctggagctcagccaaacagtttcagctccaccaaaactgggagtggagttggatggagctctctcacaaaatgtactagagttgtggagctggatttaggcagctccacaacgccactcaagactcaactcctgaagttatatttaagaattggagctgtaccaaacagatccttaacactcaatttcagatttaacagctagaagtggactatacaagttgtagtcatattattaactgcactggatccaaatcctgcctgcggaagtgctgtactgctgtccattttcactctatttaatctactaccaattagaacatttgtgcaaggaactggtgaagatggaaatactctaggcatggctgatacattaaattttcatatttcaaatcaaaatgatttaaaatcaacgtacatgtggaaggaaagaaaaataacttgtgacatgttcgaaagagctagctgctgcaacattgctgctacgcttacatcaactagccagcagcaactacagcagcctaagagcacctccaacagtctctccaaatgtctatttggctaactctccatctaatttagcaagtcaaactcgttgtttactccaacagcctccccattcaccctctctattctaagtctattacagtgggacccacgcgtcagtctctcaacatttccttcttttcatctttctccccctttccccaagcctcctctgctggtctgcccccatccgctgccgccatctaccgccgccgccgccacctaccgccgccgccgccgccaccatctaccgccaccgccgccgccgctactcgggctccatccccatccactgccgcggtgccgccatccgccgccgccgctcgggttttgctcccatccgtcgctgacatccgccgccgggcgctcgggctccgccccctccatcgccgccgccgccgccatccaccgccgccgctcgggctccgctcccatccgtcgccaccatcgggctccgtcttcatccaccgccgccgccgctcgggttccgtccccatccgccgccaccgctcgggctccgctcccatccgtcgccgccatccgtcgccgggagctcaggctccgtccccatccatcgccgccatccgcggccgctgctcgggctctgtgcccatccgtcgccgctcgacggcgagggacgacgaagactacggcgatgacgacggcgagaggggagaagccagcaccatgaagccgtcgccggcggtagctagctgcgccgattgcaagtagtaggaggtgagagagaagcatcttcaacgtggggcccacaaatagcaaggcaatttgggctggccaaatttggccattgagaggaggagtttggccagttatttggcttagccattctagtagagaggctgttggagtagaatttttttgctaaaatagctaaattttaacttggagagactattggagagtttgttggagatgctgtaacagagtaacagttgggatgcagtacagacctgcagcccaacaaactgtagaacagaccaccgaagaacagtgaacagaccaccaaacgttccactgatttcaagtaaaaaaaaggtactttatcctttcaaattactagttttatcttaaattaaaatatttatacatttttttattaatttttagaaatttgtataattcaataacatgtgaataattactagaaagcatttctcatgataaatccaaaaacataaatcttataataaatctcataatgttaaaatatatgaacgtctagaaattggtgataaaaatacaaatgtttgactaaagagaaagctagggtggcaagtaattttaaacggagggggtaaagtttaaatgtagttgcataaatgtcacaccctgaagtttccccccttttcttgctttaaaaattggttaaataaattgcccgaagaaattatcttaattaacctagagctaaatccctagttaataaattcaattaataatcggaaatagcgtggtggaatttttcttgagttccccatgctccaatgcattaacaagatttttagtggaattttcagagccttggaaataattttaaccaattaaaaatcaccaaagtgcaattttaaatcccaggaaaaatcctttcttcttttctttttcttttccttctttttctctattgggccgtcggcccactccctcccgcgctcggcctccttcctttgggctggcccgttcccctttcccctctctccgggacgctgacaggtggggcccacctgtcaggtcgtccccttcctccaaccgcccgccccacgacggcaaccgccgccaaaaccgtgcgcgtcgccgccggttgccatggccggccggccggttttgaagccgagccgagccgtgcctagccgccgccatgccgtccgatcggcctcctggccaatccggaccggcggtggaccacccgcgtggtcccggtccacggtagaccggccaccttgagccactgcccgtggggcccacatgccggcgcccccttcctctcccctttgagccgctgacccgtgggccccgcctgtcggcgccgccccccctggatgacgtcagccctgggtattattgcgcaataattaattaaggactttttctttattagtaaaaacacagtttatcttctaaaattcataagtaattcatccgagctccatttaagtccattcaagtctcagtaaatcaagaaaaatgcaaagaatccattaaaaatggttttgtttcctgtttcagtagtcttatagcatgttttgcttgtgtgctttgtttgtcgcgtaggtttcggccgtttcgtcaatccgcggtttctcgaagacgttgctgaggtctcatcagttcgagagcaaggcaagtcatgcaatacgtttgatcatattgtacccaatttaccaatatcccgcatttctattaaatgttgcattcttttacaatgtaatgtgggatgggtcctattcctcagccacatattggttaccttatgccattgataacttgggtatgaaaatgactagatgttggcttaggaaatgcttagccatgcttagttcaactaggacacaaatggggatcacattattacatagactctcactattggcatagctttagattggtgccaccgcaagggtgtcagttaattaaaatattctgaatggcgggctgtgagtgcatggttttgctggtcgcacccatggcagttaaggaccggttcacgggaaaccctgggagacttaccgtgcttaccacaagcgggagtgggtaactgcttgatctgaagtatagctcgaccctttcctaggcaccggtggcgagggtgggcgtgatggagttgggtcggccgagatgttcggttgtccagctgccggattcaccgtggcgcaagaggggaccgcccactgccttttgagggggtaggggtgaaaccttagcgtgatgtggatggttaggggagggttatgtggagggtcttgtcacgatttccccctttgcagtatcatggtgatacttcggggcatggcgacatgtgtggaatcatgtcttgtgggtacagttgtacacctctggccagagtaaaactattcgaatagtcgtgcccgcggttatgggcgatcaaccagattcaccgtgattagtctcacccctagtttagcttaataaactggtgtagttcaggtggttggttgggcctgttgcaacgtggtgtagcgttagacagtgattggttaatattgattaattactacagctgttttactgctttcaattactgttttgaaatgcctgctttatgcaaaagaacccctagcttcctttggttatatcctacatcatacctcctcttccgatatgacttgctgagtacagtgggtagtactcagtcttgctctcttttcccccacaccagagttgaagttcttctcagttggagccgtctcagagaggttggtttcgtcgctgtcgtcaaggtttgcctgtggagtggagtcgcccgctgctgaagtcaagcttcccggtttagctcgcttttatctttcccgctgcatttgtaatcttttatatttttgtaagacgtgggtctgtatgtcaataattgtcgtttgtgtaccctggctggtcctggacagggatttaatgcacattcagcttagaaattctggttcgagaatttctgggtgtgacaagttggtatcagagccgaccttgaccgtaggacaagccaactggaaacctaagagccctctgaaccctttttttttcatatgcatatgcccttttgcacttggattttgtttcgggaaaattttggggtttgttcttttgatttgtgggaaaaatcttggtcgcttatttaattggatttctcgactagggacagtctagggatttagtaaaagtttattcggaatttattcggtagtcggtcgggaattgtcgggtgatatgcattaggtcgtgtctatgttcggtggggtaagtttatgcgtatcagtatgactatgcatctatttcatgcattaagttattgtttagtcagttgcattagtgtcttttgtctcggttcgtgaaaaatgttgttctatgcgtaaaaatcatcatgctcggttatttatttgagtcttcttttgctttgtttaatttggatttgagcattaattagttcctatcccttgtctactttagatgtcagtcctatccctcgtttgcgagcgccgccccgagcttcagagtcgccgcccttagctttatcgccttcttagtctgtttgcttgctagttttcgtgtttaggtttgttgcttgtgggttagtcggcggtcattatcatgtgtcagtggtatgactgcctcaattaggagttgcgtgcctctttttcagtgttttaatcaagattaagataattgcacttaaattcataagcaagattagtttctgagccccctgtttttcttccttttctcatatttctacctattcccttcagatggagacaaggaatggttcacgcgactccaacaacgccagtggcagcgaagagccgatcaatggagcacgtgccaacagtgcatctgacaacagtccgtccccaccgcccgagaacccaacaattgctcaggtgttggacaatcagactcagatgatgacaatgatgatgcaacagatgcagcaacagtaccatcaagtgttgcagcaggtgcagcagcaagcacagcagcagcagcagaacctgcagtttggtcctccacctcctcagtccaaactgttagaatttcttcgtgtcaagccgcccactttctcaagcaccaccaacccaatcgaggcccacgactggcttcatgccattgagaagaagctgaatcttttgcaatgcaacgagcaagagaaggttgcttttgctacacaccagttgcaaggtcccgcttctgtttggtgggacaactacatggtgactcgtccagctggggcagaggttacttggatagagttttgtcatagtttcaataaagcacaggttcccgagggaattgtggcacaaaagaagagagagttccgttccctgcaacaaggaactagaacagttatagagtatttgcatgagttcaaccgcctcgcgcgctacgcccctgaggacgtgcgtaccgatgacgggaggcaggagaagtttctgtctggtcttgatgatgaattgactaaccagttgatctctaaagattatgaggactttgagaagctggtggataaggctatccgtcaggaggagcactgtaacaaaataaaccgtaagaggaaggcagctcagttcaggactccccaggggaagagtcagaagcctcgtttcacgatgggacgtcacggtggaccttccaccatgattatccggcagcaccgtccctaccacccgggtagcttcaacgagaaccaccatagtggcagtcacaacaacagtgagcagcatagcctcaaccctactccgagttcactaaagattccagctcaatcagttcagctagctctgccagaacagcccaagaggttgggagaaaaacccgaactctgcttcaattgtaacaaacccggacacacggttggaaagtgcccaaagccaagatgtgctggacccaagttcgttcaggcctgtgtcaatcatgcatctgcagaggaggcgcagtcagcaccagaggttatattgggcacattccccgtcaactcgacaccggcagtaatattgtttgattctggtgcaacccattccttcatttccaagcgttttgctggtgcacatgggttatctttagtgaagcttaagataccaatgcgagttcatactcctggaggtggcatgaccacaactcactactgcccatctgtgacagttgaaattcaagggttgatttttccaaccaacctcattcttctcgaatccaaggacctggatgtcatacttggaatggattggttgacaaggcacagaggagtgattgattgcgccagccgcaccatcaagttaaccaatgcaaaaggagaggtggtaaccttccagtctccagtgccgcagaagccagggatcagtttaaaccaggctgctggtgaagaacaagaggtagcagtggagaaaaccactaagaagctggaggatattcccatagtcagagagtatccagaggtttttccggacgatctgacaacaatgccaccaaaaagggataccgagttccggattgacttggtacctggaactgcaccgatccacaagaggccttacagaatgggagccaacgagttggcggaagtcaagaagcaagtcgatgaacagttacagaagggatacattcgcccgagcacgtcgccttggggtgctccggttatctttgtggagaagaaagacaaaaccaagaggatgtgcgttgactaccgcgcactcaatgaggtcaccatcaagaacaagtatcctttgccaaggattgatgatctgtttgatcagttgaaaggagctactgtgttctctaagatagacctgcgatcaggctatcaccagttgaggatccgcgaagaggatattccaaagacaacattcatcactcggtacgggttgttcgaatgcacagttatgtctttcggactcactaatgcacctgtcttcttcatgaatttgatgaacaaggtgtttatggaatttctagacaagtttgtcgtggtttttatcgatgacatacttatctactccaagtccgaggaagaacatgagcagcatctctggctggtacttgaaaagttaaaagagcaccagctatatgccaagttcagcaagtgcgacttctggcttaaggaagttcagtttctcggtcacatcgtgaatgctcaaggagtagctgtggatccagcaaatatggagtcagttaccaaatggaccccaccaaggacagtcactcaggttcggagtttcttaggacttgcgggctattaccgccggttcattgagaacttctctaaaattgctaagccaatgacagctattgaagaaggaagaaaagtttatctggtctgctgaatgcaataggagttttgaagaactcaaacgacggttggtgtctgcaccagtcttaattctgcctgatcagacgaaagatttccaggtctattgtgatgcatctcgccaggggctaggatgtgtgttgatgcaggatggcaaagtggtctcttatgcttcacggcagttgcgtcctcatgaaggcaactacccgacgcatgatctggaattggccgcagttgttcatgctttaaagatttggcggcactatctcatcggtaaccgttgtgaggtatatacatatcacaaaagtctaaagtacatcttcactcaacctgatttgaatctcagacagcgaagatggttggagctgatcaaggattatgatatgagaatacattatcatcccggcaaggctaacgtggttgcagatgccttgagcaggaagagctactgcaatgttgcatgggtagagcaactatgttgtgaggttcaacgcgatttggaacatctgaaccttggtatagttgagcacggattcgtggttgccctagaggcacagcccacactggtggagcaggttcgcatagctcaagcaagtaatcctgaaatagcagagctcaaaaagaacatgagagttggaaaagcccgaggttttgttgaggatgaacaaggaacaatctggatgggagaaagattgtgtgtacccgaaaacaaggaattaaaagacctgatactaaccgaggctcatcaaactcagtattccattcatcccggtagtactaagatgtaccaagacctcaaagagaagttctggtgggtcagcatgagaagggaaatagctgaattcgtagcactctgtgacgtctgtcaacgagtaaaggcagaacaccaaaggccagcaggtttgctacagccacttcagattctagaatggaagtgggaagaaatcggaatggatttcatcaccggtttgcccaggacgtcatcggggcatgattctatttgggtagtcgttgaccgactcaccaaagtggctcacttcattccggtgcacactacctactcagggaagaaattagtagaactctatctggcaagaattatgtgtttacatggtgtacctaagaagatcgtgtctgatcgaggaagccaattcacttcaaagttctggtagaaattacaagaagaattgggaacccggttgaatttcagcactgcttaccatccacaaacagatggccagaccgagcgagttaatcaaatactagaggatatgttgagagcctgtgcgcttgactttggtggagcatgggacaaaagcttgccgtatgctgagttctcttacaacaacagttaccaagctagtctgcagatggcaccgtttgaagcactgtatggacgaaggtgtcgtactccgctcttctgggatcagacaggggaacgccagttgtttggtacagaagttttaaatgaggcagaagagaaagtcagagctatcagggaaagattgagaatcgcgcaatctcggcagaaaagctatgcagacaaccgccgaagggagctcgctttcgaaacaggggattatgtgtatctccgtgtcactccgctcaggagagtacatcgcttccaaaccaaaggaaagttggcaccacgctttgtgggaccatacaggatcttggaacgtagaggtgaagttgcttaccagcttgagcttccctccaacatgcttggcatccacaacgtgttccatgtctctcagttaaagaaatgtttgagagttcctgaggaacaggcaagtccggatcacatcgaaattcaggaagatctgacgtatgtagagaagccgactcgtatcctcgaaaccagcgagagaaagaccagaaacaaagtaatcagattctgcaaggttcagtggagtcatcactcagaagaagaggccacttgggaaagagaagatgagttaaaggccacccacccgcacctcttcgccagctcttccgaatctcgaggtcgagattccgtttaaggggggtaggtttgtcacaccctgaagtttccccccttttcttgctttaaaaattggttaaataaattgcccaaagaaattatcttaattaacctagagctaaatccctagttaataaatgcaattaataatcggaaatagcgtggtggaatttttcttgagttccccatgctccaatgcattaacaagattttaagtggaattttcagaccttggaaataattttaaccaattaaaaatcaccaaagtgcaattttaaatcccaggaaaaatcctttcttatttttctttttcttttccttctttttctctattgggccgtcggcccactccctcccgcgctcggcctccttcctttgggccagcccattcccctttcccctctctccgggacgcacctgttaggtcgtccccttcctccagccgcccgccccacgacggcaaccgccgccgaaaccgtgcgcgtcgccgccggttgccatggccggccggccggttttgaagccgagccgagccgtgcctagccgccgccgtgccgtccgatcggcctcccggccgatccggaccggcggtggaccacccgcgtggtcccggtccacggtagaccggccacctttagccactgcccgtggggcccacatgccggcgcccccttcctctcccctttgagccgctgacacgtgggccccgcctgtcggcgccgccccccccccttggatgatgtcagccctgggtattattgcgcaataattaattaaggactttttctttattagtaaaaacacagtttatcttctaaaattcataagtaattcatccgagctccatttaagtccattcaagtctcagtaaatcaagaaaaatgcaaagaatccattaaaaatggttttgtttcctgtttcagtagtcttatagcatgttttgcttgtgtgctttgtttgtcgcgtaggtttcggccgtttcgtcaatccgcggtttctcgaagacgttgctgaggtctcatcagttcgagagcaaggcaagtcatgcaatacgtttgatcatattgtacccaatttaccaatatcccgcatttctattaaatgttgtattcttttacaatttaatgtgggatgggtcctattcctcagccacatattggttaccttatgcaattgataacttgggtatgaaaatgactagatgttggcttaggaaatgcttagccatgcttagttcaactaggacacaaatggggatcacattattacatagactctcactattggcatagctttagattggtgccaccgcaagggtgtcagttaattaaaatattctgaatggcgggctgtgagtgcatggttttgctggtcgcacccatggcagttaaggaccggttcacgggaaaccctgggagacttaccgtgcttaccacaagcgggagtgggtaactgcttgatctgaagtatagctcgaccctttcctaggcaccggtggcgagggtgggcgtgatggagttgggtcggccgagatgttcggttgtccagctgccggattcaccgtggcgcaagaggggaccgcccactgccttttgagggggtaggggtgaaaccttagcgtgatgtggatggttaggggagggttatgtggagggtcttgtcacgattttcccctttgcagtatcatggtgatacttcggggcatggcgacatgtgtggaatcgtgtcttgtgggtacagttgtacacctctggccagagtaaaactattcgaatagccgtgcccgcggttatgggcgatcaaccagattcaccgtgattagtctcactcctagtttagcttaatgaactggtgtagttcaggtggttggttgggcctgttgcaacgtggtgtagcgttggacagtgattggttaatattgattaattactacagctgttttactgctttcaactactgttttgaaatgtctgctttatgcaaaagaacccctagcttcctttggttatatcctacatcatacctcctcttccggtatgacttgctgagtacagtgggtagtactcagtcttgctctcttttcccccacaccagagttgaagttcttctcagttggagccgtctcagagaggttggtttcgtcgctgccgtcaaggtttgcctgtggagtggagtcgcccgctgctgaagtcaagcttcccggtttaactcacttttatctttcccgttgcatttgtaatcttttatatttttgtaagacgtgggtctgtatgtcaacaattgtcgtttgtgtaccctggctggtcctggacagggatttaatgcacattcagcttagaaattctggttcgagaatttctgggtgtgacaataaatctcgcgattctgctactactaaaactacatattttgatattcgagcattaaggaaaacaaattttagtggagagcagatgcaaacaggctcctgtacagccccgccctagttaattgccccatgtacaaccacgggatcggacgtctttatcgtcacaattctaggcacatcacaaataggacggagccgagtcactcatcggctcccaagctcagatcaagtcggcatctctacttcgcagccgctgtcaacactctcttgccgtcgcacggacagcggatgaaagaggcggcagaggcagcggctgcagagtagagatgccgatgcaatctgatcacaatgcaatctgagctcatgtgatgagaggcttcaaagccgatgagcgacttggctcctccatttaatctatttccgttgcatgcgccgggctgcatgcgagctagtttgcattcaatatccaccatttttttttcctaaatcctatgcttgttgaaatcccacctatacttgcattcattttcgttgatggatatttgtctcctaaagggatgtcctcttctcttttacatggcattgcatgtcattaaaaaattataaaaatatttgacagtgtagatcaatacatgatatcttactccaaaacctatgcaagtataaaagaaaataacaaaataaactctaactagtacatgtactactgacaattatacacagtttgtataagtcgaacttaaacttgcatgtttgtgaacttatatatcacacattgatctatgttatcatttttttcatattttttcacaattatttgaatagcatgcaagccatgagggtacatcccttgaaggataaaaagtctttcccttttttgttgaatcttgtgctaactccctcacttcttgcctctcctccaatcctccacacattcttcttgacttcttttttgatggtcatggcccatgcactactgcattattgtgcaacttgtgtgaaacggttccctgatgtcggccaatatgtcatttgaagaacttgattgatcaggctcctggtatatactccttggagttaggactcaatggggatggtcatttgctatggaactcaaccgtggcgtattggtccagcggagactggaaaggccattattttggccaattgccggagatgacaggctctttcatgccaaatttcacatttttccacaatgaccaagaggcttacttcatatacaccttgtctgatgagacgacgatgatgcacgctggaatagatgtatatggaagaggtttggtgggcatatggttggaggaattgcaggactggtttatctattacaggcagcctgtagtgaattgtgatgtgtatgcaatttgtggacctttcacaatctgcaatgacaataaggatccgttctgcgactgtatgaaaggctactccataagatcaccgaaggactgggagcttgatgatcgaacaggagggtgcatgaggaatactcctttaagttgtggtgctggtaaggacaggacaggtctcacagataagttctaccctgtgcaaagcattaggttgcctcacaatgcagaaaatttgcaggctcctaccagtcgagaagaatgctcacaggtttgtttgagcaactgctcttgcactgcatattcctatgggaatggtggctgctccatttggcatgatgagttgtacaatgtaaagcaattatctgatgcttctccaaatggggatgagggggttctttacattcgacttgctgcaaaagagttgcaaaattcacaaaggaagatgagtggaaaaataattggtgttgccattggtgcgagcattggcgttttgtttttgatgatccttctactgatagtttggaagagtaaagggaaatggtttgcttgcacacaggaaaagcctgaggatggtattgggatcactgcatttcgatatactgatctgcaacgcgcaactaaaaacttttcaaataagttggggggaggcagttttggttctgtgttcatggggtacctaaacgactctaccatcgcagagaaaatgcttgatggagcccgtcaaggagagaagcaattcagggctgaagtaaattcaattggaatcattcaacatattaacttagttaaactgattgggttttgttgtgaaggtgataataggttacttgtgtatgaatacatgccaaactgctcccttgatgtgtgtttattcgaggctaatgatatagttttggattggactactaggtaccaaattgccattggagttgccagaggccttgcctatttgcatgatagttgtcgggattgcatcatacattgtgatatcaagccagagaatatacttcttgatgtgtcttacatgcctaaaattgcagattttggaatggcgaagatgttggggagagaatttagtcgtgctatgactacaatgagaggaacaattggatacatagctcctgaatggattagtggaacagttgttacatccaaagtagatgtttatagctacgggatggttttgtttgaaatcatatcaggaaggaggaaccgaagtcatgaacatttcatggatggtgattattccttctactttcccatgcaagttgcacgcaagcttctcaaaggagagattggatgtcttgtggatgccaatttggaaggtgatgttaacctcatggaggttgaaagagcttgcaaaattgcatgttggtgcattcaagatcacgaatttgatcggccaacaatggccgaggtggtacagtcccttgaaggtctacttgagctcaacatgcctccactgccaagactactaaggcagcgttcgtttggacgacattgagggagaaagcacctcgttttccgcacgcacgctttacaaactattaaacggtgtgtttttttaaaaattttctataggaaagttgctttaaaaaatcatattaatccatttttgaaatttaaaatagttaatactcaattaatcatgagctaatggctcacctcgttttgcgtatcttcccaatctcctcaatccccttctcctcaaacacaccctaaatgctatcacaggaggatcacactcgatgacaacacaatattttgattcactataaatctgtatactgattcccaatttcaagttatgtatcagaacattatatatcatcttgccctttaagaaaagtaggcataagatgtaagatctctaagagatcatgtcttgtatttgaatgaactaagtgtcgtaacatgtaattaagatctctatacccgagaaggaaccagccttactaacaaaatatacttggtttctgttgtctctgtgatatgtaagatctgtaggtatcagtgtgcccccatacaattgtcatatgatgtttttgaaaaacacaggcgcgactgaattgtcagttcagagtggattgttgagcctaacattggcgaatgtgtgacatcctgacagttatgttcaaattatgcacacatcggctatatatcacctatatatacgaggcataattgttcactcaaacaaaagggagaagcctggctgctagcctgaaacttgttttttcaagggtaggcacattaatttggcaactacaacccaagaacctttttgttgagaatatgcaaaagatgtgcacatcattgtattaagatacaagagtttcattacaaaccttgctagatagtggtatagatatgtgtgtgtacatggtatttagctgatatttatgtaaattcgtggaaattggaagccataagaaataagactgttttcacacccagccaatacagtacttgtagcttgcaatagtgccaaagatttgttcaagattctttcagatcagtactaacaatatatgatagcttgtgcaagttgaatcttttgtcttggccaataggacctttgcaccactatccccacggcaggatattttttccattttctagtcaagtcaagccactgtcattcgtcacctaaaatttctatacacgccgtggatgtttcaaaaagatcttacatcaccgtacagaccctttcgactatataccattttgctctccatcattatatacaagttgctagtttttcttttgtcctcatttccctactataaatgaaagcagaactgagaaatgatcaccaatcctacagtttgtaactatagctctcctcatttttatattactattattcttcctacgtatacgcatcacagaaagttctaccatgacagacaccatctcagttgggaaagcatttgacgaaaccgacaagctcgtctcaaaaattggcaggtgtgcacttggcttctaagagactggtagaaaagcatctaaaaaaatagcaagtggtacttaggaatatggttcaatcaggttcccaagctaagtcctgcataggttgcagacagggataagccaattgatgatcccacagcagtggagctaacaatctccaggatggtaatcttgctgtcttaaaccagtcagcaaagaccatcatttggtctacccaagctaaaatcactaccaataacaccattgctacgcacttgagtagtggaaataaatctcatcctaacaaacccttcaaactctttagaagtttctcggtggagctttgactatcccacagatacatatttccctagggcaaagtttggatggaacaaggtcaccggcctaaaccatcatattatttcttggaaaaactcaagagacccagctatcggtgtgtattgcaatgagttagaccctactggtgttgatcagactagcctttcgccattgaaactccgattcctctgttcttcagtttcgtcaggttactgtagcaatctgaaattctcgcttcagaaatcagaacgtgcgagtgatacacagagctgagtggggaggattgagagataggttagctaatcacaacacggggcacggtataaacttcggccaacgacaaccgcggttaatgccgtccgaagtggaaccataatcctgatctcgtgatctctactctctagagcgctaattaatttctaccggaagttgaaccctagccatcccaaacatgctatatccgtctctcgattcgctcgatcggcgacagcgacactcgcaggggcactgagaagaggggtgacgagacccataccttagccgcggagaggctccgctcccgttactctccatctccgtcgggggccgccggtgccggcgagggtcgcggcggcgagacggcgacggctggccgccacacaacccaaggagacgacgaagataatgcgagagagatatggaccttccgtcccgtggtgccgcgtggtgaggcccaagagcggggaccaatcggaaacccagccacggcccgtttcgatgagcggtgcagcccaataaaaaggaagaagttcacttgacatcctttatctaagcgagtcgagtttcaatcgtatcggtcaaccgcaaaaccggttataatgcatatctcatcttctaaagccagcacgaatataatccaaagacagtattaaggttgtgttcggcatatgatgattgatgaagatttctctcgttcgccgcgtgtacgcttccgaactaccaaaaaatttgctttaaaaatcatattaatctatttttaaatttaatatagttctcgatcttctcttttcctctcttatcaacacagcctaagttgttttagatgacaagatactgacatggcactgaaagataaaggaccagaagtgaacttattcccaataaaaatacacgtaaagaaggcccatcaaccacgctcaacgcccattcagtgcgccgatttgtgctcagctcaacgacaaaatgctctctctcactaaacatggagatctcaaggagatttggaggccagtgccaaacttattgggtacccatgattacgcgacgacgtgacatgataatgtattaatgttgttaaggcaatagttaatttgctaatcattgtttgccaccatagtttttttttttttgatctcctgccaccatagttttggtggttgactgtggccgtttttttaacacgcttctgtgtgctgcagtgcaagcccagccacagctttctgctccctttcacacccttcttttatttatttttttagacttaccctttttttattttgagcggcaaatctatcgcctattgatatactctccgtccctaaatatctgacgtcattgacttttttaaacatgtttgaccgttcatcttattcaaaaaaaattaagtaattattaattcttttgatatcatttgattcattattaaatatacatatagttttacatatttcacaaaagcttttaaataagatgaacggtcaaatatgttttaaaaagtcaacggcgtcaaatatttaggtacggatgaagtatgatttgctaatatacgtagattcacgtatactactagttcatagttcacacaatcactcgcccaatcggcaatgcaagaattcttgagaaggcgacatcactgttgaagtagagtactccctccatgaaaaaaacaagagacaaacttaaacatgaatgtgacattataatgaatctagataggtttattgtaccagaaaatattatatccgtgtctaggtttgtttttttacgaagtagataatcactttagcactgttgaacaatatttttacttgcagcatgcgtagccgtacagacgaccagcaaaaactcaattaccagagtcaatgataagcgacaccacgttgcagtgctgtccattttcacactgttccagagcatatgtaaaacgttctagcattggcatcacgccacacaaatctgccaattataacacttgcgtaaggaacttgatgaggctggaaatacttaaggcatggctaaacactctaaacacattgtcatgtgcactcatatttcaaatcagatgtttcaaagaaaatcaacatacatgtggaaggaaagaaaaaacaacttgatctcaagtaaaagaaaaaaatagtttataccaggtagttgcacaaactacagatttcggtgttccagcattagcacagttgcaacctcacactgagcgtcattcagtcaattcctacgcttgtctcgtttcaaaaaattctgacgcctatacttgcatttttgactgtttgcgttgactccctcacttcttcttgcctcctctccaaatcctccgcatccttcttggacttctgttttgttgttggccatggcccatgctctgcactgtgcaactccgtgtgtgaaagggttttctgatgtcggcgaagatgctaattgaagttgatattttacatcccttggtcatgaactcatgatcgagtggtccaaatttgtgatcaaaatcagacaaatttgcttttggataagaatataataattgatctcatcagtgcccactacaaagtctagcctaaattttctgtctcctagcttttccatttggacctgaaaccattaaaaacaaaattggagcaagtagagtacactgcattggtgttgggaaaatgggaaggaacttgcagtgtttcgcaagggtttgaaaaaagagttcacataaagaatacacctactcacctgcgtatggctggcagaggaataaacaaccaattttgatctcgaatagttgggcacagatcatttctgagtccaaacgctccagcgttgaggtttgaccaagatgacaaagattactattatactgatgataaccaatcatacttctcgaggtttgtttcaggttaaacacaatatcgttagtggttacgactgattgagatgtgtgctcagacagtcacaacaccacgttgacctgcgattctgcgagctgaactaaatccatggtctgaattcttaacagcaactcaacctgcttgcagcatcgtgctgtgtataagctagcttcaaaccattcctccttcagttttccttctccaccactcttcccccgtgttcatcttctgcttccccatgcttctcccttgtcatgtccttcttggcctcctgctcctctccctgcacactccggcgagctccgccgccgccacggataccgtgtcacccggccattcacttgccggcagtgacaggcttgtctccaataacagtaagttcgccctcggcttcttcaagccaggtaatgagtcctcctacaccaaccacaactcctaccttggcatatggttcaacaaggtctccaagctaaccccgttgtggaccgccaatggcgagaatccagtggtggaccccacttcaccggagctcgcaatctccggtgatggaaacctggccatcctggatcatgccaccaaatccatcatatggtctacccgtgccaacatcacaaccaatgacaccattgccgtgcttctgaacaatggcaaccttgtcctacgaagctcctcaaactcatccaacattttctggcagagcttcgactacccaacagatacacttttcgctggtgcaaagattggctgggacaaggtcaccggcatgaaccgccgtcttgtttccaggaaaagttcggttgatcaggctcctggtatattttccttggagttagggctcaatggggagggtcatctgctatggaactcaactgtggcgtattggtccagtggggactggaacggtcgatacttcggcctagcgccagagatgataggcgatgtcatgccaaatttcacatttgtccacaatgacaaagaggcctacttcacatacaccttgtatgatgacacggctatcgtgcacgctggactagatgtctttgggataggttttgtgggtatgtggttggaaggaaaccaagaatggttcaagaattacaggcagcctgtagttcactgtgatgtgtatgcagtttgtggacctttcacaatctgtgacgacaataaggatctgttctgtgactgtatgaagggcttctccgtaagatcaccgaaggattgggagcttgacgatcaaacaggaggttgcatcaggaatactccattaagttgtggaagtagcaaggacaggacaagcctcacagataagttctaccctatgcaaagtattaggttaccccacaatgcagaaaatgtgcaggctgcaaccagtggagatgaatgctcacaggtttgcttgagcaactgctcctgtactgcatattcctatgggaaagatggctgctccatttggcatgatgagttgtataacgtgaagcaactatctgatgcttcttcagacagaaatgggggagttctttacattcgccttgctgcaaaagagttgccaggttcagaaaagaagaagaatagaaatataagtggttttgccattggtgcaagcactgccactttgtttttgatgatccttctactgatactttggaggagaaaagggaaatggtttactcgcacattgcaaaagcctgagggtggcattggggtcgttgcatttcgatatattaatttgcaacgggcaactaaagccttttcagagaagttggggggaggaagttttggttctgtatttaaggggtacctaggcaactctaccatagccgtgaaaaggctcgatggagcctatcaaggagagaagcaattcagggctgaagtgaattcaattggaatcatccagcatattaacttagttaaactgattgggttttgttgtgaaggtgataacaggttacttgtgtatgaatacatgccaaaccgctcccttgatgtgtgcttgttcgaggctaatgatatagttttggattggactactaggtaccaagtagctactggagttgcaagaggtcttgcttacttgcataatagttgtcgggattgcatcatacattgtgatatcaagccagagaatatacttctcgatgcatcttatgtgcctaaaattgcagattttggaatggcaaagattttggggagggaatttagccgtgcaatgacaacaatgagaggaactattggatatatggctcctgaatggattagtggaacagttgttacatcaaaagtagatgtttacagctatggaatggttttgtttgagatcatatcaggaaggaggaactcaagtcatgaatgtttcagggatggtgattattcattcttttttcccatgcaagttgcacgcaaacttctcaatggagacatcggaagtcttgtggatgccagtttgaaaggtgacatgaacctagtggaggttgaaagagcttgcaaaattgcatgttggtgcattcaagacaacgaatttgatcgaccaacaatggctgaggtggtacaggcccttgagggtctacttgaactcgacatgcctccattgccaagactactaagtgctatcacaggagactcacattcagtgacaccacaatattttgattcagtgtaaatctatatgctgattcacaattaaaagtagtctaccaggacattataattcatcttgcctttttagaaaattagggataacatctaaggtctttaagagatcatgttaaataaactcgtagttattaagatctctgtgcccaagcaggagatcgtgccagccttccagacaaaatatattttgtgtctatgtaagatctgtaggtattagtgtaccgtatacatttttcatgttgccaattgagatgtttccggacacgcaggcgcaattgccttgtcagttgagagagtatattgttgagcctaacattggcaaatgtgtgacaacctgacaactatgctgctcatattatgcaaagttgcaaacatggcctatatatggcctataaatacaaggctaaattgttcactggcaaacaaaaaggagaagcctggctgctaagctgcaacttgtattttcaaggatagccacattctacaactataacacaagaactttgtaagccagaattacgcgcaaatcctaacactaactaccttaactgcaaggaatttaaaagttggggtgtgtgttaccaatcactgaaggaagataacggatgagcatgtttgattgtctctctttcttcatctacagttgttgctgctgctgcagttagttgcgatttataggccattccatctgccaaaggcaaactgtatactgcatcagtttccatcaaaactattgatctgagaaagataagtgccaagatgagtaaataacagaacataatagaagaatagaactgccgctgctaaaccaaaagttacctttggtgaacaggtcaaggcaagtcgatggtaataaccagctaagtagagttggattagcttcacaagtagttgttgtgtgcatgtgccaagcctcacaagtcgtcacaagaagcaaggtaactgcaagaagcttcaaaagaagttgacacatcaacattcctagctggatttttttttcatatgtagagctagttgatgggtacctggacagaataagctttacaacaagcagtgcaccagccaattaactcttgacatgaagataggtttgatgtaaacctgagaggttcccttcagtagttgtctgaagtctgaaccctgaatatattttagtatatgtattgttataattaaattttctcttagtacataaactggatagagaaggctgcatctctcatcatgcttacttcaattctgttcatcgtgaaatggcatccaatccaatgacacactgcatgggatatatgaaaaaaaacaatacacaacaagaagccttccattgcgactgtagaaatcaaatagcacaaatgccttccattcactgtagaaatcaaaaccatctgtagcgctgctttgagcacctgacaagtaactttctccctggtacaaagatagatcagagcaagctcaatggtatgaactggtgtcttgtttgtttccagtaagactatagtattactgtactatgagttaggcccaaatgcccaacgaagttaacactgccaatcttacgattcgcttgttcagtgaacgatgaaccataaatacagcattctttccctcgaacaaagtactgacaaaaatagtaggaaaagaaaaacctaatatgttcaaatctatttttccttttaacgaacaacaaaatggcgacggtttccaatcgaataatctaccggagagcacgacgcatcccacaaatctcacgcttgcgagcatccgggctagcccccaaggatccctcagtatctcgagcgattcgcatcgtcctcagcggcgcatctgctaacattttgtggaataacaaaatatgctttcccccaaatcgaagaaacaactggtacaaaggagacgtagcggcggcgagaccgtaccgcggagggagatgctccgtcgcacatctgccccatctccgtcggcggcgacggcggtcggcggactggcgctgctcgccgctcgccgctcgccccgcgcgcagaggaggaggatttcacgactcgtccgaggctgcaggcccatcgtcttcatcaccgtggccgaagaagcccaccacagcccacctaacttacggacaacgggacaatgccgcgacaggtccagcgatacataatgcccgaatgcccgataaaacacatgctgcgcttggagagttggagaggtaaaattaatacgtaactctagaattgactcgtgggttacctattaatttgatttatactttctccgttctaaaatataagagcaagtataatagtaggctataagtcggctaaatgctgagttggaggaaagaagagaggagagagaggagaagcgggctataaacttacagccggcttggacacaagaaccaaaaactctgtgagagagacaagtgggtcctgtattaattgtgacaagctaactattatataggtaggctgagagaaggctacaaatgtccttatagctagcaggtcggttgtattattagccttgctctaaggcacaactactttttaaagttgtttcataatataaggcgtgcatgcatgcatgtaattaattagcacattctctcccataaattattattattttaaatcctacactcacaagattttaattctattggttgcatgtattgtactagttggggtgatttatgacaatgatgtgatattaattatttcttggacttcgggttaaggttggttgtgccttatattttggaattgagggtgtaaataattttatggatcgacccacttgcatctctacgtggtaagtcggaccataataggcccacgggttgacatataagttcgcaggtcagtcctcttttcatccctagctgcgctccatgttattagttagtttgtgctttaaatcgtcaatagtagttgtgtatatgatgtaaatttataatgcaaacttgatagaaacttccttgttattgtgatacggtgtttccgatgccctattctaatacttccccatcctagtttgatcattagttttctcaaaatgatcatcatctaataaaatctctttatttatttgtgaaaaaagtaaatgtgcatcgcgtaatgccctgcatgcatgtatgcttgaatgataattaatttataaatgatgaatgttttgatattcttggtctaggtgtccttttgtttagtggatgatcatattgggacaaagggagtagcttcgttcatgatattttccgatattacggtagaatcggtatcattttcgtttctggctctaccgtttggtttgtattgttcaagaaaatagtaaccctttcctgatattttcatccttactctaaagtcttaattgggtgtggcctacgctagaatgtgactcttcaattatattgcttaggccaggtacaatgatctttataagtaaactctctctctattatcatgtaagtaaaatttgattacatggaagaaaaagaggggatgaaaataaaaatatggttgctatctaagccctcttagcaattagtaaaaaaaaaagaattgttgcatggatacgagagaaaggaaagaaatattattttggtacattaatgtttagacaccatgcttacagagataacatttaatgataaaacaagtcacaataaaataaataataattacataatttttttaataagatgaatggtcaaacgtatataaaaagtcaatgacattatacattaaaatacggtaaaatacggactgagaatctgtttagacttttgaaaagtcctacaattccgcgagctaaaaaaactgtgatgcggtgtctgcacccgcgttgcacccgcgttgtttgacctcactaagagcaagtttaatagtatagccaaccgctggctttaaattatctatagtcaacttaatagttaatttatacaatatatatacagtctgcatcaatctcttcaaaagtactacttaataaagagggttgtaaacgaaatcgttagagttgcagcatatttcaacatgacagaattttgcaggatgcgaagaagtaaaactcaaactctcggctgataaaggtcgagctgcataccaaactctcagcagcaacgagctcaataaaactactgaagtagcctggcaaaggctcggtttaaaacagattgttgagtagatggttgccccgcattattacttgattatagtgatagattaaatattttaataaataaacttaaaaaatacagtggaataaagttcttttttttgaaaaaaaagtatttttaaattgtgtagcaaatatcccttttcaacaatctagcactaatttaaacgaactaagcctaaaagatggagttgcctatcgtgagcaggtcaattcaatcagatggtcagtaccagctttgagtactcgtgattaagcactaaacggcatgaccaagtcaaggcatttttcattatttgtctccattatttccaaggccgatcaagcattcttttttttttctttttcaacacacctgtgccaccccagttacgattccattctctttcacatttgagggagctacttcatggctcacacggctgacagggcaagaaaacgatctctgaaaaaaaaaataaagtgcagtggttagttataaattgatcactacgattgtatgaaaatgatgtttttctatctgtcctgcagcatgcattcacagttacgtagtcatacaggtgacaaacgaacagattcattgaccaaacttacccatttgtagcaggtaatggagtctaaaattggcatcccaagcaaactgagcacaaacaaaatataaaggggaggagctgtggctctgcagttctcattcctaaccaacactctgcatccatccatcccaatttctcgttcagaatgcctctcgccctcacccttcttggattattactcttgtcactacacatctctgcatcttgtgctgccatggacaccatgacacctgcgcaagcgctctttggaaacggcaagctcatatccagcaacggcaagttcgcgctcggcttcttccagactggcagtaagtcctctcataacaccctaaattggtacctaggcatatggtacaacaaaatccccaagctaactccagtatgggtggcaaacggtgataacccagtcacagaccccaacaattcagagctcacgatctctggcgatggcgggctcgtcatcttagatcgatccaacagatccatcgtttggtctacccgaataaatatcacaactaacgacacagttgccatgctattgaacagcggaaacctcgtcctacagaatttcttgaattcatccgatgcgctgtggcaaagctttgactacccaacacatactttcctccctggtgcaaaacttggttggagcaagatcagtggtctcaatagccgtctggtttctaggaagaattcaattgacctagctcctggcaaatacagtgttgagttagatccaagtggtgcgaatcaatacatctttacactgttgaactcatccacaccatatttgactagcggggtatggaatggccaatactttccctcaattccagagatggcaggaccctttatagtaaattttacatttgtcgacaatgatcaagagaagtacttcacatatagcttactagatgagacagtggttttccatcatttcttggatgtctcaggtcgaacaaagacatttgtttggcttgagggctcacaagattgggtaatgacctatgcacaacccaaagttcaatgtgatgtatttgctgtttgtggacctttcacaatctgtaacgataatgaacttgggttctgcaagtgcatgaaaggtttctccataaaatcaccaaaggattgggaattagatgatcggacagatgggtgcatgagaaatactccattagactgtgctagcaacaaaaccgcatcaagtttgactgacaagttccattctatgccatgtgttagattgcctcaaaatggctacagcattgaagctgctacaaatgcagataaatgcgccctagtttgcctaagtaattgctcttgcactgcatattcttatggcaatggtggctgcttggtctggcatgctgagttgttcgatgtaaaacagcagcagtgtgatggcataactgatactaatggagggaccctttacattcgccttgcttcaagagaggagcaaagccagaaaaagaacagaagaggattgatcattgcaattgcccttggtctaagcttcgctgctctgtttatgctggcaatcgcactagtgatttggtggaacaaaagtaagaggtataattgcacatcaaacaatgttgaaggtgagagtggaattgttgcgtttagatatattgatctgcagcatgcgactaaaaacttctcagaaaagctgggggaaggtgggtttggttctgtattcaagggatttctccatgactcaagaactatagcagtgaaaaagcttgctggtgcacatcaaggagaaaaacaattcagagcagaagtgagctcgattggactaatccaacatataaatttaataaaactaattggcttctgttgtgacaatgatagtaaactgcttgtttatgaacacatgccaaatcgttcccttgatgttcatctattcccaactgatattaaaattttgaattgggatactaggcatcaaatagctattggagttgctagaggactatcttatttgcatgacagctgccgcgactgcattatacactgtgatgttaaacctcaaaacatacttctcagtgaatcattcactcccaaaattgcagactttggaatggcaaagtttctaggaagagattttagtcgagttttgactacaatgagaggaactataggatatcttgcacctgaatggattagtggagtgcctatcacaccaaaagttgatgtttatagctatgggatggttttgttggaaattgtttcaggaaggaggaattcaaatggaggatgtatcactggtggtgacaaagatgtttatttcccagtgaaagtcgcgcataagcttctggagggagatgtagaaagcttgatagatcccaacttacatggcgacgccaacttaacagaggttgagagagtttgcaaggttgcttgttggtgtattcaagataatgagttcgaccgacctactatgggtgaagtggttcaaattctcgagggaatatttgaacttgacacacctccaatgccaagactactgcaagctattgccggaagctcttgttctattgcagaataatattttcacaatcaaatgattctatttaatcgatagggttatttttacctttcttgtgcataagattgtcagacgtaaatgtaagctacattgtggatctatattgaaatgttaattagtgaaatcaacacagcaggtaccattgcttagcctatagcaatgtttaaacctacgacttccctttcccatattcttttgaagctcatccccctaggcttttcaaccaagcggtctaattactactttcgatttttcaacaattatattcgcatcatttactagatagccataatccctatgatattttttttgtcccacagttctgcatcatctactggatgcatcttgtcaaataaaaactactaaccacccatctggctggagatatcactggattggttgtaactaacaaatgttttctcctctttaaatcttaatgagattggtcggacaacctttggctgacccggcaaaaaaaaatgtcactggattggataatgtcctgtactaaccataaagattggaaagatgtagcaaaaatacatgatattagtagttttttcagtcttacgcaccaggaaattgatcgatcttctctagttgcaaacgaacagtatagaccaatctgtctgttgaatgtaagtttcaaaatattcacaaaagtcttggcaaataggattgcgttggtagcccaaaaaatcataaagccttctcagacagcttttttaaagggtaggaacattatggaaggagctataattttacatgagaccttacatgagatgcataaaagaaagaaggatggtgttattcttaagcttgattttgagaaagcctatgataaggttgattggaagtttctacaacaaactttaagaatgaagggctttgagcctaggtggtgtaagtggattgatcaagtggtaagaggtggcagtgtagcggtgaaagttaatgatgagataggaaacttctttcaaacaaaaaagggactgaggcagggggatcccctctcccctttacttttcaacttggtggcagacatgctggcagtgttaattcagagaacaagcgagcatggtaagattcatggagtgattccacatttagtagacgatggtctttccattcttcaatacgcagatgacacgatactttttatggagcatgacctagaggatgctaaaaatcttaaacttgtactaagtgctttcgaaaggttatctggcttgaagattaattttcataagagtgaattgttgtgttttggcaaagctatagaggttgaaagagagtatgctctcctctttgggtgcaaaactggttcatatacactaaagtacttgggcctcccgatgcattacagaaagttgtctaataaagattggaaggaagtagaagaaagatttcagaaaagattaggtagttggaaaggcaagctactttcggttggaggtcgtctcgtgctcatcaactcagtgttgagcagccttgcaatgtatatgttatnnnnnnnnnnnnnnnnnnnnnnnataatcaaaaagctggactattatagatccagatttttttggcaaagtgatgaacacaagaagaagtacagattggctagatggagtgttctatgtaaacccaaggaatgtgggggcttagggattcagaatcttgaggttcaaaataagtgcttgttgagtaagtggttatttaagttgattaatgaagagggggtctggcaaaacttgtctggcaaaacttattgaggaaaaaatatcttgccaagaagactataatgcaggtccaaaagcaaaggggggactcccacttttggacaggtctaatgggagtgaaggatacctttagctcttttggctcgtttaaacttcaggatggtttacaaatcagattttgggaagactgttggcttggaaaccaatctttagagaaaatatacccatcgttgtacaatcttgtaagaaataagaatgtggtggtggctaaggtgttggagagggttcctttgaacgtctcctttaggagagccataataggagataatttgaaagcatggcatgagattgtagctaacgtggttgatataaaccttagagggcaaaaggataggtttacttgggatgctagtaaaaatggaactttcacagtcaactcgatgtataaaaaactcatgtttggaaatgtgataccaaggcaatcttttatttggaagctaagacttccgttgaaaataaagatcttcttgtggtatttaaaagagggggtcattttaaccaaggataatttagctaagaggaggtggaaaggtagccttagatgttgcttttgtaggtctcatgagacaatacaatacctcttctttgattgccccatggtaagatatgtgtggagcgcagtacatttcacttttggcatctgcccaccgcacaatatgtctcatttacttggtagttggctaagtggtgttaacattaggctaaaaaatcaagtttttgtgggcatagcggcgttgtgctgggcggtgtggttaaataggaatgatgtggtttttaatggaccatgtacttactcttttatgcaggtaattttcagagggacacactgggcaagactttggtctttgttgcttaaggaagaggatggcaacatgttgaaaaattattgcaaggtgttagagatgagggtcttagaattcttctctaattatggctggaatttcagagggagaattgaagcttacactgttgtttaagcttgtttgttgagtttgcttggttgtcttgttagctggcatattagttgaacttggtacttcttatgttacttttaagtatgttttgtaacccatgtaatgggaggagccttagtgctcttgtatggacttgattggcagtgtacattcttcgggatgtagaagccggggtttatataaatcctttatctaaaaaaaagttgcaaacgaacaatatggtggccgacctcgtgcgcccctaatcccaggtaagctactaccagctcttgccaggtgacaaacgccggccaaggtgaacgatggtggaggacgagcaatcaaatgcagggcaggttgcatccccccaaatatttgcgctgatttctaccggaatcttcagttttttgcaggcacacacggagatatatatatattcttcgacgagatgttgatccccaaaacgtacaagaacagagagaccaaaaagcgtaagacgacgagaccttaccactgggagagagagagagagagagagagagagagatcccccgccgccgccgtgagtctggtcatctccggcggcggctcgccgccccgaggttacatcgcccacgacgccgacgagcggtgcagcccaaatgaaagccacgtcatcagcagcaccgggccggcccatctccccttcccaagcaaatttctgcgctcgcggcccaacgcttcgtggctcttcctgctgtggagaatctggagatcacgtggattttttttaatatatttattttaaaaagatttacaaaaataaactaccatttcaaagttttttttaaaaaaagagtaaattacacccacagtacgataacttagtagatgcgtgcgatttagtgcaagaacttgaaaaataagtagagtagtacataaactgacaatcacgtgcattttagtaaaaacattgatacgtaccttttgattaatcctggtattataagcttaactgctagatcattagctcatggattcaattttgtgttttgccatgttcatagcccaagataatgaatatgttgattaatcgaatcgctcggaaattatgcttatttgcatgcacttacttttgataatcatatatctttcggtttcaaatcgatagaattattttattattattataactaacaaattaaaagcaatacataatacatgtagatccttgtcgagatggaataagtggctgcttttttatatggcataaaaagtatggtgtggaatactgatcttttaaccaaaatgcacgcactagccaagttgttgcacatatatgcttattttttaagtttttcactagatcgcacccacataccaagttaatgtactatagacgcaatttactctaaaaaaaataaactccacgcggcgctctatgatagggtaatctatgtgacgtggcaccggccgcaccccgcgggagggggctacctacagaattaccacggtgcaaagtttagtgatgcatggggtgcaccaaggcaaattatatttatatttctatagaacttcaaaatgagaatttatttttgtaaatctttaaaactaataaaaacaaaaaaatcgatcacgagtaacctttcaatctgccaaagcccaaaggccatcgtattcgtgaggatcaggactgccaaagccctaaaccaatcaccagtggaacgaatggtaaggagtaattggtaggggtgaaaacggtacagaaacggatggaaaccatccttatcgttttcgttttcatattttttttcggaatcggaaacctcggatacgaaaacggaatcgaatattatagaaaccgaaaacggagcgaaaatgaaccggcgcgaatacggtaacgaaaatttatcggaataaaaaccccctcaaactgataaatccaattgaataaattatctatgtttaaaagagtaatgttgttgataaattctaatgtagtacaaaatattcttatataattttagatttgcataacaaacattttttaaaataataacagacaaacaccatggtattcactatttagtgcttaaaaaaagaatccagggtatttcgatcacaaaatttctagtaattccaagaaaatttccggaaagtttccgaccgattccgagttccgacggaaactacccttatcatttccgattccatttccgagaaaatatttccaaattcgtttccgtttctgaaaaattccgaccgacagattccgttttcaaaaataggtctggaattcggaaagtttccgtaccgttttcacccctagtaattggtaagtattatttcttttcttttcaacgtgagtgtatacaagtatagattagtcaggattaaagattcctacttactccgtttaactatgtaagacttctatataaatgtgggtgatggtagaaagtcttacattatgaaacggggggagtaatagttacgctttaaatacaattttcaatctgccaaagtccatgtattcgtgcgtgctttccattggttcagccgatgattgcgcggagaaaaggtcaaactgggtgaaatatacttaatcacactattatgataagctgtgctcattggcaagcactcatgggccctgtttggaagattagcccagggctaattttgagagctaatgtttagtcatgaattggtaggctaaacattagcctaacatgatatgtttggatccataggctaattcaagactaaaaggtggagagagagtagaaagagatgagagagaaggagagagagagagctgcttttttatggtccccacacaaaattagccctattagcactctttggaggggctaatgttttgaggggggctaattcacattagctcaaaattagtccacctgtttggatccttgagggctaatttgagactaaaagatgagagctgaacattagcctatggaaccaaacagggcctggtagcctggtacacatggcgatcgaggaaatttggtggttagtgccacgccttcgagtacccatagtcccgtatcatgatgtacgcaccgatttggcatgataatatagttaatgtgttcagcatttttgcctcctttaattccgccgtccaagtccataagaatggtttgcaacacgctttggtatgaccaagaagagatgtacactattccagcattaactcatactccttacgtactagtaaaggaagtcgtttaggacagcggcatggtctccaaaacacaactttgacttcttgtttctataaaaatatttattgaaaagtgatatatgtatacttttatgaaagtatttttcaagacaaatctatacatataatttttacatttttaaactcaacaacttgagagttatttatgatttatattcccaaggtttgacttaaacattgtcctaaataactttctttatgagtacggagggagtattccattatttctataaaaaaaacttctagccgcatcataactagaaattggatttttataggatggagggagtagtcacgtacttatatacagccgcacctgagcgttgacatcctgcatcctgtgctcaacatgaaactgatttgattttggagaaggaatgtcagatttgatctcgtgtgccacactggaaactggacaaaattttgtctactagctgaagttttcatttggacccgaaacatttttttgctcaggaaaggaaaatggaacaaagtagagtccacagtgtccactgcattggtatgtgggatgaacttgctgtgctttgcaaggtttagaagaatatataaacctactcacctgcgtacgtgttgatggcagaggcataaaacaaccatttctgtctggaatagttggcaaggatcattcctgagtccaaacgctccagcgttgaggtctgaccaagataagaagattatttattattcagataacctatcatatttctcgaggcttgtttcaggctaaacacaacgtcgtcagttgacaaggtctgatttctaaacagcaactgaagctgcttgcaggaccatcatctgcttcaatcccactcttccctcagtcctccaccacgccttccccttgttcatcatctgcttcctcatgcctctccttcatcatgtcctccttggcttcctcctcatcctcctctacctacggactccgacgagctctaccgccacggacaccgtgtctcccggccacgcactcgtcggcagcgacaggcttgtctccaacaacgggaagttcgcgctcggcttcttcaagccaggcaatgagtcctacaccaaccacaattcctaccttggcatatggttcaacaaggtccccaagctaaccccactgtggactgccaacggtaataacccggtggtggaccccacttcaccggagctcgcaatatccggtgatggaaacttggccatcttggatcatgccaccaagtcgatcatatggtccacccatgccaacatcactgccaaggacaccattgccatactgttgaacaacgggaatcttgtcctacgaagctcctcaaattcatccataatcttctggcagagcttcgactacccaacagatacacttttccccagtgcgaagattggctgggacaaggtcaccggcctgaaccgtcgtcttgtttctaggaagaactcgattgatcaagctcctggtatatactccttggagttagggcccaatggggatggtcatctgctatggaactcaaccatagcgtattggtccagcggacagtggaacggccgatattttggcctaacaccggagatgacaggcgctctcatgccgaatttcacatttttccacaatgaccaagaggcttacttcatatacacctgggataatgagacggcgatcatgcacgccggaatagatgtcttcggcagaggtttggtggccacatggttggaggaatcgcaggactggttgatctattacaggcagcctgaagttcattgtgatgtgtatgcaatctgtggaccattcacaatctgcgacgacaataaggatccgttctgcgactgtatgaagggcttctctgtaagatcaccaaaggactgggagcttgacaatcgaacaggagggtgcatcaggaatactccgttaagttgtggcagtagaacggacagaacaggcctcacagataaattctaccctgtgcaaagtattaggttgcctcacagtgccgaaaatgtgaaggttgctaccagtgcagatgaatgctcacaggcatgcttgagcaactgctcctgtactgcttattcctatgggaaaagtggctgctctgtttggcatgatgagttgtacaatgtaaagcaactatctgattcttcttctgatggaaacggggaagttcttacattcgccttgctgcgaaagagttgcaaagtttagaaaggaagaagagtggaaaaataactggcgttaccattggtgcaagcaccggtggcgctttgcttttgattatccttctattgatagtttggagaaggaaagggaaatggtttactctcacactggaaaagcctgaggttggcgttgggatcattgcatttagatatattgatttgcaacgggcaactaaaaacttttctaagaagttggggggaggcagttttggttctgtatttagagcaatgctccggtgctttctaccggtagtatatactaccagtagaactaatctgaaccgtttatttttaagggtagattagtaaagtactgaggtagatttgggataaatttggcacttaatttatttttgtcgtggatcgctcggatgtttctggaaaagcagtgctgccaccgcttcctcatccatcgcaatcgagcggaggtggagagagcgactccttccgccgccggcgcttgtgcatcacgttcccttccgccggtggcaatactctccggcgccccctcttgttcagttccccttctctgccggcgtctacccgcttccccgccgcaggagcttctggtgccaccctgaagacttccggcgtgcgcacaggggcagcggtgcagaggagccccgcgtggttccacctcctctcgcacgacaccgccggcggtggtggcagccgcgacgacggctacaggcgtgcgtggagccggctgttgaggaggctggtgcaggagagcatgagcttctgtagcctcagcatcagcaggcacggtaatgttaattttcgtggatgacttcaccagaatcaagaatctgattctgaatctgaatcaagaatttaatttggagatggacagtatgctctattgctataccagaatcaagaatctgaatttgctatgaaaagaagtagctcaacttctgtgagcctgatccattaaatttgtgctttgcttcctctttacccaagctaatgtaatgtgaataggcccatcttgttggaattctgcgtgaaacccattccagcaatccagtccacgaaggcttccccttgcgagtcgtcacggcggcgagcgggtggcggtggcgccatggatggccagcaggaggagcagcacgcagggcggcggcagctgaagcccgggaaagacaaaagtatccctccgcaaatatttttttttggacaaaaatatccctccacaattctactaccattaagtgtgatggtagtagaaatagatctgaaccctatgatcaaatgagatcaacggttcagattattttctactacaattagagggcaccggagtgggtatcctgtatttaagggctacctaagcaactctaccatagcagtgaaaaggcttgatggtgcccgtcaaggagagaagcagttcagggctgaagtgaattcaattggaatcatccaacgtattaacttagttaaattggtcgggttttgttgcgaaggtgataataggttacttgtgtatgaatacatgccaaacagctcccttgatgtgtgtttattcaaggctaatgatatagttttggattggactactagatatcaaatagctattggagttgccagaggccttgcctacttgcatactagttgtcgggattgcatcatacattgtgacatcaagccagagaatatacttctggatgcatcttatgtgcctaaaattgcagattttggaatggcaaagattttggggagagaatttagccgtgctatgactacaatgagaggaacttttggatatctggctcctgaatggattagtggaacagttgttacatctaaagtagatgtttacagctacgggatggtcttttttgagatcatatcgggaagaaggaactcaagtcatgaaaatttcagggatggtgattattcattcttttttcccatgcaagctgcacgcaagcttctcaatggagacgttggaagtcttgtggatgctagtttggaaggcggtgtgaacctcgttgaggttgaaagagcttgcaaaattgcatgctggtgtattcaagataacgaatttgatcgaccaacaatgggcgaggtggtacagtctcttgagggtctacttgaactcgacatgcctccattgccaagactactaaatgctatcacaggaggctcacatccagtgacaccacaatatttttattcactataaatctgtatgttgatttgcaatttccagttgtctatcagaacattataattcatcttgccttttaagaaaactaggcataacatgtaagatctctaggagatcatgtcttatattaaatataaactcagtattgtaacatgtaattaagatctatgtacccaagaaggatattatgctagccttacaatatggattatctcttaaaagatacttggtgtctgtgatatgtaagatctggtatcagtgtaccacatacacttgtaaatattaccaattaagatgtttttgagacacgggcaattcagatgagagtggatagttgagcctaacggtggaaatgtgtggcatcctgatagttatactcatattatgcacacatggcctaaatatacaaggcaaaattgttcactggcaaacaaaagggagaagcctggctgctagcctgcaacctgtttttaaggtaggcacattttacaactacaacataagaactttgtaagctggagtaactcataagtcataacactaactacctggattgcaaggaatttaagttatggcatgttgttcagtgggtaccgaatcactgaaggttgatgattgacgagcacgttctgtctctttcttcatatacagttgctgctgctgctgctactgctgccacagataatgtgattcataggctgttccatctgccagaggcaacctgtatcatgcatcagtttccatcaaaactgaactggttattgatctgagaaacataagtgccaagatgagtaaacaacagaacataatagaagaatagaactgtctctgctaaacaaaaggttaccttggtgaacaggtaaggcaagttgatagtaagaaccagttgagttggattagctccatgcttgatatggcattctgacttggaccattcaggacaatgtcatgtattattcagttaaacccttctctgactgtgtactgcccagccacagttccgtcttttcaccttcttattttacatgacaaggtgagacttgagagatacaccataatttatggatccaatagtcagtacaacagggggaaaggtaggagaacacaattaaggaataacaatcaaattgttaggcatgtttacagttagcaatggtttttcatcaactctgccaagtgcagcagcatattcatacaggccagtgaaaatcggaattattgctacaatctttttactttcaattagtaatgaaagatggaattgatatgacaccatttgtttactagtaagttaggaatgcgcctgttattagagggtattttgatcacatttgtccaaaacatgaaaaccttggtatgcataattttgtgagtacactggtgaaatgttacatcctaagctatcagaataccagcctctaggtgaactgctagatattgccagacctctagacctcattgtaggttatactgaacactgacctacctttggatatttagcaatagagacaattgcgcttttgaccctgttttaaaacctaactatcaatttgaccctacttttttagggtttgatagataaacactaggtagtttatatgcaacgtcgactataatcaatgaaataactaaatattcatcctttcctcttgtccaaagtgattctacagataaccagacagccccagtagtcatgtacataagtcgacctccctagggtaatgaaaaacagaaagactagggggaatgacataagttaagttgtggttacatcttgaagcatttcctgcgcacaaaaggcagacgccatcttatggcctacaagttgtacatctgagaatatatatatacattcatacaggctaaggtaaagaggtaatccagctcttagtaccaacctgccaactacaataagaaataatcaactcaagttgcaagaaagaaagagtagctagtaactacagctacttgtactaattgaactgctacataccaatgatgtatatgcccatttctagctggtccatgccatctatagtcgatggatgacatctaatcatctcgagcctccaatctacaagacgccaagatggagcttacatgttccgtgctgtgctcaaaagagagaagcacagcaccttgcaatgaggcattcatatctacaaggcctacagagaagaatggagattgttcaactcagatgtttttgtgcagaaattctcatcaggttgctgaagaaaacaacaaaaacaaattttcaataatttcccaagctttacatgtgaagtgatagaagggcacccacacatatcctatgatcatttacctggttgtgtgggctgctacttgacacctgagaagtgtgataggttgcaaaacctagatgctgaaaaagtgtcaatcacgttagtactatttccaatactcaaaggctagaatgggttcaatcaaaagttcttaataccgtcgtgaaagtcggatctaagccagagggcatttcatcatagctaattgggcccatcggacttgaaagatcaatcccctagattaaaaaggaaataaacaactatctcaatcccctggattaataggaaataaacaacttccaatacaacaccactaaaagaacatcatatgtagggaagcaatttgtatgtaacttcataccctgtaggttttataggtcggagtttgggtacccagtggggacatgttaggaggaccctcgaaagcctgcatgttgaaaaatgccatgactatttgttgcactaagtaaaaaaatgcagcacagcataatgcaaaattgttagtaagttagattatcgacaccaatgcatggaacattgcagcttaacatgaagtgatgaagacaacaactttatatcagataaaatagtacctcagcacaactgtacaacaagcgaacttaaaaaatgcaaaacataaacttttcccaacaaagttctctgccaaaaaatgtgggatatgggtagaatcccagacaacagacgaatccatagtttgaaatgaaaaacatattcagacttacaatttgactaaacaaaaaattggcgaaaaatacctgaaacatgtttccagattgagaaccacctaacaaagcatactctgaaggttgttctgagtgaaccttctgcttctttcgtaaacctttttcaatgcaatttcttgattggatcttatttttctgccccttcttctttgactcttttgctgttgtgccacttgatttgtccatgatattttctgcttgagtgccgtttgtaatagaaggtaaggaaaccttaaggttctgaacatcagtctgggtcagagttgcatcgacacaagtttgtttctgtaggatttcttcaactttgttgctaagatctacccaacattggtccagtactctgtaggattcctcacattctgatgctcgagcaacaagcctaacatactttgggcacatgtattgatagcgactggaggattctgataatttatctgcttgaattgcttgaccttgaacatctccagacatcaaagtcctagcatattttgtccagcgcttcataatatatctgtctggtagatattttatatccattgcatctaaaattttcagcgcgtggctacacaagaaaccatttctttcaaacttcttacatgagcatgaaacagtctgctcagtagggtttccataaactgtatatcgcttctctttctcaacaactgaaacgacatactcacgacaagggccactttcatcacggtttacaatgtaagctgactggaattcttcgtattcttcttgaaaaagcggaaagatcgtattggtataagcctcaaaagcttgtgtcaggataggagctttaattttaaagtacagcaactttagccttgaactatactcaacctccaattctttccgccgcctatcattaataactgtctcaagatgcctcaacaataaaagaatatttacctcaggtctcaaatgatcccgcacatcagactggaagcggtcgttcaatcgtgtgcctttcattccagctgaaaagacccctctcatataaggtctagcccatttttctttttcttcaaatacctttttcaaccatacattatcatgaaggttatgcttattgatcatagcatcccaagaagtgagaaattccgtctcctcttcatacaaattgatgcatgccttgaactccttcatgaaatcactgtcacttttaagctgatttatgttcctcgttgcagcatgctttaggtgccatgcacatataacatgggttgtgtctggcatcactatagagacagcctttgctacaaccgcatcttgatgtgaaaagaaagttttgggtgctcgtccagacattgcatgcaagaaagtctcaaacagccactggaaagactctgcagtctcgtcatacatgagcgctaacccaaaaacaataggctcaccaaaattgttacaaccgacaaaagaggcaaaatgacggaggcttatactgttcctagacaccacatcaaatgcaataacatcaccgaactgactgtagtcagtaatcatccttggatcggcccagaaaacatttgccaccttatcctcgacatccaactgcacggaatggtagaacgaggggttagccagagactggtcttgaaaataatttaacaaagcaccagcttctccatacttcatctcccattgcctcctggttcgcagcggctgccggcgcccttcccctgcactcgcggtactattctcttcggtagaattctgccctcccacctcacccccgtccatcagaagatcaggcggcgtaacggcatcgggcaatgtcgtccagtgcacgacattgggctgcagaggattgggcatgcaggatgtagcgaagagcgggtggttgtgccgcggctggaaggcgtaaacctccagcttggcgccgggcttcttgcggcggatgacgaggtgcgcgttgcagccggtcctcgagtccggcatcggcaccatgtggttgccccgcttgacgttggccctgtagccctcgcgggagcaggcgaacttccgggaggtgatctcgccggtcttcttgctcttgttggcgtactccttccggacgttgaaccctactttccagccgtagtagcggtagaactcgtacgcctcgtgctcgctctcgaactccatccccatccgcggcgtgtactcctccgggcgtgtaggagcggcccggaatccgcccctccccaccgcggcaacggtggcggtggcggcggcggctcccgtcaagggatttcgggatgccgcgtgggtcgtcgtggcatcagttgccctcaagggaattcgggaggccactgcggcggcggcggcggcgggccttcgggacaccgaggtggcggtagtggtggtggtggccctcgtggcggtccgggacgccgcggtggtcgccgggatgttccgggcggcgacgggggcagtggtcccggggggcttccgaggtagcacaccggtggtggcggcggctacccccgaggccttccgggtcgccgccgcgggggcggcggcggatgtagacccggattcctttcgggatggcacgggggctgcggcggcggcggtagccggcgatccggatggcggcgcggcggaggcattccgggcaggcgcgggtgtgattggggggttaggttttggtggggcggcggcctcattgcctgaggcggcggggtgtggaggcggggaagcgggcgctggcgctggagctggagtaggggggtgctccggtggagggggctctgccggcgagctcatcgccggcgggcgcggcgacgggggaggggttggagccggtgctcgccgccgtagctctgtaacgctttcgtgcaaacaagacagctttcgggagaggaggggaagtgcactgccaaccaggagatgacgctttcgaagaaagaaggcgctaaaatcatctgctgtttccacgagaaaaaaaatcgtctaaaaaaatgcaccaaggaaagctgatagcctgatactgcctcgaatcaaattcattgacctgaaatattttttactggagggagtactggatgggtcgaattaatttatgaacccagttttgttttctcactgattaaactcattttctgtaattccatatttttcaggttagtttatacattaaaaaaacggcatattagttgttattccactactgctcaaaaataaaatgcaagttcccaaactacataggaagtacatgaatactcacaaactacagaggaagcatatgaatgcagagtactccttccgttttgaaatgtttgacgaacaaactaaacatcataagaaaaacaaactaaaacaacatcataaaaaagaacaaagggagtagtagtatttttccagctgagagaataaaaaaaggaacgaaacaacgagaagaaattaccgtaataacatgacggtgatgtttccctcaaaaactggcatttgattatagttaattcacttgattcacatgacttcgggtttcaacccaaaagaggaaattaaaaaaaaaaaaactacagcgaacttcagtcaccaactctctatcagatttaaaatagaaccacaaggtgtgtgtgtacaaaaaagaatgtatcttgaactgaaaacatattcataaaatggagtatacagctaatgtcattataggaaaaagaatgttcgggtccctgataaaattacatcaaaggatcattcacgcaaccaagaaaaatcatatattcatcagctggaacagtgataacaccaggagtccaggagcagctgtcactttcgcggcttccttccctcatggccttgaagctcaagcagcctgctctgcaatagccactttaaaatcagactagcacgcggcatggcatcagacaatactaggcatatctccaacccagctacaaactgcccgtggccatcgggttctaatgcagtccaccaacggtgcatgctgagaagtttgaacaggtggagcaagtgaaagaacactgtcatccttgctcccgctggtggacgcgcttacaacatcagctagatactcatcttgagtccaccttggcgggacactgacatttaacttgcacagtctgggtctctgtattgttgaacctccaatgttagcattcccattaagcacggacttcgcgattccattgaaatggtagatagtgaattgcttcttgcccataaggcctgtaggatccttcatgcctccagcccttttatccaattgtagcagcgcctgccagaattcactccatactataatgccagcattacagaggtcctcaagcttatcagaaggaaaatttatgtcagtgtccctcagaacttgttggaacccctcaacgctaataaagcctccacctccactttgatcttgtgcatcaaatgccctccttattttagattcccgctcttccagctcattctcttcttgaacattgggatttagggcaaaaaggacggagtagtgactttcacttcctaccacccatattggccatttcgggcactttaagtattgaccaaccttgcagaagtttagtgattccagaagggtaaggaaaccaacttcaacatcatttggtatcccattcaggaacatgccaccaccaaagtccaccttgccatcaaatacatttgacacagcctctccacatagcaataaattcacaacttcctgcaaaaatcacactagtcacatttgggtcgaaaacgttggctcaatataactgttaccaaagtgacttcactacattgcaagagtatgtggcagtgtgaactgacacggtattatctactctgctaaataaatatctgcatgtcaatgccatctatacctgtgaagcatgcccaaatggggcagtgaccaatggtaggcttggatcatccctatccgcttgaatacgttcctgtgtacaaagacgtataaattgcaagaaaatgaagataatatcgagatgctttgagatgaccatcaatgagtggaagaagtgacgattaataaaacaaatggaagaaacaaattgatggcaatcatagaaaaaaaatactgttttcttatgagaagtaggaagcataactaaattaccttcatagataacaaggcagaactaaactagccgtccataagatcctaactgaattaacccaaaagctaacctatgtaacactcattatcattaccacattctagaccaatcaactaatctatatttccctgtcattatattactatgttgataattttaactgtagtatgattttgtaatatcaaagcatgcaaaagtcattggtggttatgccagggcatgtacatgaaatttctgacagatttaaatagtgttgtgttcacttattgaacatggattaacagaatgcataaaaagttgagaactaaaggataaacaaaggcataccaatcctcgagagagaagagcagatataaggaatagcatggctcctaatcgactttcaaacaaagaaatgtttgctataagactgttgaatgcatccttccttgaggtaaatgtacttattctaagaactttctgcagatccatagctgagtcaacagaaaggccttccaagactgcagcagttttctgcaataagtttcataagagtatcactggcatgtcgaagatgaaggtataaaaaactcgagtcacctgatcttcaacacgtccacttaccgcttcattgacacttccaatggttgctacaactgctctgttccccgttccgcataaaaatagaatttccagcatggcatgaaccagtgctctaacaaatgacaggaatttgatagcagtcattttaatgtaaagaatattaaggaagcactactctgtatatattctgcaccatgaatatatttcgtgacacatttagaatatcgattgtacattataaatgaaatagtatataacaaaaggaaaagaggaaaatgatagttctaaaagcattttacgattccaataataatatataaaacactgatgttgttccaataaatatttaaatattcatttgtaaaagagttctgttggtaaaacaagggcctatgttttcttggctaaaatttaaattgtcaatccctaatatgaacttgagtggacaaataatcaaaagataatgctgacaccagtattatctaaaaggagcaaaagaaaccacctcatctttctgtcatcagtcagagaagaaaaatcatccctcgcagcaaaagagctctgataaaagcgcctttgtcccagggcataaaacggatcactaacctccggattacccaattcatcagagaaaaacaaaagatatttaagaacataggcctgcattaagaaacacaccatcagaaatgttgagctttcagaaaacagaaataaataatgaagaaatagtttgatcttgtgtctgtctatcagatagcgatacactagtgtcacaaatcaggaaaaaagaattaaaatcaggtcaaggtgaccacacaaaataaacatctaaaaaagctacttacctttaaatagcatttttctattaaatctaatgaaacagcagagaagtccagcctatctcctactaacatatatctgtttgtacattgaatcatcaaagatactttgaatttctttcattggtatctagtgttctagacaggttgcttaggtccagtttgagttgtgaggatcatgtacaggcagtccaaccaaaaaggtccactaaacgtagcttgtgttgacagaacaggtgtattaaaatttagttgcagcaattagaagggtttctcaaatgcatttagtagcttatgtgctacaaataaactgataaaacatgtcacagcatgagaaagaagtaacaataaatatgaagtcagtatggaaatctgagttcagaagaagactggaactaaagattaacatttctgtccaaaagggacaattaattaatcacattatttaggtaaagcaagggagcggtacctgtactgtagctaggacaccacaagggccaccttcatgctgtaccagtcccatggttgtttcaggatcagagctaaatctgttcatttaacaataattaaacaaaagcagattaattgcatagcattgaattgtgcaacaaaaggcatgatatgattaacactgtaccatatccaagcaactgtttgcatctaaattaaaatgtgctgtagtagttctcatctaacgtgcaaagtcaattgctgtacagctctaaccagtcagggactagaatgacagattaaattaactaagagctgcttctcgtgttccttatgtggattatgtagggctgaaaatatcacacttcatcccatcagtagttagcaccattctaaacaggtggacacagacagcattctaccaaaggcacagggattcgttgtgtaattgtgctacaaaaaaaacttctacacataaaaaaaatgcatacagatatgttcaataccacaacagtcctactttcagatgcctcaaatcaacccattaacaacgcatatatggatgatagtaaaatttgtaacacctatcagctcttgttttcacaaatactacggaacaagagctatcctttaaagcctgaacttagtattacatgtacattgtccgtaactgcaaagaaaacacatggtctcatttaacatccaattctgatattggtatgaaccagatcaacaacttcaaatcatcagctgaaagcacaaacaaaaacaccaacagcctatgtatggcagcaatagttgactacaaagaaaaaataagaatgaattttcagcctttacagtttacaaacattgagaaccccgcaaaaggaaaaaagtttacaccagctactatgaccattcttcaaacccgatttatggtgtgttttaaccattcatatcaattaagcaggtgagaaaacgacacaagaaaacagctgtattaccctttataactgcctcggaaaagcaaggaggggtcaacttgtgtagtttagtaataaatattatggagaaagaataataggggtaatgatgcatcgtaagggtagacatccatcagagggaggctggatggagacaacttgacgtgaactgcagtaggtgaaggaggaatagatctagaatatgtcataggagagaccacgtcggaagtataggggttgggatttgtctatagatttttggttgctacgtagaaatacaatccccatccttatatacatgggataacttgaccttcaagaagctgatctggtctaatctctaacaataaaggaaataaataactcgatctaatctcatcagtaaaatgctgctactgccacgcatggtcagtattcatgaataataatttcggccagtgaaaaaagaactcattaagcttttaccaagccatctattttgtgaccaaaatagaaaaattgagtgcttttatatttcccgcgcatggaatatttattaactgcccgccatagacgatactcttgagtgaagctaagcctagttgccaatctgacaaaccacaagcaccacaaatagctcttatttcctaccctacaatctcagtctgaacctctaacataaatataaccttgaatcaacagcgtctaacacacacataaacaactgttcatgcaaactaaaacctagagttgcaccagatcctgaaggattcagggtaacatcctaatggtcatttccagacgtccatccttatactcatcatcagaaatagaaagcatccaagtaatatacactcctgtggtcgattgacaacaccactgaaacagaaatatgttgatatgtatacaatcttacgaccagataacaaaatgctaagcatctcgcaggctgatagtcgtttcagctggccgcagctgcagctgcagctatagtaaccagcagtagagctgtgctgtgactgtgcaaccgcaacctcggatcagctgctcactataaaagccacatcttgcatacatctacacgcatattagtacagagtatccccaacaccccttcttcaaataatgaaggaagaggtactcttggaccctgagaactgcaagcttagtagaccttattcgggttttttttttccttacgttcctaaagcactaggatttgatcattttgttacatctctcaactttgaatttctataaccggaccctttcttcccctaatatatcgaaaagataacagatctcctgtaatagccgttcaaacaaaatgaaagaaagagacagtagagaacgcaaggaagaagagctcacctgatgccctgattgctccactgcgccaacacctccttctcaagcttgttgccgaacaccattagccacagcttctcggccacgtccgtaggcaaccgctcccctttctcctcctccacctcctccgccttcgcctcctccatagatacccccgatggccccgggtccgccttcacctccacctccacctccctggcgaccacctccggggccggcggccgcggagccgccgcggcgggggagggggcgaccgcgcggagccgcttctcggcggcggccgccctgagctcgcgctgcttgcggcgcgcctccgcctccgcgtccgccgccgccaccccctcctcggcgggcggcgggggcggcttgctccgcttcggctcgggctgctgcgccggcggcgagccctggaggctcatgcggagcgccatctgcagctcctcctcctcctcctccccccgatcccccatccaggatcgatccggggggggctcctcccaaaccctagcacgcgcgcggggggtttggcttggcgctctctctgtcagaggcgaagaagattaccgcagccgacgcgaggtggagaaggtctcgggattcgggcctgtcgcatcgggatccgggaggtggcggcgtatttgtaggggcggcgtcgcggcggcgcggggtctctggggtgtcagagatgcgttcggctgcggcgcggctgctgctgcagtgctgctgcctgctggtgatgggggggattgatctgccgcgcgtggacgccggcggtaggatgccgtcatagtagtcgatgacttgtggggacgggtttgagtctggcccacttgtcattgactgggggtggtaggccgtggggtggccggttggacgttccggacgttttcttttcttgctttggggggttttggacaatctggatccgtcttcaggtctgatttgcgcacgatgccgttggatgcgaatacgatgttcgtgttgcgacaggtcgcattctgattcggtttaggactgctccttcagtcgaggaagactgaagatcaacttttaagttttaactatattaatctaaacatagtctagtccagattcttttgaagagaggatagattttaagaacaacacacaccaacattaaaactaatttggaacaaagaaatttataggattttgtaagtgcagttctattcaggaggtgtttggaaactagggactaaactttagtccctctcacaaaaacattgtcccataatacgaggcgtgtcttcatatagtgattacgtgattattcacttcatcggcattcatacacgtgcgccctaacatttcgtatgtgcgtgtgacacttcattaaccccttccatacacatgtatgcaagcccctaacgtgggtgcatggaattatttagaacgacgtaccgtctccatgcataatacgcgcatcaatcaccgcaattaatcttatgcatgcatcgtgcatttatttacgggaatatcatccagaaacttccttccatatcatctccctaataaattttttacatgcctataaattaggacgggtaatattattttcctacttaatgacgttaaattctaagtaagtgagtgatattaaaggataccatagatgaatcaaaagacaagatggatgagtgatccccgagcgtgaggagcactatcgaacaagaatgtgagaacatacacctattatgaatctagttaatctctttagttgatatgtaggttttttacgataaaagtgtgtcttacaacgatcttaatggtatcctcatgttttggcaaacaaaagtaaacaggaaatcaagaccaaagtgaatgttttggaaataatgaagatccaactatgcaaggttaggtcaagatccaatagtgtttgattgtaccattgaatttaaggaagtccaaactgtgtcctatctgcacaaggcattatgttatattgattcataatcgtcatagtttttttttctatgttagaaatcgtcgcctattaaagtatatcgcaataacttagtagagacataagagatctaacaaccattctctctcatttattgtgtactgcaccattttgcaagaaccatctcttcaaagcagcaagataatttatattgtcaactaagacggaattgaattaagcaatacaagtaaccaatcaggtctaaagtaaatactccatccattccaatataagtgcattatagtacaagatgtaacatatcatagtattacgaatctagatagacgacgtcctagtacaaatgtattctagtccaggatgtgacatatcctagtattatgaatctggatatataggcatagatccatagtactaggatatgtcacacattgtaccagaatgcactcatattgggacatagagagtaaaactcacttgtctctatgataattgataagccattactcaagacatataaagctatcacctttgcacattgtactactgcataatagctacattcatgttcaatatacaaaacaatacaaaggctatatattactaccccatcccatttaagtgcagctaaacatacaaaacaacacaaatgctatatattactacccccattccatttaagtgcagctgtggatttctgtgtccaacgtttgaccgtgcatcttatttgaaaaatttatgaaaaaaaattaaaaatgctagtcacacataaaatactattcatgttttatcatctaataacaacaaaaataataatcataaaactttttcaaataagacagacggttatacactggacacaaacagtgtgaaactgcagtctttctgggatagaggtagtagtagctaatgttgagctttgttaacctagatgggaagactatcttgcgcaaggcgccaaacaaaagctctaattattttggatacacccgcatttcagatcgtagaccaacaaatgctttaccaatttaatcatacgatgtttatcctaattttaatttttctcagagcaacacacatcatttttttctatccaatattaatgatcaaaattagcaaaagtggataccaattttatcagataaggttatccaccatcttcattgaatactccttatctggccactccattcacccttatccatcaatcaaacatacttaaaatttgaaaacccttcttcaatggctaagggatatccctctaaatcacacacatgaatccccatcatttggcttatccattttattttgtaaacaaaaataatttatgaataaaacttttatatacgtgttcttaacgatataaaagtaaaggttgaaaaataaacttcggtgaaaaaaccccctaaaatcaactactccctccgtcccaaaatataaatatttttagcatagtgtcaaagtcaaatattagtaaccttgactattaatagtaaaaatataaaaaagattaatcatgtaaaattgatgttactagatttatcattaaggcaatgtttggctaataggatagagaaataattttccacccaccaaaagacatatttaaatcctaaccatccattccccctctcccatttaatcctaacccttcattcatttcccaatcccgattccactcctcattttccattatccaaacacaccctaaacaaactatcagaatatgcaactctttttatttaaaacatcttacttttataaacatcgttggtcaaagtagcatatctaccgtgcccacctgagctcgcttcgccgccattggcagcctcccgagctcgctcctcctccgcctccaccgctggccactcgagctcgctttgccgccgccacccacccctgctaggtccgcctccgccgccggccaccgctaggtccgcctccgccgccggccacctgagcgagagatacttccgcctccggtcacctgagcgcgcgcgcgagagagagagagagagcgcgaagggggacttggagggatttggttgaggaatatgtatgacatgtggtcccagggaattttttttattttctttgctgactagattgccatgttggcaccatatgtataagctcaagtctaaactgctaagaacagtgtttagggaggttatttgtccggtataaatacttgagggtataaaatatttggttttatgatttagggggataattcgatcggcggccgtgatagttgagaagtaaatcatacttttttttttctttctgaacgaaaagacgagtctggtaagcaaaccaccagccacacgcggaccggtacgcaaaggtctccgatgctcggtcagcaaaactgctgatccgtaaaatcaccaatgttcacatgcgcgttttcgcccgttgcccctgccgaaccgaactcgcgctagagtacgccacggctgccggtaaaacaggccaagaaacgaaacgaaatctaaacaggccagacaaccacgcagccgcacacgagagaccgagagacagagagcgcgagcacggaatgctccgcagatccaaccgccgttcggtcccccgttccgtgcagctgcacctgcatatagaaaagtagaaaacccaaaactccgtagcgaaatctctcctcctccacctcctcgcctctctctccctctctctcccctctcatcactctctccccacccccctcgtcgcctcgtcccagatccggacatggcgagcgacagcgacgtcgacgaggacgagctcctccagatggcgctgcaggagcaggcggcgcgtgacctcagccaccagcgccccgcgggggccgggaagcccgtcgtcaacctcgtccgcccccctgccaactcctcccgcggcggcggcggaggaggacgcggcggagggggccccgccaaggcgaggcagcccagccgcggaggcggcgacgacgacgacgacgactccgaggtcgagatgctgtccatttcctccggggatgaggatggcgccccctcctcccgtgaccgtggccccccgcccccccgcggcggcggccgcgccggggcacggcgggccgcgtcgagggatgatggggatttcgacgacgacgagcccaggagctggaagcgcgtcgacgaggccgaggtatgtggggggagatcggcgagatctcgatctcggccgctcgtcttccgtgctagttttttgggggtcgcgtgctttgatgatccgaaaattttggttggtctcgcgggtttgttaaggcagcgagccgagtagcttgttatgaacatgtcagaatcgtggttgagtgcatttagctagtagtgtaggttatgaaatttatgctggtttgatcagtttgtttctgttccttctggggatcgcacaaattagctgtggtgctgcagagtggagctgcttgttgggtcgcctggggggggggggatttgggttaattcctaagacttgcctattggtgtgaactctgggtactggtgtgtttcaatcattcatgttgtgtagtactatgatatatggaggtataagggattaattaatggacttatagacaacatttttacaagtttgctggtctgacacacaatgcttggtcatcacatcaattgcatttgtgcagcgtgcattactgttggcacactctttcggtatagttcattttgatttccttctagctgcacattcatgttattcaaacctcctctctcagcttgtttgaaattgaatgccatgcttttcattttctctgttgttgcatttgttcatgtatcatttcatatctgcattctccatattagatgttaaatgcaccaaatacaaacatctgttttaacatgttatcttgtactgaatatgcctaatgtcagtctgcctttgctccacccagcttgctcgcagggttcgggaaatgcgtgaagggggggcagctcctacagttgatcagaaagcagctgctgcagcaactcggaaggcacttaccaatgtacagactttacctagaggagtagaagttctggaccctttgggccttgggtaactatctggatcacaaaactcatggtcaatacatgacacgcatcatcttcttttatatattttttccacattaatgtaccacttgaccacttgataaacattttataaaatgcaatcacctcatacattgatagtatgttagatagcaaacacattcactggttctaaaatttttgaaagtgagctgtacgtaaccttactgaaacatcaaactttgtattatcaatatattttggcagcaacaagtattaacctcatatatattaataatgtcctgctctgcattacctagtacatgtgtggtatgctctttatcatggagaattaaaattaccaatccaatgtcctctctatattcgtgttttaatagcatttattttcttaccagagtcattgataataagtctctgcgattaattactgatgcttcagtaagttctcctgtttcaagggagaaggctcagggtttagaccccagtatgcgaggtatgccttttggtcatacatattatttcattctgttatctgttcttccataacaagggtatgtttttatttgcagagaaagttatatattcttctccgaattttgaccccaaggtttttctttcgtgggttcacaaagatacaagtgctgctgacttagagtctggtgcgcttaccttgaaaactgatctcaaagggagaacacagcagaaaaaacaattagtcaaggagaactttgattgttttgtttcgtgcaaaaccacgatagatggtatctgttccttttttttcttcttctgctctgttgtagataattctcatgatcttaatttttgcacctgtttttaataccgcgagtttttctgcagatattgagtcaaagctgagacagatagaggaagatcccgaaggtgcaggaactgctcacttgtactcagtcacccagaaaattagtggtgtagcaaaccgtgcatttgagcctctatttgagaggcaggtataccaactaagttttctctagaacttcatttcactaatcatggtcattattactgcaattcttgagtgcggtaacgtaaaccgttgtgcaggcccaagctgagaagatcagatctgttcaaggaatgcttcagagattccggacattatttaacctgccaagtgcaattcgtgggaacattagaaaaggagaatatgacctagctgtcagggagtaccagaaagctaaatctattgttcttccttctcatgtacgtcaacttgatttattttatctgcgtctgttatttgaagatattagaagtggtgggaatgatggggatgggtgccaactgatcatagcgcactatctggggtaccgacacccgtaaagtgaaaaacaatgtgatttagtgggaaccacaatacccatcaggattcttacattatcaccgtcttacactacttctagtttagtaacacaagagaaacatgtacccgttctttttatttgatggctttgacctttcacggtccaagatgtaactttgaccattagctatatattgatatagtattatgagagtacctctcgggtacatacctagtgttacagtttcgtatagccaatctcgagttctcatgtattgatgttcaaagtaacatgggttctaggatgtcaaataagaaagaaagggtattgtctgacctacaggtagcatgggtttatcaaagttttaatgcggttgcattaacatttctgttgcccctgtttttctttttggctattttgtgggacatcccttaaccatttggagatcatgagaaaagcatgaaatagttttatgttggattaaaaatgcgatgaaatagatttgtggattatattctctttcttcctttcatgatggctcatatgcctgatacatgctatatgattttctttgttttccaagatcaattatcgtatgcttctttgttctttccttgcacaaaaattttgcatattgtttcctgttcatgccaatttcttgcacatgtatttggtaattaatataacatcataataactaataacattacatgattgattcacacaaagatctaagaaatccatagtttagatggctcatgcatgtccattacttgattttattatctctctattgtatgacttacaaaatcttgagtattttgatgctggagtaatagggactaaaaatttaactattgtcttgtgacatcccttctattttaggcacaatacgccacaacaaattgttgcttaagcacatccagtatttttactatattctttttatgatgaataactgacacaggtggggatactaaaacgtgtacttgaggaagtggaaaaggtaatgcaggaattcagaggcatgctttacaagtcaatggaggatcctcatcttgacctcgctgaggttagttgactttccaatattcaatgtagaatacttgaagttccttactagtgttgatagtcaaatactcaaatatcactcaactcgctaattttgattatagaaattttggtagttacatgaggaagttacttgatacctacacgtaggatgctgctggctgtaaactgaactactgatcgctagttgtttatatttatgctatttagatacaatatgattcagttctatctgcctcctgattttcttgccaactgccagcttgagaacattgttcggctactgttggagttggaacctgagaccgatccagtgtggcattatcttaacattcaggttaacgctcttgaccaaaattatctgtgctttatgtcatggccatacttgcttgtaccactacttatatgttctatcttcatatcttctcagaatagcaggatccatggattgtttgaaaaatgcaccttagatcatgaagcacgaatggaggttctacagaataaaattcgtgagaaaatactatctgatgcaaaatggaggcaattgcaacaagattcaaataaatcagtgagtagtttgggttcagcatagcactcatttgatcatctactatgatgctacaaatttacatggtatttgcaccttgtcttagttaacatggcacatgttccttatgtttgcatagttggaagttgattctgctaccggtgactcttttcaagatgatcaactgtcaacaaatattatggctgatgaagctgatagcttaagggcagcctacattcgtaggttaactgctgtacttatccagcatgttcctgcattctggagattagctttatctgtcttcagtggaaaatttgcaaaggtatgaatgggtttagctttaacatttgtcagatatagttaagatcttgctccaaaacatatgaatacatatgaaccttttcatcccacctcttctcatagattgcaatgcgtatgaaataagcgccttttatatatttttttttcatatagtgtattctgaaatactgtgcctgcttcatgtcacctcatgaaaaatgagaaccaccatctttttatgatttatgagaaagacttacatgaatttgttacccgtatctattgtttacaggcagctgcggggaatgtactttctgattctgatatgaatacaaaacagagtgtaaataagactgatgataaaggtggagaagcaaagtacacaaaccatactcttgatgaagttgctagtatggttcgtgctactgtatctgcttttgacaccaaggtagagttactgcatgttttgcaattctaacatttaatcagaacccttagtggtttgattgtatttgttacaattaagcatgtttttatatcaacaggttcagaatactttccgtgattttgaggaatgtaacattcttcgtccgttcatgggtgatactataaaagaaatagctaaggcttgccttactcttgaagggaaggattcatctccaactgctggtatattttattgcccttttttagaactgtagatacacttaacttcttttgtatactgaatgtggttaacaataattccagtgaaaatgttgcgggcccttcattatgaaataacgaagctttacattctacgactttgttcatggatgcgggcaacaactaaggagatatcgaaatatgagacctggtttactttaaccacccttgagaggaacaaatctctatatgcaatttcaagcatgcccttggagttccgtgatatcatagtttcggcaatggaccgcattgatttgtaagcatattttttgttcaatattgcactttctctgatgatatcttatgcatgctgtaggtataattgtttgtgctattaatgggtagtttatgatttcaatactgtctgtggaatctaataatggggaattggggatatttagtacagtaatattttgccattgtgttagtcgaaaatagattagatacatgcttttgaaaagccatggcaatgacaaacagacctaagcataagatttgtcctaaagtaattgttaggtgtgcttcacataatgaatacttctagtttgttagttcatatcatatcatggctatgaaatcagttcttcgttgtgatttataatggtttgcttacaatcctattcactgtaagagaactgaatgttgttttcaacttgttaataaaagaatgataataaatatcaaattgtatattgaaataactgcatttgaagtgtgcatttttacattcaagatcaatctaagtcttgagnnnnnnnnnnnnnnnnnnnnnnnnnnnnatcgtgccttcattttttatggtttcgaactgcctcctgatctatgcttttctattgcagtatggttcttaatctgaggagtgagactgccaagtccacgatatttctcaacacctccatgaaattcatgaatctgtcagacttgcatttctaaattcttttctggattttgctggtatggattttctttgtaacgtaactactgaaggtcttacaaattttgtatctaattgttgcatcatccattattgacaagctgtgttagtgcatcaggttatctggagaggtttggaggggaactagctcagaacagatcaaataaagaaaacaaccatacccaaaatggatatgtaaatggtactaacagtgaaacatctgctggcatggatggggacttgtacaagaagctgttggttgttctgagtaacattggatattgtaaagctgaactttcagatgaactgtataccaaatacaggcacatttggtccccagtcaggtacccgatcatcttagcttatgttccactaacattgtcttactgtcctttataatttttggtgcgagtcgttatccctgaatagattgattgaaagcttgttatttcatctaaaagcaatgctttgatacatttgcttcactcagttagtgttcctctctcagggataatgatgagcgtagtgctgacatgcgagatctgatgacttctttctcagcacttgaggagaaagtcctggaacagtatacatttgcaaaggtatggtagaaaatccagaattgttgattaatcattattggccaaaagatttagttataaccatgttagctttaatcctttcgtgtcttggtgtgcaaagttacaagtttgaaacacctgatttagcccactatttgttcttcagtagtggtatgcccaaaaaggccttaatggaagtaatgatcacttctttttctgaagttgttctatgggaatatctgcgtagacatgcacatgcctctatgcgtctactggttgatctgatgtgaatcaaatgaagcatttaacttattgcatgtttattcaagatccgttgcaatatgtagtcctaaataactaatagctagatcaaaatgtgcatagttctattttctgtgactgaagcattttattattgataccctagttaatgtgctagttttggatttattactacctccatattttaatgtatgacggcgttgactttttgaccaacgtttgaccattcatcttattcaaaaaatttatgtaattatcatttattttattatgacttcattcgtcatcaaatgttctttaagcatgacataaatattttcatatttgcacaaaatttttgaataaaacgaatggtcaaacggtggttgaaaagtcaacggcatcatacattaaaatacggagggagtactagttattactctggaatatgtcagatgtttgtccacttcatagattattatattgtttgatgactaggataactttaattcaaaattgtttggaatgcctacagtggaagttcatatatcatgcttgatagtagcatgatttttggggctataaattcggagtctatgcacattttgctatcttcctttgctttgccctaatttttgttttgtagtcgaacttgatcagaaatgctgcacgaaactatctgttggattatgggattcactggggagcagcaccagcagtaaaggtatgtagcataattaagataatcgtactgatgttaacgcttccaaatgtgtaccactaaaaaaaaactggaaacaaccaatagtatactactgatggatagtctgtaactttgtatatgcagttcagttgcatgtactatattatttgctgcaagaaaattatcataatattttgtgcctgcattgctatgtgctggccatggctagtagttgtgtgcgcatattaatggtagcctcatataacagttgtacgactgcctttgttatcttacatgaaattaacatcttgataatgctcttgtggcatttacattctattacaaattattcttctcgcagggcattcgagatgcagctcttgatttactgcacatccttgtagctgtacacgcagaggtttccatttctacatttcccctgattattaaaattgtgcatctctccttcgcactggatgtacatcaattactgataaatcataaatttacttcaattgctctttacatactttcttctttgatggaatactgtatctgtggtttcaggtctactccggtgctaggcctctgctggaaaaggcgatgacaattttggtagagggtttgattgatatcttcctcagtattttccatgagaataagaccaaagaactcagaatgttggacgcaaatggtttttgtcagctcatgcttgaggtactaattttgtttcttttagcttcaactgcattagcctcttcagagtcttaagttgtgtaaacgattcaattatgaacttaaagaactgttctgtttgttttacgggtgcagcttgagtattttgagactatattacggacatacttatcaactgaggcagagcaggctttgagatccttacaagagaatttattggagaaggcctgcgaaagtgtgactgaagccttggagaatcctggacaccaccgtcgaccaactcgtggcagtgaggatgctgcatcagatgatagacaatcagtatcacctgatgatctgcttgtaagttctaaaagatgtagaacatatggattaattcttgcatcagtgacaactgaataacacttccagtaggttctgttgcattaaatctgccaaatatacatcccgtttgcgttaggcatctatattctcattgccctggattttgaattttggaaaacactaagtcaggacttctggtgctttcatcatctaattatgggaagctctctttagtgaaagtttcatcctgttctgattttgcaagggagcatggctaaccaggaactatttattttttatttttcccaggcacttgctcagcaatgcagtagcgatttgcttcaaggggagctggagaaaacccggttaaatattgcgtgctttatggagtcaactcttcaatcaacgcctgcaccggctggatcaaaacctgctgcttatcagtcatacaaggcacctgcgacacaccaaccagttcaagtgtcctccccaagttttagaaggcagcagacaagtacaaattcacctgcagcctcgaggcggcgtcgatgaagaaaatgcatcatgttgagagaaccattccttcatctacgtgcctcttccctaaattctcctctttctttgttcatctttcccatgctttcgtttgttacctgtaattagtatcatgttgtcatgtattatgaattttgacccattcttttggtgttgtaagataaaaggggtgtacaggggttgctgtacggggctatctacttgtataatttccatgagcctggaattattgtcgccattttttctaaagacaccatctcaacttaactttctggaactgagtgtcagatttgtcggtggctgacgaactcattagtcattaccaccattggacctcactcttccgattttctatgcggacttaaatgtgtcttgtaccaggctgaaacgatagttggagcacgcgatcgatcttatttgattcgtggatctgaatacctttctttagtctaatgtaacatgtttttttcttccttctcgatcgatcattttgctgtttatacgactaaacgtggaagccccccatccccctttgttttgttgattagttctttttgtttgaatcaaattattacattcttgatcgataatgatctcttcctcttatcctgctgtcaaaattcctgaactcctgcacgcaccacgcactacacgattacattatccacaaaaccaccttgcattacacccccagttgttatatgtacccaaagattcggccattgcatccatgttctccatgcatggctgcacctgaacttgtcctgcactcctgctgctccaccatcgctcgcacgtgccccaggatcaatgagcctctcgtggccctttttcttttcttttttaaaattcccctcctccagctgtgtccggtggtgtctcatctctcatgtgccggttgatagatactcgggctttgtttagttctcaaaatttgttttccaaaaacattacatcaaaatctttggacacatgcatagcattaaatataataaaataaaaaattagttgcacagtttctatgaaaatcgcgagacgaatcttctgagcctaattagtccatgattaggcataagtgctacagtaacccacatgtgctaataacggattaattagacttaataaattcgtctcgcagtttccaggaaagtcatgaaattagttttttcattcatgtccgaaaactcctttcgacatctggtcaaacatccgatgtgacatctaaaattttttttcgtgaactaaacaaggccaacaaggcatcagactataaataggtgataccctgtgcttgtactactgtctactgctccctccctccatcccttgctcgctcgcgccacaacgttatcctctcctcgtagatgtggccacagtttttgcagccggaacgagctgtccaggctactactcctactagccatctcccacccacttatcacgaggctaacccgcatgggcgcgcgccaaggaggcgggaggagtagcacaccgccaccatcaccagcagcagcatggtgcagctgagccgccgccggcaccgcgagcacgctccatagccctctgccatggcggcagcttccgtcctcctcctcctcccttcccccttcctccgtccgtcgtccccggcgcaccgcgcgcgctgcggcattgccaccacgacgacgacgagcacgagcgggaggagggggctcttcctcttcgcctcgcgctgccgccccggcccacggcgacgcgcggcgtcggcggcggtgcctcccgagcacggcttgtcccagccccagccacaggcgcgggcggtgggctcgtacgaggccgccctcggcgacgccaaggacgcgctctacgccgctctggaaggttccatctctctctctctctctctcgcgcgcgcctgttgctgctgcctgctgctgattgtcaactgtagcagcgtcgctgttcgatcgattcgctggcagcctattgattaattttatttttttgcctgtttgatgctttggaggaaaggcatgaacagagggatattcgggatgacctccgagaaaaggtcggagattcacgcactggtggagctcctcgagtccaagaacccaacgccggagccaaccgacaagctgcaggacaaggtattactacatacatgccactttccaccaatgcgcttatgctactactaatcaattcgagcgttaatttggaagtctgatcacctgatattgatcaggattttctttaccttttgagtttatgatgagcagggattgttgttagaatctaggtggaaataggtgtgtactagtttaagataaacaaatgtagtatgaaattgcctctttggtaatgttactgatagtttggtgttgagacgatggaaggtggatggatgctggaggctcgtctatagcacgatttcgatactggggaagaagaggacaaagttgggactgagagatttcatcagcttaggagatttcttccagatgattgatgtcaaagaggttagtgaaatttaccgagaaatgttgtcaagccaaattggtaacgttggtgctgtgcttgtttgctgtatggcttgttctatgtttatgcctgaatttacaagtttttcatcggtgtatttctcctatgttgtatagagtttgattgagtagaatttgacttcagtactcttcaattcttggacaataccaaaatgatcaaaacttatgttggctaatggctaccgcaacggaagtacatgacaaatgctctgtttcctaaaaagacaaagtacatgcttttgtgctataagcctattaactatgaagtaaatgttattgaaaaagaacagtgaatattgttacatgatttttatactggcaaaccaagtcagttttgatttttgatatatcttgaaataaatggagatttagcatcaccttctctacacccaaaggaaaaggcggtaaatgtgataaaattcagtgcaagggcgttgaagatattatctggccaacttactattgaagcttcgtacaagataactactaaaacagtaaggattctatctgcttctcatcattggttacgtcgtcctagaaatttttggaacctgaccacttaaattctgaagcacattattcttttatccaatttttgttttcagaaggttgatatcacgcttgatagttcgaccatcactcctgatcaggtataattcatgatattttcacttagaaactagcttcatatacataagcagtacttcaatactattggaagggtagagttatgagtcaaaacttttgtaacaaatctttttacaaataaccttgagcagaggcacattgttttccttcacaggatgcatgtgcaactgtgtgtgatgtctattttcttctatggacataagtaaccattttaattacaccatgtaaagcaactgtaattttctctgatgttcactttgactgtcatgtgcagctgatgaatattttccagaagaactatgatatgctccttgctatattcaacccagaaggctggctagagataacgtatccttttcggcttatgtgaaactgttttgttcttcgctgtttttctaattttacaatctctgctacaaatcactagtttccctacgctacattttttctttccagaagtggtgtggatgcttttaacaccaataatttcgggtagcacatgtatagcagcagagtaacccaatttgcatccagattccagagttctcctcaacattttggtcagatacgttgatgaatctctacggataggaagagatgacaaggcaaacatctttgtgctggagagggcagacccctcagaagtttgacaagatttatctgaagcaaaatgcctgcatatacatggacattccggcaaagatgcctttgcacatacccgtcctgtaacacggtggtttttaacagccagtgcagatcgtgtgctcaactttccatttgcgttagattatactactgctatttttttttctttctggagcaaaaggcatttccctttgcgacaaaatcatgcaagctgggaaagctcatgcaagttcagttacactacatagagaattggtacattaagaactggtgtacttttgaattttgaaatacaccattttcaattattcatccttgtaagacataatctaatgagtgtacagcttggcaaatggcaataccctttagacaaagttgttgttgttgtttttttttttaaatgatcgctgggtgatcccttatatcagctctttgttcctgccacgccatgcgtcatgtaataataactgggcggaaagaaattcttgcgttatgtcattttggtggagctttgcacctttcaacaaggacatctctcttcgagtctttgcctcgggtagagactggaaatgccggaaaatattttaagcccttgatgttgcatattctcattttttatacagtcacgtggagcattcaaagtcaaactgaacatcacatggagaaaaagcaacatatcaaactacacaaagtgatataacactgaatttgttatttttgtttttccatgtttgtgaagggatatgtagcacaactcgtttatgtttgtccatttttttttataaaaagtttcataactatttgtactatgtgcaacaaacattttaaaataaggtatgcgataaatatacttccgtaagaaagcatctttatctacagtctaaaggtgcattaatattcgatggtcgaaagaagctagcatcaagattctctctacctattatctaaagatgcatcatttatatttgacggctaaaagaaattatcatcaagattatctctatctattgtctaaagacgcatcatcatctgtgatcatcaaaagaagccatcatcaagattcctgaaaaggcctatataaaaatcccaagagaagccaagagaagtgaggatccacttttggaaatgctagactttgtttgcattatatatagagtgactctaatccatagaggaacgtggagagctccttggaggggtgcaccttcttgcgcgtcgagccaccatcgtccttgttggctcccgctcatcatcatccaaatctagagtcggcctcaaaggcaccgtgcaatagtggcatggcatcataaccatcgggaagaggtggcgagacgaggtggcaattcgttgggcgcaagaccgatgacctccctcaactgccaccaagcgaaacaacaggtcgtgggagccctgggcggtagaagcagtaacaggttgtgcgggtggagaccggttgaggccacatctatcttgcctccactgagtgcggtaagcttcacaacattccctattcaccgcttccgtgggcacttctcgagccgccgccgtcgttgccattcatccatgctaccaagcttcgaggatgttgcctccataattggatccatggtgccgagcttcaggctattgccaccaccgaggattcacgccaagctccttggccgccatcaccacaagccgggtcgcgctgtccgctcctcctccaccaccgttgacaaccacaacaccatcctctccggccacccacctctaccgccgcattcactggatttttcacattttgatccttttgaaaaacttatttcgcaaatagacctctgaaaaaacttatcccagaaatggtcctttttggggcgccagagtggctggcgccgtcatccaacgggac

SEQ ID NO: 7300 - DNA, 9944 bp, Oryza sativa
  unsure (1)..(9944): unsure at all n locations
cttgccgccttcggcctactcccgcctgttgccgtccactcctcaaccgcgtctccgctgcttccatagccaccgccgcagcgggctcgccttcgccgccacgtgtcgtcttacctcacgcggctgtcgccgtgctccgggagccccgccatgggcgtcgtcctgctcgtgtgcgtcgatggccgccgccgctccggttacgctgcgccccgatgccgccgccgctctcctcgtccgtgcgccgtcgcgatcatcagtggaccccagcggtgcgccgccgcctccccaccgaggccgagccgggccggccgctcgctctcgccgccctcccgcccgccgccgaatgggaagaaggggagagattgagagaaagagagagaagggagatagggaggaggaagaggacagacatgtgggccccacatgtcagtggcccacatttctttttgtgccaatgactaatgggtcccacgcatattttttaatcctactgccacgtaagtgccacatcaacgccacgtggaccgaagactcggtcaatatcgccacataggcgccacgtcggcgaaaccacctcccaaaaccggcgagggagtcaaattgcaccggttttgcaagttcgggggtcaagatttctggtattgaggttgggggatacgatttagattccgtggtcagttgagggagtcaaagtgatcttattccccagcaagaagtgagtgtcattgccacgcgatttcaaaacaggcccaggaacagaattgtcattcccgtgataactgaagatttcgtcagctcagttgtgcctttccgggagctgtaaggcggtgttcttttctcaagaaaaaaaattaagtgttttattcaaaataagttggtatttacgtatgattaattgagttttaatcattacaaactaacaaaaatagattaatttggtattttatagtaactttcatatagaaagttttcatacgaaacgtaccgtttgactgtttggaaagtgtgtcacaagtattcaaaattttatccaatttttattggagaaaagaatagaccctaagattttctctttaatagaggaaggagctcaaaattaagcaatttgctgggtagtcaacgggtgaaaccaggttacctagctataattttctggattacatagcaactgattatcggaggttgcagctagcagagctcccaaacagggtttaggtcctgttttttttccaagagttggaagaagattaaggttttcatggcacgtttttcaagctgctaaacggtacgtttcacacaaaaactttctatataaaagttgctctaaaatatcatattaatctatcttttaagtttataataattaaaactcaatcaatcatacattaataccacatcgttttgcgtaaaaaatttagttttcatcttcaagagaaaagaacaccaccttagtccacgttcggttggagaggttggaaaccttttctctggacacggaaaacagggctatttattaccatatgattattaagcattagctagaaaataacttaaaaattgaattaatatgattttttacaataacttttctatatgctacatcttgattaattagttgataaaatggataaaattaaaggtgacaaccacctcactataaaacttgctcttaaaagtttcgggagaaggtacagctacaaaaagctccaattagagctttttagctcttgtttgtttcatagtcactcttatgacaagattctttctcgttttttaatccaaaatgtcaactgttcaaaaaagtgtggcgcaatcctacttttactagttaaaggtgtgactcacctttttttattagctaaaatttatacatgtatgaaacaaaagtatagaaaatgatgacaaacttagtatggcatccaaccagaagttttcggctaagccggcttagctgccatgtaagaacttcacacatggttcttccggtcccggcctagctgtatactcgaacggtatgaagaaccatgtgaagttttcgcttagctgcatgcctacttacatcagttctttctaatgttgagacgacgacgacgacgatcaatacagtcagctaagacaaccgatgacaattttgacgattagttgtgccgtagctttcgtgggtgagctactgactgtgaatgcacccagccaccacctcgtcgtagaggcatcctgacaggtctcactcactcacggcctcagacgggacacgggcatgtgcacaggggctctgatcgactcatgccgtttttgggtaaatccgttatctgtctacgatagatgcggttcgtgatcactgatcgccgtgttcttccaaattcgcgaaacacgctagtctgtagggctcactcccgtttgctttgcatttacgcgcggtactggctgttaattatcgttcgaagttgacacttgacactcacagatcaagttggtttgtcggtgcgcattgtgaacaattcaacgagatgaatttcgtacaaatttcataggagatcgacagatcgttatattctcaccagatcgaatttttatttattttttaaaaaaaggcaataacacttctggactattattaccgctcactaggttaattttcaagctgaagcctatgtccctttgtcaaagagatatacactctcgaggctagtttcttaacgtggtgtcttcgataatgtgtgtttggttgaaaggatattttgggataaaaaatgttgatggaacttttatgcatgtttggttgatgtgcaatgatggatagggtggtcggaaaagggaatatttcacaaaggtgctggatgagtgtatatgttcaaattaatcgattagcaataattaatatatttggttgttaattactccatccgtttcacaatgtaagactttctagcattgctcatattcatatagatgttaatgaatctagatatatatgtgtgtctagattcattaacttctataaatgtggacaatgctagaaagtcttactacctccgttttttaatagatgacgccgttgactttttctcacatgtttgaccattcgtcttattcaaaaaatatacgtaattataatttattttgttatgagttgttttatcactcatagtactttaagtgtgatttatatcttatacatttgtataaaatttttgaataagacgaatggtcaaacatgtgaaaaaaagtaaacggcgtcatctattaaaaaactacattgtaaaacagagggagtaataattaacatgtcattattaatgtttgattagatataactggtcaatgttgttatttattagtatagattagggttcaattagtgataattaacatattttgttattaatatttattatttttatttcatccattctcatacatccaacgaataaaaaaaaattcttaaccatcccacgataaaaaattgaataaccatatccttgaaaaaaaaactgagacatcgtactcgtaagcacgatgtccctcatcatatcaggtcgtgtttagtttctccctattctcaactttccatcacatcatatcatatcaaaaaatttcttatacacataaactttcaactttttttttccaaaatctcaattttttttaaacttccaacttttctgaggaactaaacacacccacaatacactgttaataaagaaaacatagacctgtcaactttatttcatgtcagccgtcaactttgtcaaactttttgtcgggctgtaaagtcctaaaaatccttctacagtattttccctagcactagcctcgagcactcgatggagtagcgcgcggagaagcaatagtggcgacccaataggtttacaataggattttattgagaacgagaatatgtcacgggagtataccaaatgacgtattcacaggacgtgaatgtagtgttccaatctaaacaaatatataccatgcgagcaattattcaattaagcgtatctctcatcttttattaccagcaaggaagttttgtaataaaaaaaatggtttacatctccgaattgccaatgagcaaataattcatattcattgtgtacacgaggtaaatccattcaaaatactcctagaactacaaatctagacatgttcatatctagctttatagtactagaatacgtcacatctaatcaaaatactttatatttagagatagagcatactcttcctctgtccctaaataactcaaaccctagcttctcaaggagtttttaagaagagaaacaaaagaccacgatgcccttaattaatgtgaatattgtattgaataattggtaggtaagggtattaaagtaataaaatttctcattttgcggattagtggtaagtataagaaggtagaagttgatttattttggaataaatttgaactcttcaagttgatttacttcctcattagnnnnnnnnnnnnnnnnnnnnnnnntaaaacgtgttgttttgaggtttctcaccaaaattagtatccagtgcaaatgactgatttaccctcatttatttcattcgccacacacaaaacaaaaccgccgttggagggtggggggaggcgaagagaaagacgaagccgccgtcgaggacaccgccacaggcgtgctcctcggagtcgagcacaaagccaccaccgggatgcccgcgtcaaagttgtagccacctgcatgttgctcctcggtgagggagtagacgccgtcggcgccgagcgcccaaccaggacttcgcctgcaacctcctcgttctcatccacttgcctttgcttgatgcgcatcgacatccgcttccgccgcctgtccattgcgtccggtcatgctagccagctgcattgtgatctccacggcggcgacgaccggtgaatcaacgcgcgcctgccgcgccactcccgcgttggagaggagaggagataggtgagggagagtgggatactaggattggggattgcatgagggacggggagggggggtggtggcgatggaggagttgaggcgagagggatgacggagaagtcgatgcgagagtgcgagacagcgagaggataagatcgcattaagtggtgagaggtcgctcgctggaaaaataataataaaaaagaaacgagtgattgagggaagtagacttgagccgttaaaaactcaaaagttcgaactgacacaggcgagccgtacacactgtagttatgtggtgcactggtcggttccgctgaccacccgtgactcttaccacgaccccgtccccggtgtggccccacctaccagcgacacacgcaggcggcttcttctcgtgagctcgcggtgaacccgaccacccgccgctgataaacgtcgccccccttgccacgacacgcgctacgcccacccatccactcgcaccccgcgccgcaccaacacacgcagaggtggtgaactggttgatcgatgcttgctgctgctgcgcgtcgaggcggctccatcggcggcaaccgctgatcgatcgatcgatcccgcgggtttcgtagcacccgagcaggtgagcgagcgagcgatcccctcccgcgcggccgcgcctcgatttggtcgcgattggtgctggattttctctctctctctctctctctctctacctttcctgtttcggtgggggttttggtggggttttgtggctcgaggtggtcggggatttctggggtgatgggagaggggctcgcgtggtggtggattgttcgctggaatggcggggaatgctgtgccgtttgggggattgatgccatggtgatgggtcgaaatgctggatggggttgagtttgttcaagtggttttgaattggaatctgtggagtttggggggaaatggggaatggggcttcgagtgcgcaaaggttttgcatgtgcggaattgcagctcgaggttttcgctggatttaggcgtagcttctgtgcgcgtgtttgtttagcgattttagcagttcgtgggctggtgccgccgcgtgtttgaatggtttagcgctttatttaccgttacagttgatgtctgcggtttttctggtgatttatgccagtttttagaggtgaatcgctgtgttttgggggaattctagagcccagggttgggtttatgggggcgagattttagctgttggattttaatcctatattgcgagaagcatgggagaactgcgatccgtcgtcagaggtgaacgctttcgaactctgatggttttaatgtggcagatattgtgaagcttatggtagcttcgttaacttgatcgacgtttttacttgtgctgctcgtgcgttgtggtagatttggcttgtgagagagcaggtggatggggtagattcagattacagagtggtttactgcatgtagcgatgtgtttgagttgtaacttgtgaggctgtaagattaaaatgttggcatgcgtggggtttttgggggtaatattttgttttgtttttgtttttgttttttgctagtgttttgacccaatccatctcccccatctttttttagtggaaaaccgctccctgttggtactactcaagtaaacttaccagaattacaatcctccaacaaaggaataataccctgtgctgtttgttgtgacaacttatctgtacatgatattgctagtttgctactgcagtatacctacatgctcacttatgtttgtttcttttagataatgtcacttatgtttgtgttttgcataatgttgataatttctcgaagaatgggtgctggaaagaagactcagaccgagaacgagttccgtgagctcccggaaaaggagctaggaggggtggtcttttgttgcaataacaacacattcgatgaatgcttcactaaacagttatttggttagtaaaagtcccttttcgcctgtcctaatttcatctaaatgatatgtaaaatccatacgcgtgtgattacttttattcaagaacattgacattgctaatcaacattcttttgaacttctcgtttaattgggaatccattcgtttgccttttgtttgataggtttgcctcaacgcaatatcttgtatgtgaagaatgttaaacctggcttgcctctctttctgttcaattatagtaacagacaattgcatggcattttcaaggctacaagcactggccagcttaatatcgaccgatttgcttggatgtctgaacagtctaatgatgcaaagacaaatgcaaagacaacaccatttcctgcacaggtataatagaaacaacatatactggtctttgttctggttatagtttcataagcattgtgagtatttgtgttcttcaggtccgcttctctaccaggacagagtgccctccacttccagaaagcaaatacaaaagtgtaatcataaacaattatcgcaaggataaacctagccacttccgttttgagctagaccatcgaccaacaagagatttgatttctttgtttctacctgctcctgttcgcgctaatcaaaacaaacttagtattccaaaacctcctgctaccgctcatactgttccaaatccatggaatcgacctctgccatttcttacagcaaaagcacctgttgtttctgataaagtgaagagtgaatccaatgtgaaggatgtggatcagttcaatgtttcatcacactcacatgatattgttcctcataccttgcctgatgtagaagtcgaccttgctagcacaagtacaacatcaaggagcaaccttaacaaagatgcttctggctgtgatgacctggttgctggtttgatcaaggaagataaagaatctgtggatgatgaccagcatgctaaaatggatttaccagtaaagctgcaagagctgtcttctttacaacagaaggaagccaatttcttggaggatgctcctgtttctacttcagctcaaagcatacgtcaagatacacggtttgctgctactctccccaaagattcatttaatgccacatctcaatgtgacacatcattgaaagatacatcctttgtgcaatgccatgaatatgctgaggtgccttaagctattccatcccttattaccattttcccttacgcaccatatttcagtgctacaacttatatattttggtgcgatgtttatggcctgctttttggcatttgtctgtagctgtatcaaattatcaatgatttatccaagaagaccgaagaaatggaaaagatgaaggtacttttcttcttgcttaaaatcagtaggatcttctcttttaaagaagaaaaggtataaatagatgaacccgttttcctaattggttttatctcttgtcagtatgtctggttttgtgggttttaaaccatgttcaaattttaaccggaaaaccaaactagtatatatgtgtttgatattgagttaattacgctgttcaagtgtgcaaactccgatcttgattatggtttgaacgttctaggttgattcagatcaagaaattttgttgttgaagaaattggtaaaggttatggaaagaaaagttgaacatctggaacagcagcttgagaaatcgcatagctcttcagcaccactcttcggtgtaacaaatgatgatgtagaagggccatcaatactcctaacaggtggccataatggcattaactggctgtcatcccttgatcatattgccctgcaacggacatactagaaactctaatgccaatgagctcagcccgtgcatatgcggctgttgccacattaaaggaccatgtcttcatttttggtggttggaatggcattcgcagttgtggtacaacacaggtaaacattcttcaatatgccaaacgtagtgctctatataagcaagctgttgaccatctgcatttgtttattgcagtggagtgctacaacaggggagccaataagtggataggattgccctgcttgaatcatgagaaagggcatcttgctggagctaccttgaatggtaaaatatttgctattggtgggggtgatgggtctcagtctttttcagaagtagagatgtttgatccagcagtggggaaatggatatacagtttgtccatgcagcaacctgtatggttctacttctactcccttataacacttgtatagagtagaatgtaccagcctttttggccaatttaatagggtcctggtcttcgctatgttctcactgtgattttcttgataaggctcaagatttattagatggcccaggaaaaaaacatgttgtgaagagaggctgtttgaactgcatttcctataatcacttacatctttgggttcttaatcttttacaagatgaatagtgctgctcacagaacagtttctactattatttcaatcatttcttacgtgtcgtaaatcagtaaaaaagtttgttctcgtggtgaactatgctgagtgatttagaatttagatagctgtttgagcagtagtgggcaagctgactgtgagttggacattcgcttgagcactagtcttacagggttggttggaccatttgcaaatctaatctaagctacattttgagcacttgaataggcaataaatatttttcaaattcaggctatttcaaattatggaatgcaaattgcaattcatgtaatttcatgggatttatgaggcatatacattgtaactttccagttcaccttgcatgaaatattatcccatatttttaatgtatttttatttttgaccaatatacccacctcaccaacatgtattttattgttccagcgatgtgctcctgctgcggctgaattaaatggcgttctctatgtaattggtggttatgatggcaacatgtacttacagttacgatccaccctcaccattctctccatgctttacttgattttgattctgagaccttcctattgaatgattgatcctcatatgcacaggtcagcagaaaggtatgatccaagggaaggcttctg

SEQ ID NO: 7301 - DNA, 5298 bp, Oryza sativa
agcatttggcaacaggaaaaatggctctaatgaacccagaaatgcagaaaagcggttcgcgtcatggtcctgtttctttcagcttgggattattataatccagattattagtagtaagctgaaagaatcagacaacttattgaagtagcttattataatctggagcccagcttattataatctgataagctcatttaggtgagctttttctagattattgggtgaaaaattacccaccatatgccaccccactccctcattatacttgcaaactcaataatctaggctctaataatctaggaaagaaacaactaacagcttattctactatagattataacaatctagtttatagtagattataataatttcaagctgaaagaaacagggcctatagttagagagaatcctccacctgaatttcgtgtactacctgcctctgaaatctcgtacacgcagcttgtccttcaagctcgagcaaaacctttgctcctgtgctagtactaggcagttaggcagacctgcagctgcaggttaggatatgagaggttaggctcatattcgttgcttagcatcgttgcactgcattccacaccaacacacgaacactgcattgttccacagtccagattccccacgaactgatctgcctctgactagtacacggcgcaaaggagaattcagcaccgccaacagtagcagtaattcactggattactggcgaaattgttgcagctattattcccgcctgctcccagcaagcagaacctgaaaagttgcttcaaaaaaaaaatcaaaaattataccagcttccaagcctcccatatgtactgctatcaccagctaaagtttgttcattcgaacttctctaagtaactagtgtcctgtagacagttcagtttgctccgctacaatcaggtgacaaccaacaacacctatcttcagtgagaaacaacaacgggcagagttaacgcataccagaactcgctacggtgttgtttctaaaatgtaaaaaccgtatgactgggatgcacagaatggatgggccgtcaggcgtcagtgctcagcaatgagcggcaatatttcgcttgagagaaggtaatactgtgaggcggggttggggactggtgctgtacaaaaccggcccgggggttcatctgcacttctgcaatcctgtcaaatggcaacggcgcatgcgaaagctctcttcccggaatgccttggaaccagagatggaccagccttggccctccttgtaaacctcaacctgtgaaataaaaaacaaaacaaaataaaacgagagaaggatgtgagagttcggcgagttgaagcaacagcaatggatgatggagagagtgatcttgggaaagaactcacagtttcaacgtattcttcactgctttggataccaccaatgaggtatgcgttgccgtccaatgtaaccgcacatccgtgtgctcttgggacgctgagtgggctcccccttctccatgagttggcacgggtgtcaaaaatctctacgctggaaaacgtggtatttctattcaggccacccagagcatgtctgaaaatgaaattcccatgttggatgttaagtcgtatattatcaggtttatatcgagacgtcaaataaaagatagtgatataaggctaatagtagcatctaactgccaggtggaatctgtgtgtgtgtttttttgaaatcacatgacctctctgttgattacacacacagataaagcgagcgaaactcacagtgaatcccccaagacaactactgaatgggatcctcttcttgtccgcatacgtggaagttgggtccagaagccttcccttggatcatacctttctgctgacctgtgcatatgaggatcaatcattcaataggaaggtctcagaatcaaaatcaagtaaagcatggagagaatggtgagggtggatcgtaactgtaagtacatgttgccatcataaccaccaattacatagagaacgccatttaattcagccgcagcaggagcacatcgctggaacaataaaatacatgttggtgaggtgggtatattggtcaaaaataaaaatacattaaaaatatgggataatatttcatgcaaggtgaactggaaagttacaatgtatatgcctcataaatcccatgaaattacatgaattgcaatttgcattccataatttgaaatagcctgaatttgaaaaatatttattgcctattcaagtgctcaaaatgtagcttagattagatttgcaaatggtccaaccaaccctgtaagactagtgctcaagcgaatgtccaactcacagtcagcttgcccactactgctcaaacagctatctaaattctaaatcactcagcatagttcaccacgagaacaaacttttttactgatttacgacacgtaagaaatgattgaaataatagtagaaactgttctgtgagcagcactattcatcttgtaaaagattaagaacccaaagatgtaagtgattataggaaatgcagttcaaacagcctctcttcacaacatgtttttttcctgggccatctaataaatcttgagccttatcaagaaaatcacagtgagaacatagcgaagaccaggaccctattaaattggccaaaaaggctggtacattctactctatacaagtgttataagggagtagaagtagaaccatacaggttgctgcatggacaaactgtatatccatttccccactgctggatcaaacatctctacttctgaaaaagactgagacccatcacccccaccaatagcaaatattttaccattcaaggtagctccagcaagatgccctttctcatgattcaagcagggcaatcctatccacttattggctcccctgttgtagcactccactgcaataaaacaaatgcagatggtcaacagcttgcttatatagagcactacgtttggcatgttgaagaatgtttacctgtgttgtaccacaaactgcgaatgccattccaaccaccaaaaatgaagacatggtcctttaatgtggcaacagccgcatatgcacgggctgagctcatcggcattagagtttctagtatgtccgttgcagggcaatatgaatcaagggatgacagccagttaatgccattatggccacctgttaggagtattgatggcccttctacatcatcatttgttacaccgaagagtggtgctgaagagctatgcgatttctcaagctgctgttccagatgttcaacttttctttccataacctttaccaatttcttcaacaacaaaatttcttgatctgaatcaacctagaacgttcaaaccataatcaagatcggagtttgcacacttgaacagcgtaattaactcaatatcaaacacatatatactagtttggttttccggttaaaatttgaacatggtttaaaacccacaaaaccagacatactgacaagagataaaaccaattaggaaaacgggttcatctatttataccttttcttctttaaaagagaagatcctactgattttaagcaagaagaaaagtaccttcatcttttccatttcttcggtcttcttggataaatcattgataatttgatacagctacagacaaatgccaaaaagcaggccataaacatcgcaccaaaatatataagttgtagcactgaaatatggtgcgtaagggaaaatggtaataagggatggaatagcttaaggcacctcagcatattcatggcattgcacaaaggatgtatctttcaatgatgtgtcacattgagatgtggcattaaatgaatctttggggagagtagcagcaaaccgtgtatcttgacgtatgctttgagctgaagtagaaacaggagcatcctccaagaaattggcttccttctgttgtaaagaagacagctcttgcagctttactggtaaatccattttagcatgctggtcatcatccacagattctttatcttccttgatcaaaccagcaaccaggtcatcacagccagaagcatctttgttaaggttgctccttgatgttgtacttgtgctagcaaggtcgacttctacatcaggcaaggtatgaggaacaatatcatgtgagtgtgatgaaacattgaactgatccacatccttcacattggattcactcttcactttatcagaaacaacaggtgcttttgctgtaagaaatggcagaggtcgattccatggatttggaacagtatgagcggtagcaggaggttttggaatactaagtttgttttgattagcgcgaacaggagcaggtagaaacaaagaaatcaaatctcttgtttgtcgatggtctagctcaaaacggaagtggctaggtttatccttgcgataattgtttatgattacacttttgtatttgctttctggaagtggagggcactctgtcctggtagagaagcggacctgaagaacacaaatactcacaatgcttatgaaactataaccagaacaaagaccagtatatgttgtttctattatacctgtgcaggaaatggtgttgtctttgcatttgtctttgcatcattagactgttcagacatccaagcaaatcggtcgatattaagctggccagtgcttgtagccttgaaaatgccatgcaattgtctgttactataattgaacagaaagagaggcaagccaggtttaacattcttcacatacaagatattgcgttgaggcaaacctatcaaacaaaaggcaaacgaatggattcccaattaaacgagaagttcaaaagaatgttgattagcaatgtcaatgttcttgaataaaagtaatcacacgcgtatggattttacatatcatttagatgaaattaggacaggcgaaaagggacttttactaaccaaataactgtttagtgaagcattcatcgaatgtgttgttattgcaacaaaagaccacccctcctagctccttttccgggagctcacggaactcgttctcggtctgagtcttctttccagcacccattcttcgagaaattatcaacattatgcaaaacacaaacataagtgacattatctaaaagaaacaaacataagtgagcatgtaggtatactgcagtagcaaactagcaatatcatgtacagataagttgtcacaacaaacagcacagggtattattcctttgttggaggattgtaattctggtaagtttacttgagtagtaccaacagggagcggttttccactaaaaaaagatgggggagatggattgggtcaaaacactagcaaaaaacaaaaacaaaaacaa

SEQ ID NO: 7302 - DNA, 2401 bp, Oryza sativa
tcttaagatgtccatctagaaaaataaccttatttttttttgcggctgcttaacaggatcgtctgtaaaaatgtgagtcgatttttacagacacagatacttggtccacctgcaatctattgatgtggtcgtccaggaaaattatttttaagtagtgattatttatgttggtagctatattattctccatacagataggttttgctattttacttgtgacaggttttggggcttctttttttatattttgtttataggattttgcattaagattcgtgtttatgtaattctaacttgcaattacactcatttatttaatacgtttcatgtagtattaaagtaccatgacgtcttttttctttgggcctgaaactgaacgaaagaaaatggatgtatttttctcattctttgtagaaaggagccatataaacgctatgtcagctaaaattgggaagctgaggaattttgtttgcacttgttttgaatgttggaagatgcattgtggctgtgcttagttcccttcaaacttccaaatattccgtcacatcaaatatttggacacatggataaaaaaaataccaattgtacagtttccatgtaaattgtgagacgaatcttttgagcctaattacgccatgatttgataatatggtgctacaataaacatttgataatgacggattaattagatttaataaattcgtttcgtagcttacaggcggaatctgtaatttgttttgttattagtctacgtttaatacttcaaatatatgtgtccgtatactttaaaaaagttttggctgtggaactaaacatggcctgtctctggttttcgatcgagggatgattttctaattcggtgataagatgagggatcttcgcagtactttttccacatcaaaattacagattttgtatgggcctcagacatctggcccaacaagggtccgactcattcttcaattttcgaaaatacgtaacctctggtatctgactaagcaaattatgtacgtactcaaaattctaaacttacagtatagttaaatttagcacggttttccaaatagtaagtgatttttaatttgtcctatatatttcgatgtttgtaacaacaaagactaattatagaaaattacattcaaatctcagttcaacggtattaattttatcaaataaaatttaatttatattagatttattggtcgtgagatattaccagggttgaattaatatttatgcataccttgtattttttttggaaaagagggtacaaatggttgactgaaaaccacaacaagttttcttaatcgaaaattacatcaagtttgatttgcagcaaactaataaaatcataaaaaaattacaacacaagcacacaagggcaacaacaattaaaaaatagaaacacaaaagaaccacgtatccaccgtccaattagaactccatgccttccaaattgatgaaactgtaagtgtcgcaaatgcaggcacattcatagggagcctagcccttaggagggcagatcgccggccggaaagcgagtgggccggtggcgtacatgacgttatagtagtcatggtcagcccaccgcttgccctcgtcatggagcggcgcaccctcaatgctagagtagttgatgtttgtggggttgttgcattcgaagtccggcgaggcccgaagccgcacatagcacgccttgcgcggatcgcccatgtagaagtcggtgactttggtctcatcgagctccgcgcggaagtagccgttatcgttggagacggcctgacgacacctcaccatggcacgattcttggcgtcgtggcagatgatagacacttccgccttaggcagcggcttcgcgccttcgaggctgtgtgtgttcctttgcgcgcagctctggcagtacaccataccctccaccttcaccagcagcttgtcgctgtgggccggcggggtgtactgctgtggcggaggtggtggcggcgatggtgatggtgtggtgtagccatagtttgctgtggcgccggcggccatgagggacgcgaacaggatcgcgagaggaaggaagtcagccattgctctgagcacagctccgtactcgactgatgagatgttttgttttgaagctttggctgtgtcgaaacgtagagaagcgtgtgggttatatactgcatgccatagactaaatgtgcggacatgtagatggaaattaaacttgattttggattaagatcacagtttattttttgttattcgattctgacaatatatgatgatttgcccggcgaaagaaatgataacatgtaacgattgatctgtaaggcactttaagagaagaaatgacatgctcatgatctgcttggtgattagttttgaatttgtagactataattctataaagaat

SEQ ID NO: 7303 - DNA, 6455 bp, Oryza sativa
tttgcaagttcgggggtcaagatttctggtattgaggttgggggatacgatttagattccgtggtcagttgagggagtcaaagtgatcttattccccagcaagaagtgagtgtcattgccacgcgatttcaaaacaggcccaggaacagaattgtcattcccgtgataactgaagatttcgtcagctcagttgtgcctttccgggagctgtaaggcggtgttcttttctcaagaaaaaaaattaagtgttttattcaaaataagttggtatttacgtatgattaattgagttttaatcattacaaactaacaaaaatagattaatttggtattttatagtaactttcatatagaaagttttcatacgaaacgtaccgtttgactgtttggaaagtgtgtcacaagtattcaaaattttatccaatttttattggagaaaagaatagaccctaagattttctctttaatagaggaaggagctcaaaattaagcaatttgctgggtagtcaacgggtgaaaccaggttacctagctataattttctggattacatagcaactgattatcggaggttgcagctagcagagctcccaaacagggtttaggtcctgttttttttccaagagttggaagaagattaaggttttcatggcacgtttttcaagctgctaaacggtacgtttcacacaaaaactttctatataaaagttgctctaaaatatcatattaatctatcttttaagtttataataattaaaactcaatcaatcatacattaataccacatcgttttgcgtaaaaaatttagttttcatcttcaagagaaaagaacaccaccttagtccacgttcggttggagaggttggaaaccttttctctggacacggaaaacagggctatttattaccatatgattattaagcattagctagaaaataacttaaaaattgaattaatatgattttttacaataacttttctatatgctacatcttgattaattagttgataaaatggataaaattaaaggtgacaaccacctcactataaaacttgctcttaaaagtttcgggagaaggtacagctacaaaaagctccaattagagctttttagctcttgtttgtttcatagtcactcttatgacaagattctttctcgttttttaatccaaaatgtcaactgttcaaaaaagtgtggcgcaatcctacttttactagttaaaggtgtgactcacctttttttattagctaaaatttatacatgtatgaaacaaaagtatagaaaatgatgacaaacttagtatggcatccaaccagaagttttcggctaagccggcttagctgccatgtaagaacttcacacatggttcttccggtcccggcctagctgtatactcgaacggtatgaagaaccatgtgaagttttcgcttagctgcatgcctacttacatcagttctttctaatgttgagacgacgacgacgacgatcaatacagtcagctaagacaaccgatgacaattttgacgattagttgtgccgtagctttcgtgggtgagctactgactgtgaatgcacccagccaccacctcgtcgtagaggcatcctgacaggtctcactcactcacggcctcagacgggacacgggcatgtgcacaggggctctgatcgactcatgccgtttttgggtaaatccgttatctgtctacgatagatgcggttcgtgatcactgatcgccgtgttcttccaaattcgcgaaacacgctagtctgtagggctcactcccgtttgctttgcatttacgcgcggtactggctgttaattatcgttcgaagttgacacttgacactcacagatcaagttggtttgtcggtgcgcattgtgaacaattcaacgagatgaatttcgtacaaatttcataggagatcgacagatcgttatattctcaccagatcgaatttttatttatttttttaaaaaaggcaataacacttctggactattattaccgctcactaggttaattttcaagctgaagcctatgtccctttgtcaaagagatatacactctcgaggctagtttcttaacgtggtgtcttcgataatgtgtgtttggttgaaaggatattttgggataaaaaatgttgatggaacttttatgcatgtttggttgatgtgcaatgatggatagggtggtcggaaaagggaatatttcacaaaggtgctggatgagtgtatatgttcaaattaatcgattagcaataattaatatatttggttgttaattactccatccgtttcacaatgtaagactttctagcattgctcatattcatatagatgttaatgaatagatatatatgtgtgtctagattcattaacttctataaatgtggacaatgctagaaagtcttactacctccgttttttaatagatgacgccgttgactttttcgcacatgtttgcccattcgtcttattcaaaaaatatacgtaattataatttattttgaaatgagttgttttatcactcatagtactttaagtgtgatttatatcttatacattcgtataaaatttttgaataagacgaatggtcaaacatgtgagaaaaagtaaacggcgtcatctattaaaaaactacattgtaaaacagagggagtaataattaacatgtcattattaatgtttgattagatataactggtcaatgttgttatttattagtatagattagggttcaattagtgataattaacatattttgttattaatattattatttttatttcatccattctcatacatccaacgaataaaaaaaaattcttaaccatcccacgataaaaaattgaataaccatatccttgaaaaaaaaactgagacatcgtactcgtaagcacgatgcccctcatcatatcaggtcgtgtttagtttccccctattcccaactttccatcacatcatatcatatcaaaaaatttcttatacacataaacttttaacttttttttttttcaaaatctcaactttttttaaacttccaacttttctgaggaactaaacacacccacaatacactgttaataaagaaaacatagacctgtcaactttatttcatgtcagccgtcaactttgtcaaactttttgtcgggctgtaaagtcctcaaaatccttctacagtattttccctagcactagcctcgagcactcgatggagtagcgcgcggagaagcaatagtggcgacccaataggtttacaataggattttattgagaacgagaatatgtcacgggagtataccaaatgacgtattcacaggacgtgaatgtagtgttccaatctaaacaaatatataccatgcgagcaattattcaattaagcgtatctctcatcttttattaccagcaaggaagttttgtaataaaaaaaatggtttacatctccgaattgccaatgagcaaataattcatattcattgtgtacacgaggtaaatccattcaaaatactcctagaactacaaatctagacatgttcatgtctagctttatagtactagaatacgtcacatctaatcaaaatactttatatttagggatagagcatactctttctctgtccctaaataactcaaaccctagcttctcaaggagtttttaagaagagaaacaaaagaccacgatgcccttaattaatgtgaatattgtattgaataattggtaggtaagggtattaaagtaataaaatttctcattttgcggattagtggtaagtataagaaggtagaagttgatttattttggaataaatttgaactcttcaagttgatttacttcctcattagtatccagaaccgttttacttcccataaaacgtgttgttttgaggtttctcaccaaaattagtatccagtgcaaatgactgatttaccctcatttatttcattcgccacacacaaaacaaaaccgccgttggagggtggggggaggcgaagagaaagacgaagccgccgtcgaggacaccgccacaagcgtgctcctcggagtcgagcacaaagccaccaccgggatgcccgcgtcaaagttgtagccacctgcatgttgctcctcggtgagggagtagacgccgtcggcgccgagcgcccaaccaggacttcgcctgcaacctcctcgttctcatccacttgcctttgcttgatgcgcatcgacatccgcttccgccgcctgtccattgcgtccggtcatgctagccagctgcattgtgatctccacggcggcgacgaccggtgaatcaacgcgcgcctgccgcgccactcccgcgttggagaggagaggagataggtgagggagagtgggatactaggattggggattgcatgagggacggggagggggggtggtggcgatggaggagttgaggcgagagggatgacggagaagtcgatgcgagagtgcgagacagcgagaggataagatcgcattaagtggtgagaggtcgctcgctagaaaaataataataaaaaagaaacgagtgattgaaggaagtagacttgagccgttaaaaactcaaaagttcgaactgacacaggcgagccgtacgcactgtagttatgtggtgcactggtcggctccgctgaccacccgtgactcttaccacgaccccgtccccggtgcggccccacctaccagcgacacacgcaggcggcttctcctgggggcttttaactatttgtcactcttacggatgttgcttaacgatttgccactaggcccacatgtcatagacacatgaggacccacatgtcattgacagggtgtggcaaatcgttaattgccatgtcacacgagtggcaaatagttaaatttccccttctcctgagctcgcggtgaacccgaccacccgccgctatataaacgtcgccccccttgccacgacacgcgcaacgcccacccatccactcgcaccccgcgccgcacaaacacaccaagaggtggtgaactggttgatcgatgcttgctgctgctgcgcgtcgaggcggctccatcggcggcaaccgctgatcgatcgatcgatcccgcgggtttcgtagcacccgagcaggtgagcgagcgagcgatcccctcccgcgcggccgcgcctcgatttggtcgcgattggtgctggattttctctctctctctctctctctctctacctttcctgtttcggtgggggttttggtggggttttgtggctcgaggtggtcggggatttctggggtgatgggagaggggctcgcgtggtggtggattgttcgctggaatggcggggaatgctgtgccgtttgggggattgatgccatggtgatgggtcgaaatgctggatggggttgagtttgttcaagtggttttgaattggaatctgtggagtttggggggaaatggggaatggggcttcgagtgcgcaaaggttttgcatgtgcggaattgcagctcgaggttttcgctggatttaggcgtagcttctgtgcgcgtgtttgtttagcgattttagcagttcgtgggctggtgccgccgcgtgtttgaatggtttagcgctttatttaccgttacagttgatgtctgcggtttttctggtgatttatgccagtttttagaggtgaatcgctgtgttttgggggaattctagagcccagggttgggtttatgggggcgagattttagctgttggattttaatcctatattgcgagaagcatgggagaactgcgatccgtcgtcagaggtgaacgctttcgaactctgatggttttaatgtggcagatattgtgaagcttatggtagcttcgttaacttgatcgacgtttttacttgtgctgctcgtgcgttgtggtagatttggcttgtgagagagcaggtggatggggtagattcagattacagagtggtttactgcatgtagcgatgtgtttgagttgtaacttgtgaggctgtaagattaaaatgttggcatgcgtggggtttttgggggtaatattttgttttgtttttgtttttgttttttgctagtgttttgacccaatccatctcccccatctttttttagtggaaaaccgctccctgttggtactactcaagtaaacttaccagaattacaatcctccaacaaaggaataataccctgtgctgtttgttgtgacaacttatctgtacatgatattgctagtttgctactgcagtatacctacatgctcacttatgtttgtttcttttagataatgtcacttatgtttgtgttttgcataatgttgataatttctcgaagaatgggtgctggaaagaagactcagaccgagaacgagttccgtgaggggatcaatgcagagggggaggatctcctgaggaaggcaagacgcctccgcggagctaaggttcagcaccctttggactacgatcttgaagtcctcaggagcccaa

SEQ ID NO: 7304 - DNA, 11010 bp, Oryza sativa
  unsure (1)..(11010): unsure at all n locations
taggggtgtaattcggacttttccctttagaaaatttaggtgatggacaaagcctaactaaaaccactacatatttcgctcaaattgttcttagattagaaaaaatacctgtgcgttgcaacgggtaaaggcgtttttcagtgatacaacggctattaagagccaaggaataaattgaaacattagtatcgctatacattataattgaaaaggcgttgcctcctacctccttttaaattccagaaaacaagttccccatcaaatcaaactgaatctttctcgatctcccaaaattgattaaggattttttatccacttgatctcttcttttagttttttccaaaatcggaacgaatccacgaaactcgggataaaaacagttgggggaagatcactggcagaccatcattcacaaccgttaaacaaatattaaatctagttaattaaatccgaattgaaaggggaaattatggggaaaggatgagggacgagtagagaatcgatttttgcaattaattagagaagaaaacgcacaggaaggtatagatcgatgtggcggcggcgttagggttcggcctgggcagcgcggcggcggtggctggaggcacgtggcaacggatcggacttatacggacgacgtacaaaatcaaatacacgggatgcttgcttattttttttattagatgtacagatagatttgcgataaagagaaatattagtaaaccaactccaacacggatgacatactaaaattttggcagaaacatctttaatttttataatagtagagatttaaatcagagtaattttgttataaaattgcgatctaacacttatataaatgtggaagattttctcttaataaaatataattggtcccttgttatgtctttcctggactatggtgtagtatacatgagttgatagtcagcaatatcaacatgattaagtatttaagcatacacaattaggcaaggtgattagcctggcattggttcaggtttcaagttgctcagtggaaattgcatgggcagccctaatgggcgattgatcgcccgccaatgggggtagcgatcagattcgctacccccctcccctctccctccctccacctggtttcctttttggcaccgtattactttcttattttagtaaatttatacacctaaagtttacacatctaaagtttagagacccaaagtttataagtcaaaagtttatatatccgattcaaatttgaatttgaattcaaatattttttatatatagtatttctatacatctaaagtttatacacctaaagttagtttatagacctaaagtttatacacctcaagtttacacatctaaagtttagatacatgtttcaaatttatatttgaattatatctgattcaaatttacttgtttcatatttgaatttgaattatatccgattcaaatttgaatttgaattcaaatattttctatatatagtatttctatgcatctaaagtttatacacctaaagtttatagaaccaaagtttataaacccaaagtttataagtcaaaagtttacatacccgattcaaatttgaatttgaattatatctgattcaaatttgaatttgaattcaaattttttctatatatagtatttctatacatctaaagtttatacacctaaaatttatagacccaaagtttataagtcaaaaagtttacatacccgattcaaatttgaatttaaatttaaattttttatatatatagtatttctatacataaatttttctaactttttgttttttaaaaaaaatttgtgtggtgtactgtagtaggggaggagggaggagtgtatctagtagtatagggagggggcgggcgggtgatcgctgggcgggcgggggagcgatcacccgcccattagcatttccgagattgcatgcattagcaaacattgatgtgtgggtcctgttgacagaaaacacgaggcctgggagatctgcttaacttcagtgcaggtccaaaactcgccttcgggtgtatgagcgtggtcgttaacaggtctgtacccataaatcagccactgctactgaatcagcagtactgtagaggatctgcattcaggctggtgccttcatgcagtaggacacaaccgcacacatttgttgccatgcgcccgcaactaacttgcatggtaatacatcgattggagtcaacccttacatggcgtgaagcccgagcagccgcccgatctgcccgataggtgaatcggctactgcttccgtgctccatattgtgccgccttcttctccatagcggcaccccctcagtggagatctagtggcacccgcaagatgaaggtctagcggcagcagtcttaatagagaagggcatggccgcgggcaaaaggcagaggagagaaacacgcggacgccggcgataggtagatgatatttttttctgatttctttgattattgtgatcttcttgtctgaaatatttcgtgatttttgtgactcttttgtatatctaaaaatattgattactttcagtcatgatagagaccaaggccgcattgcttagcgttggccatttttcgattgcatgttggttttcatttttagattgtaggaatattagcaaaccaccaatattttcatcacaaaatataaatcaacttcttgattttacatagatgaccaaaatttcttaaaagaccggaaatcgagaccgaccttactgccacccccgcgtaaggtagccaatatattagggaagttggtgttcggcagcagggttatccaaatgtgatcactctaatctcacttattcacgtagagatttacccaggtttgggcctcctgaaaaatagctacgacatcttggcctaataaggaggaaagtgcaagtgaggtgatttgtgtaagtgggcatgcctgttggatggattggactgcacggttttggagcgcgggtttttacaatagcagacctacacctgctttgatgtgttttgcaagtatgacaatggtgctacaatggagcggtagagggtgagtgtgtgaatggtcggtggtccagagatcccttctctacagagatatcaaagttttcttgatcaaaaatcacatcaagtttgatttatagcaaattaataaaatcataatagatttacaacaaatgtcacacaagagcaccaataattaagatagaaacacaaaagaaatacatatccaccatccaaattgaattccacacatcccaaatttatgaaaagcacgcgcatgtaaacgtcgcaaatatagacaccacatttacatggggtgcctagttttagtgcttgggagggcatatcgccggccggaaggcgagaggaccggcggcataaacaacgttatcgtagccctgaccagtccatcgcttaccctcgtcacggagtggcgcacccttgatgtcagagtagttgatgtttgtggggttgttgcacttgaaatccggcgacgcctgaagtcgtacgtggcacgccttgctcggatcacccatgaagaagtcagagactttggtcacgccgagctctgtctggaagtagccgctctcatcggcgatggcccgcttgcactccatgacacgattcttggtgtcgtggcaggtaacggacacctccgccttgggcagcggcatcgcgccattgaggctatgcgtgttccggtacgcgcagctctggcagtacaccatgccctccaccctcaccagcaacttgtcactgtgggccggcggcggcggcggcgatggtgtggtgtagccgttgttggcagtggcgccggcggccaggagggacacgaggatcgcgagaggaaggaaggcaaccattgctcggagtcggagctagcttggtgctcaacttaagatggtttatcttaacctgaagttttggtgtgagaaaatggagagaagcatggggtttatatactgccatggactaattaaacgtgcagacatgtaggaaatcactaactgtcttgattttggattaagattgcattttatttttgtgaagataacatgtcatgattgatttgcaaggcacttctaagagaagagatcgcgtgttcatgatctgctgtgattagttaagatcagtctgtagacgataaagaatgttcggtgtgaagatatgcagatttgtcagagaacgtgctgcccgtgtgtgttcccatctgcactgaaataccacaggttctcggcacaggcaaatgatttttggcgatatagagctacattatttccgttagtactctgaaaattaaggaacagcatatcatcttctgtgtaaaatatacggttcatgtagtatctatttcctttgggtctgaaactaactgaaagaaaacggggtgcagttttctgattgattgtacgcagagcaagtctgtttttttttacatgcggcagatcaatcgtgcgaagttttgtcatggtaaggctgcaacatctgttcgcgaggaggcccgggccaccggatctgacaacctcgacctccccgcacaacacggaaccgggtagcttaaggacacaagccactcccgccgccacctttttctatcactcttcgtctcgccatgcactactcctatcaacgttaagttaggagtgggcaaaatagaccagaatcgaaccaaactaaccaaaacaataatgaaaaaaattatggtcattagatctgactagccaaatttaattgatcaattcgataagtaggctcggtaaaccgaaataccctaaaaacaaaaatttaagaaaaagcacaacataagccgatcaaaccaacaaaagcaaaaccctatccacttttttctttgttccgtaactaccctttcccacccccaccaccctcggcatcgacaacaccacaacgcatcatcctaccgcatcaccgtgccgctccccacgctatcctgtcgcgcatcctaccactcttctgtactgctacgttgtgtcgtgccgccctgcttctccgcaacgatgcctcctcaagtggagatctagcggcactcatgatatggagatctagcggcaataatcgtgatagaggaaagcgcaggtgtaggaaaaaggtgaaggagagaaacatgcggacgccggcgaaaagcaaatgttttttttgttttacagtactgcgattttttggtttgaaattattgatgactattgttattcttttgcttctcaaaatttgttgattatcttcagtcatgacagatacggaggccgcattgctcggtgttggccactttttgaatgcatgtagaccaaggaaactttgatgtggttttcttgatctactcatttgacaatggctagaaagtatgtgattttcattgtacttgtgtaactcagtaaattatttattatataaacacatacaatgtaggagactctccttaaaaaagttttctagatcgaaaatcacaccaagtttattttgcagcaaactaataaaatcagaacaaatttaccacaaatatcacacaagagcaacaataattaaaacagaaacacaaaagaaacattatccacaatccaaattgagaattcagtgcctcccatattaacgaaaagcgcacgtgtaaacgccacagacgtaggcacatgcacggggcgcctcttaatgcttgggagggcagatcgctggccggaaggcgagcgggccagcggcatacatgacgttatcgtagccctcgccagtccaccgtttgccctcatcacggagcgacgcgccctcgatgctggagtaattgatgtttgtggggttgttgcacttgaactccggcgacgcctgaagtcgcacgtggcatgccttgctcggatcgcccatgaagaagtcagagactttggtcacgccgagctccgtctggaagtagccgctctcgtcggcgatggcccgcttgcactccatgacatgattcttgacgtcgtggcaggtaacggacacctccgccttgggcagcggcatcgcgccgttgaggctatgcgtgttccggtacgcgcagctctggcagtacaccatgccctccaccctcaccagcaacttgtcactgtgggccggcggcggcggggtgtactgctgctgcggcggcggcggtgatggtgttgtgtagccgttgttggcagtggcgccgacggccaggagggacacgaggatcgcgagaggaagctggaaggcagccattgcttggagctagcttggtgctcgattacctgaagttttggtgtgagaaaatggagagaagcgtggggtttatatactgccatggactaattaaacatgcagacatgtagatggaaatcactaactgtcttgattttttattaagattgcgttttattgtgtgggctatttaattctgacaaaatataatgattggcctggaggagaaaaaaaagaagataacatgtaatgattgatctgcaaggcagttttaagagaagaaaacacatgttcatgatctgcttggtgattagttaagatcagtctgtagacgataaagaacgttcggtatatgaagatatgcagatttgtcagagaacgtgctgcccgtgtgtgtcctcaactccactgcaataccaggttctccagagagacaaatgatttttgccgatagcgctacattatttccgttagtactctgaatagtactctgaaaaggaacaagcatctcatcttctgtgtaaaatatacagttcatgcagtattgtcgtaccatgctgttccttttcttttggtctgaaactacctgaaagaaaacggagtgcagtttcctgattgtttatacaaacaagagatgtaaagccaaattactggacgcaaagcaactatgtttttttacatgcggcggatcgatcaagagctaacactgcatgattcatggcgctatcgccattgccagtttgtcacggtgaggttgccagatctgctggcaaggaggcctaagccaatacaaccccgacctccctgcacaacggatccgggtagctagaagtaagaacacaagccactcccaccgccaacctcttctaccactctccattttaccatgcaccgtccctatcgacgttcggtttgggtggtagtggtacaaatagaccgaaatcgaaccgaactaagcaagacacaaacaaaaaaaaaaaggtcacttgaatctgtctagccaaatttaatcgattaattcggtaagtaggctcaataaactgaaataacttaaaaaccaaaattccagaaaaaaaacccaagaacagaaaaccaaactaacaaaaacaagccctacgtactcacttttctctctattacatttccctaaacccaacagcagtccaccaaatcaacaaaagcaagccctactcacttttctctcttttccatttccctaactaatctttcccaccccacgctagttggaaaccgccacactagcatcacggcattgagaacaacacaacgcatcgtcctgccgtgtcaccatgccattccccatgctatcccgtcacgtatcccaccacccttttgtgctaccactccgtgtcgtgccaccctgcttctccgcggcgataccttctcaagtggagatctagcggcggtagtcctgacagaggagggcacgggcataggtaaagggtagaggatagtaacatgcggacatcggtgatagaaagttgatttctttgtgattactatgatattattttgtatgaaattgttgatgactatattgtgattcttttgcatctcaaaaattgttgattcttttcggaccgaggccacattgttcggtgttggccaaatggccacttttcggatgcatgtagattaagaaaactttgatgatctacttatttcacagtggctaaaaaatttgtaattttcattgtacatacataactcaataaattatttattacataaatatatacacggtaggagactctccttaaaaagcgttttcttgatggaaaatcacatcaagtttgatgtgtatagtaaattaataaaatcataatagatttacaacaaatatcacacaagagcaacagtatttaagatagaaacaaataaaatgcatatccaacatccaaattgaattccacgcctcccaaatttatgaaaagcgtgcgtgtaaacgtcacaaatatagacaccgcacttgtgtggggtacctagttttagtgcttgagagggcagattgccggccggaaggcgagagggccggcggcgtaaacaacgttatcgtagccctgatcagtccatcgcttgtcctcgtcacggagcggcgcgccctcaatatcggaggagttgagtttgtggggttgttgcacttgaagtccggcgacgcctgaagtcgcacgtggcatgccttgcgtggatcacccataaagaagtcagagactttggtcacgccgagctccgtcaggaagtagccgctctcatcggcgatggcccgcttgcactccatgacgcgattcttggtgtcgtggcaggtaannncacctccgccttgggcagcggcaccgcgccgtcgaggctatgcgtgttccggtacgcgcagctctggcagtacaccatgccctccaccctcaccagcagcttgtcgctgtgggccggcggggtgtactgctgctgtggcggcggcgggggcggcgatggcgatggtgtggtgtagccatagtttgcggttgcaccggcggccaggagggacacgaacacgatgatcgcgagaggatggaaggcagccattgctctgagcctctgagctagcttgctgtgctccgtggtcgactgagatattctgttttgaagctttggctgtgccgaaacgtagagaggcatgtgggttatatactgcataccatggactaaatgtgcggacatgtagatggaaattaattgtgctgattttggattaacagatcaaactttatttattgttagtcgattttgacaatatatataatgattagcctggcgaaataaatgatctgtaacgattgatctgtaaggcacttttaagagaagaaatcacatgctcatgatctgcttggtgattagttaagaatttgtagactaccgaaaatattcaggatgaagatatatattgagatttgtcagaacgtgctgcccgtgtctgtccttaacggcactgcaataccaggttgtctacacaagcagatgatatatatggagattatttagtagctacattattctccataaagacaggtttgctattttacttgcgatagatttttgggcttctatctttttatactttgtccataagattttgcgtcaagatttgattttgcgtcaagatttgtgtttatgtagttctaacttgcagttagactcatttatatagtatgtttcatgtagtattcaagtaccatggcgtcttttttctttgggtctgaaactgacagaaagaaaacaggtgcatttttctcactgtttgtagaaacaagagctttacagccaaattactggatccaaagcaagtctgctttttacatgcagcggatcgatctagccaacaccacatgatgcacggcgctatcacccttgtcaccgtgaggctgatgcatctactagcaaggagcccaaggccaccggatctagtgacctcggcctctgcgcgcaacagatccgagtagctggaggtgaagatacaagccactcctgctaccgtcctctttgatcatcttcgtcttgttgagttgtttcgcggaggcccatcgtcgggaggcttgggccggagcgtggcggagactgaagctgacccattgggccgtgcacctggggacgcctggaggtgcgggggcggagcccccgcgaaacggatcgtcatccattttagggttccaccatatatatacctcatgtaagccgccgtgcggcgttgtaacctctccccagatatagtgaagatattttgctggctagcgtccgtggttttttctctcctactttggaagggttttccacgttaaaatctcgtgtcttctgtgattgatctattgttctttatcgtttgtttgcctatcgtttcctaatacgtctcactctacaccgccctatcgatgtttggttaagggtgggcaaaatcgaactaaccaagatagaaataaaaaagatatgatcactgaatctgactaactaaatttagtctatcgattcggtaagtaggctcagttaaccaaaattccaaaaacagcccaataacaaccatcaagaaaaaaacaaaccatactcacttttctctctattccctaactacccttctccgccccaacatcccaatcatcactcgtcacgataccacatcgacggcatcaacaacacctacatcgtcttgccacttcgttgtgtcgttccccacgtagtcccgctgcgctgtaccaccattctttcgtccatggccgagctaggaattttagaaagggaaaagtccaaattacccccctgaactattgagtgagtacgaattatcctctggacccgaaaatcagacatcattcacccttgactattaataacagacaaagatcaccctgagcactattttggagcggttttgacctaaaattgtacatgtgcatcaacgtgacaatccagtcagtaaaaaaatagaaaaaaaatccttggacccacatgtcatctctctccctcccctgccctctctctctccacagcacccaacatcacttgttacaaaaaccacttcactcctccattaatcagaagcagaagacaacgacgaaggatcgtgcgttgcaggcatcgggagagggagaggaaggcaaggtggacggggatgtgcctcgcatatatgtgtttcacaccgtcgcatggctagtgttgctcacgctcgcgtcgtgccccacttttgcctctgtccccacccccgcccgccgctaccgtgcttggctccccatccgccagctgagagagacggaggtgaggggagggacaaga

SEQ ID NO: 7305 - DNA, 9194 bp, Oryza sativa
actggagactgacatcatagcttttaatttcctaaaccattcatcaggcaatatgcccgagaaattgtttgaagctagatcaagaattcggagatgctgtaattcacagtcatcatctttggtaagagtaggccccaactgtccgtagaacttattggacttcaggacaaggacttgaagtttaggaagaagatgcatccaacatgggaaagagcctccaatttgattgttcccaacatcaagtaccaccaagtttttgcaagcaactaatgatgtgggcagttgcccttcaaatcgattgtagctgaaatccaatgcctcaaatgcacaatcttccttgatattgtgcggcaactctccgttaagttggttcgccttcaagtttagtacttttattgttgaagaattctccattaagcaagaaggaattgaaccatttaagatattgtaggagaggtcaaggatttgaagactcttaacagtgcagaatgttgatgggatttctccagagatattgttcctagaggcctttagagatagtataccggcaagataaggaattaaatcaaatggcatatacgaaaaccgattatttgagtaatctaactccaagtctgaattctctttaggtataggtatgggcccttcaaacatgttataactgagattgatgtatcttgtgtacaagcaggggagcaaagagtcgtgtcctatactggtaaacttattatttgacaggtccaagaagaacaattccttccaagtttcccatgcccatcgaggtattggcccatgcatttggttatttgaaaggtcaattacgtgtagctcatcttgatgctttactgcattgggaaactttgatatgttgcaggatgctaggctcaattctgctactttgggagaacgcactactgagtcattgactaaaccgtccaccacagataatttattatttgaagagcaaggtctgataaatatggtagtctccagaatgaggtaagttccactgtccccacaaagttgttgattggaagatgcaagctatgcagttgtgtcaagttaaatatttgcaatggtatgtttccagtgaagttgctcttgaataaagacattcttctgagattcttgagattgcctatggaagatggtaaagatccagacaaaccacaatgagaaatttggagatctgtcaaagatgttagatttgttatccaagctggcattgatcctactaggccgagccccgaaacctcaaataagttcaaggatttaagcattcctagagaagacggcagttctgtagggaaattatttgcactcagactcagctccttcagatccgtgagattagaaatagagcttggtatgtaacctgagaacttggtgccactgacatgcaatttgatcaaactgctattaggtggaaaattgggcaaatcaccataaacttcatagttgtagctaatatcaatagctgtcagttttctgttctggaagatcctttgtggaaacaaaccctcaaacttatttcttgaaagctgaagaacaccaagggatgacaaatcggcgaagaactcaggtcatacaagtcattttcttgcaagtcaacaacagagatatggcaagctgaagagagactgacagatgggacctgagatcttgcaaaatggtaggctcagaacctgatcttttggagtggaattaaccagagcgttgcaccatccttcccctccattggacatatacacaaagccaagatagagctccctcagattgtcaagatttgcaaccaacctcagaaaatctaccttccagaagccccagttgggaaacgaaggtgccatgattcggcacgatcgtcttcttgattgatcacatagaaaagagttgataaatcgagagaaaccaagttggtgaggcttccaatacctgctggtatctggcctgcgaagctgggtggggagatgttgagatgggtgagctcagtgagcctctcgaatccggtggccgggagctgtgacgcgttgaagtcgttgccgccgaggttgagataccccagcgacgtgaggctgaagacggcggcgtcaaggccgccgctctgcaggcgtcggccgcctagatcgaggaaagtgacgcggccgccgtcgcagcggacgcccgcccagcggcagcagtcggtgccggcgcgccatgaccggaacgcggtggcggacgcggtggtcgccgagaacgatcgcttcagctggagcagcgccgccgcctggtccggcaagcatggaagcgagctcgcgatcaaggtttgtagtaggaggaggagtacaagtaacaacggctcgtactctcgttgggctacccgaggtgacatcttggcgggtggcagctgaatgaatgactatattgtatgatgcttgaaactgatttttttttatacatgtagagctagagagagcctgttcagtactccaagcctgacttgtatgactgaattgtgatagtgtgatggtgacatactatatcaagtcaatgcaaatgcaaataatcaaagatgccgttggcatcgtagtcgtatcgtacgtgggacgtacttaacagattttgatcgtgtcattatgtgaacaggtgtacatgcgtgtagacctttgtcatgatcagacaaatcacaaactgtagcacttatggacgaaaacagattaatccgagagcatatccgctccttgcagatggctgtagtgccgcacacgtgacacgtcgcgtatccgtagattcgtcaattcacctcggacactaatcgtgctacgtttggaaatactgttatttgagaaggaatagtctacttttatctcccttaatcgcaaaatggatgtgccctcacaatcttttaaaaagaactttttttagaaataatacaaatttaatgaaaattgtaagtggttgtctgaaatcacaaatttagcaccttatagaacaccaggttgttcgaccaagcttaaaaaattgggaatttgggatgtgtgtgcatacatgtgagtgggttgtgagattgttaacgaccaaatttgataatatcagcatcggaaagggagattagatcgaagcggaatctaagatgaggattgtcgcgggaacagagcaagaattggctggagtccggatcggctacgattggatcggctaagttcgagtcagacttggttaggtaatgcagccgatttcgataatacgacttggtgtacaacatcaggttgggttgatatgcttcaagatgattgccacgcatggatagagtcctgagaaggcaattgtatctattaattaggatattttatgtaatttccttagagatatatttgggcaaaagtctgccgcaaagacttatgatatcttagagtttgttagagataagagtcgtgtccggtatggacatattttgtaattctcgggtataaatagacccgaaccccatgtaatcaaacaacatacgttcaatacaatctcggcacatcgccactctttttgctttcgttttatttcgacgagttcttgctttcgggttgagctgtatcggtttcgatcttcaacaggaggtaaaacttgttatgacggcttgcgttctcgggattagtgcttccatctttatgacactctaatcttgtttatgtaatttatcgagttatcatatatcttacataatcttcggtaatatcgtcatctaacctacaatcggctaacatctgttaatagaaggcggccgattaggttaaatagcgacgttagcttggattatataagatatccaccactctatgaaacatccaacgacttgattgtctagatattgttctttttttcatacttaatgttgcaacagttgagtttgatctattaaatcgtgcttagaatttcaatctctagcctgtcttccggttgccgattaggatagcatcggggtttcagccgatcttacctgatttaactatagttattctatatgcttgatcgacatgttaaatctgccctttatgttaagatcttgttgcttttaagtatattaggcttctgcttggtatgttctacttgctttaatatcttaatattgagcggtattggagtattagccgatgcatgctagatctatctgatcggctatgctatgaacatatataattttgttgttaatatatatttcgatttaagtgatttatactgtatcggcatggcgaccgatctatcccaatcacttgatttaagtatatatcgacataaggattatatattgttaatatctacagccgatcgggtagatttagttcttttttacttatcaatgactgccgatcaatgcttatatgacatcggctcaaagataaatgatatgtcatcggcacttagccgatcggctatcatttatgggtttaaccacggcttctttgtttctatttcttgttgattgcaggatcaaatcaactggcacgctagcatacccgaaggcgagttttagacctgcactggagttaagcagatctcctaggcctcgtgttttccatcaatatagacctgcagcatagtacttgcttgctctctttttttataatcaagccacctaacctgtcgaatggctgttgttcgtcaggtataaatttatgtctgtcaaacaatggttgtttgatataatgctaaatttgtgatttttatcaaccaatatctgtatagctgagatctatataaataaactttacatatagcaatcctcataatgtataaatacaagatatcattaagagaagagagagaagtcgagatagataatattatttattccatatgggtagtccatatgcatacaagtatcttttgttattttttttatatggaccagttgcacaatggttgtaggtggctaaatgtaatgttttattgcttataaactacttttgcactgcattgtaaatgctccttggttctttgcttaaagacgacggttgctgatgttctggatgactggatccttttggttttaggcttttgttgcaagttagggggtgtttagattaagaggtgtaaagttttggcatgtcacatcaggtgttatatagggtgtcgcatggggtattcgggcaataaaaaaaaactaattacaaaatccgttagtaaaccgcgagacgaatttattaagcctaattaatccgttattagcaaatgtttactgtagcactatattgtcaaatcacagagcaattaggcttaaaagattcatcttgcaaattagtcataatctgtgcaattagttattttttagcctatatttaatacttcatgcaggtgtttaaacgttcgatgtgacagggtgaaaaattttagggtgggatgtagaggctgcgttcggtgggacatgttcccaacttctcctcctcgttttccgcgtgcacgtttttcaaactactaaatggtgtgttttttgcaaaaagtttccatacgaaagttgcttaaaaatcatattaattcagttttgaaaaaaaattagctaaaacttaattaatcatgctaaatgctgcttcgttttgcatgacggggaatgagggttcccgaacacagccttagttccgatggcaacatagttttgtcgaaagtctgcagattttttgtgttgccttaggccatcaccaatgcggtgcttcagcccgtgcccctagcgacggacatcccctttttcatcggtgtcgtcccctgcgatggaacgcgtccctctgctgggggatgcggctctctctgtgcctcactagcttttcgtgggaagacgcagccaggcgccgcgttgtgcgcgtgtggagctcgtgggcacggcgtcgtccccccaaatttccccttacacccttgtctctctcgctctccccttggtctcgtcgcgccgcgcccgacaccgctggcgccgcgcctaccaccgccgggaccgccaccgtcggccttagagagagagagaagagagaggcgacggtgatgacgatggatcggcgacgaccggatccggccaccgcgcgccgcggtagccatcgaccaccagctagcgacgggcggagatggcttgaggcgcctgtgctcgccgcctcgcgcgccttgcccggcctcctccgccggtgccttgcccgccaccgccggcgccacggggggcctagatccacccactacggcgccggatctggcgctcccgactgaccacgacgcgaggcggaggatgccggggaggacgccgacgggagagagaggaagagagaggggcggtggtggacgccggcaacaggagaggcggccctcctcgtcgtcctcgccgtcgctcccgctgctcctgtgacgcaccatgacgccgctcccggtccgacgaggccgccgcggccaaggaccgcgccatcgccgagcacgcctcgagtctccggcgagcggcggcaacgagagggagaaggagagagaggtgagcggcggaggggaggaggcgcgccggtaaatgagaagagagagggggggggggagaacagaggggtagtatagtaaaatacctacgtgggctttttgggctaggggcactcgttaggctactagggtatctttcattgtgagggggggtttcccagagagtactctcagttagtgagggtagtcttagagtgttctgattgtagatgcccttagaccgagttctcctttattcttgaggttgcccttagaccgagttccccttttttcttgaggttgctgcgttgaaattctggatcttttgttttctttagagcctgtttagattgtagccaaagtaaaccttaccaaaggcaagatggtaatattgccaaaattttgacatgatttcttatgtatttaccaaatatggtaacaattaaacgtagatatttttttgacaacttaattaaaaaaaattagtatggttgaaaatggtgaacaggcgcttagtccttttgtttcctttaagaatcttgtactccctccgtcttaaaaaaagacaaatcttagatttttgtgtccaacgtttgactgtccgtctcatatgaattttttttataactagtattttcattattgttagatgataaaacatgattaatactttatgcttgacttatctttttaatttttttcataattttttaaaatgaaacggacggtcaaacgttgcacacagaaacccaggatttttctttttttttttttttttacgaagggagtactagctttactatgatactatctcatctctgtcaatggaaattggggcctcaaaagcccttgaaaaaaaaaactacttcgacggggaggcgtagggcaggatgttgcccggcgacgacgaggatggccggcgccgccgtttacaacaccagatgaccagacgcgaggcggccatgtacgcctccggttgctttgcctctctgcgacgcctccgaattgagagaaagtgaagatgtgcagcggcggttggaggcggtattggctgcaggcgggcggggtctctcccggccatcctcgtggcgagctcggggcgatctccctctcctgtacgccgtggctgaagcgcatgccgcgccctggagtacttccactcctcgtcatccttctactccacctcatcccactcgaagtactcggcggaatgggggcgtgtggtggtagaggggtgagattgaggaggcgacgagggagagagatggtatccaaggttccagatcgtcgcagtcggcaattaacggggtctccatggccatggacatgtccaaggaaatgcgcgcagttcatcctattgccatcggtctcgtcgtcctctcctaccaccacgtgttcgaggaaatgcgcctctcagcggctgcaatgtacaggtgagagcacctgaagcgtttcattttccaaatttggtgtatgcggtgcagtatttgggtttaggattcctagaatactcttccattgttgattgtgcttagcatctatcgaaaacgagctcttactggatgtttgatgccgtggtattaggaatggcagtttacttgcatatgtgattgttcagcacctacaatgacgaactcttgggtcactttctgttggtatcatcgcctacatgctaacacgcacatgtctatttcaattctcactgcatttggcctataagaaaatagtttatctctaatactgaaaatgttgtcttctattaggtcattgtcaatctttctgagaaatcataaggaacttcacggacaaatatgacatatagctcttttattgatcatacaataaaatcaatatttttagagttataccattcctccaaaatatcaggcatactttccaatgaccatgcacaaagatataggatgtatttcatattccaattattcccctagtaaccatccagctttaccttttccattcatgaatgcaatagatatagtcactagagataataattgtagctattctagtcattttcaatgtctcaattgtcatgtacaaggcaagatacaccttttctttggacaaagggagtacttggtgcttggtagatccttttgtttttcagcctattttcggccttgattttgcattgttcttagacgagcccagcttggacttttggcttctgtttttattaaatggaattcataacactggatcatatttagaatgcctgttaatttcttctatgaagccataaaaagggaaaataagaaactggaaactaatagcttctgtggatgtgagataaaactataaaagtttagctgactagtttgctctgtagaaaaacagtatgcaaggtgtatgagagctcacttggagattgtgctatttcttaaaaaaattgttgtagtttggacattacaaaatttaactggctgctctgattggtacccagtaacagtttactgttttcataagttctaattctttgttggactcatttaccaattaagaaaaccataacattcttttaataagtaacatctacaagaaacccagaccttaatttcaacaagcattttatatagcactcataagtgatacctgggaaataaggtcatttctaagttcacgctattattttaggtaaggacacacagtgacggggcaaactgcttttaagtaataactacactattttccaaagccaaagcaaagtagattcagtgatatttctaaca

SEQ ID NO: 7306 - DNA, 10464 bp, Oryza sativa
  unsure (1)..(10464): unsure at all n locations
gctcgnccgagccgccccaaatctattgggccgcgccctagccgcccgagagaagtctatgtccctccctcccttcttttctttttctttttccaaaaaggatttaactaaatcctttttcctttagataaaaaattcaataatcttagaaattcaatatcttcccgaccataagtccgtttgactccgttcaacttccaaaattcctcaaatctcgagatctatctaatggcacgtttagaggtcattaatagggctttattttcgccgtttgttgagttgtcccgtttcgcgtgtagtttcggagcccgaagacccgcagcgcgaggatttcgaggatcaagctccagatctcgagcaaggcaagccacctcgaacatcttgagcctatatttgaaatttaagtatattgcttgcaaaatattatgcattgataggatcgcacttaatctgttgtcccgtctgcaaggcagattggcggacttacctaacttgttgcatttgatcctcccattgttaattgctataccatgtccccttgtaaccacccagttgcgcctcgatattcgtgcactctgtacgagtatcggcggacgccttcaaacttaaaacctgaaaaacaatttgggtaaaactggagttttacaaaagacttggaaaacccgacacctgggtcggtgcttgtgaactaaatgattttccaaaaccgcggaccggggaacgtaccgggtgtacggtttcccgctctcgcacttaaggaccgattccttggaatttcatccaaacataagacaagtacgaccacatgggtggaatgggacacccctggctgagtaactagcttatcaggggagccttgatgccgagagacatgtggattcgccggggtggtgtcggggaggacccctgggcttcctggcacagcatggtctgggacctaacctgttgttggtctgggacccctctcgtcggcatatggtaaacctgtgtcggcttttgaaatgccttgtcatgaaagcttggaggtctcccgacgtggctgatccccacgggctgggtgacccgggttagtaatgtcatgtgggtaaagtgtaccccctctgcagaggtcattaaactgttcgaacagccgtgcccacggtcatgggcggatgtgaggtgattcctagcgtagttttgtttgactactgcttgtgaaattgctgttgtgaaaaggggttcgatgtttgaaaaaaaatctgcagctgatgggatcagctaggcccgggtggccgtttgaaaagttgttggcccgggtggccgtttgaaaagctgttggccgggtgccaaccttgtttcaattctaaagactgatacattgcacatactccgaccggacgagatgcactgtctcatccgtgtcgtttgagaagcactcacctagttgttttagaaaagagatcaaataaaataaattgcaaaaacaacagcctttccttgaagcctgcattaaacacttatttcccctggcttgctgagtactcccgtactcacccttgctctatataaatatcctcccccccagttgctgaagaagatgaagcaaatcctgctgatgaggagttcttccaggagcaagctggttacgatgagttttagggtttcagcctagttcccaagtcgcgcctgtgatggttggtccaagtcctggcttccatttcccttttgtaatgcagttgtgagctcgggatctgtccgcagcccaacatgactgtactcttactctataataaagagacctctgttgctgtgatattctatcttcctgtgataccagcactgtttcctgggactggtatcgattaacaggttaatttggaacgtcacgggctagttccagtcgggactagttcggggcgtgacaagagatggtatcagagcacaggctttgccctagggcgaaacccgacgcttaggacgaccctaaggatactaagttcaaaactacttgcgaaaagctaaggtttcttttgttttctttattttcaatagtttgtttccaaaatggttactgatctttctccctctttcaaaattgtagatggcagtgaacgccagcttcagttcccacggttttggtgagggtcaccacgtcgcccagcttcgtgacctcgcccgtttccttggcttctcgtgtcccgagtacacggggtactccgtggaccgcgttccccctcactgtgagctctctgtgtacctttacccccgtggaggtatacacggagctggccttcgcccacaccacttcactgtggccaggcctactctccagatcgcgtaccaggacctctcctggactgcgcttcgtcgcctggcccacgactacagccaccgtctcggaggctccgccttccggcagtttccacgccttccttctggccactcagacgccaggtacccttgcccgtacagcgagtctcagccagtgctgactcacatggttgagctttcggaggctcaggccacccagcacgacctactccttgaggcttaccgctctcttgctcgccgctacgccgctttggaggcccgtctggccgaggagggtgtcacctcagttgacactatctcttgggactcaggtcgcctctgccacgccagccacctgtcctcccacagctcccgcggctctgctcgcactcccagtggcccgcgctcccccagctcgcgtgcgccgtactcaccagtgtactccccctacccacacccagttagcccttcctacacccccggtcacaccccagttgcttcctcccgccgtggcccacgctttatccgcactgcgcggaagcgtgttgttggttcttccaccgtgttccgtttccactacccagctcctccaccgccagcggcccgtgctgctgccggccctcgacaggttccgccggccccttcgcgccagccgatcgacgtttcttcgactgaggagccgactacaggaggcagccaggccgacgaggagtagaggaggcagtcttcagcagccgtccgtgtgttaggcccttttgttccgccgccaactcttttggagtcgtggcgaggtagtgcgtgcgtgtgtttgttgtgggtgttgtttggtagtctggttctcctaggtggtgtgcgcacagtcaagctcggcgtagctctgtgacttgtccacacccgttgtatcaggtgtttttatgatttgaaaaatccagtttatgcctagtgtgtgctatctgagttgctatttactttgctccttgccctcctaagtgcttatctaactcttacctcgccctcttctgggagtttagatggctagccgcccccgccgtgcagcccgtgcaccagctcgctttggttttgaagatggtagagtcgaagcagaagcaaatcatgaatcagctaatgagcagtctcaccacagcaaccgttcgcaccgtactgtttcccgcaacgcagaagttgagcaaccccgccgcagcaactgctcgcatcgcacagtttcccgtgatgcagagatggaacagtctcaccgctcttaccgcactgccagtcacaattctggagaagaacgcctcccttccccacctcatgtggaaaacaacatgcaacacttaatggcagttcagacgcaaatcttgcaaggactaaccacagccatagccagttttcagcataatgcgcatggaaatggccacccccacatgggcaacaacagatccaagctgatagactttctgaggtctcgtccgctagagttctctcagaccgtcgagcccgtcgaggctgacgattggttgaaagatgttgatagaaaactcaacttagtgcagtgtactcctgttgagaagacgctctacgcctctcaccagctaagaggacctgccgcagattggtgggaaaattactgcaatgcacatcctgaacccactaacattgcttgggatgagtttgctacggctttccgtgcagctcatgtgcctgaaagcaccattgacatgaagaaagaagaattcaacaggcttaagcaaggcaacagcagtgtcaatgagtacctaagtcagttcaacaagttggctcggtacgcccctgaagaagtggacacagatagaagaagatcaggaaattcttgaaaggtatcgcagttggaatgagactccagttgcttgctcatgacttccccacttttcaacatatgatcaacaaggcactcctacttgaggatgccagaaaagaggctaccgaagaatacaagaaacgctagtctaaccatcagggaaattcttcccgaggcgcacctcgccctcgctacggtcaacccatgcaataccaccagtcggtcactcagactaaccgccagccaggctacgcccctcgtcctcagatgaaccgtccggcacctccgccacagcagcgtgcccctagtggcaatactgcgccaaacagtgttacctctttcaagtcaccacagggaccgtcagcagttcagtgtttccggtgcaaccagatgggtcactatgctagacagtgccctcagaatcctaccaacaccaactcagggcatgctaatggcagcaatgccagaactcctactccagcggcagctcagtctcgtcctagctctcaggcaagtggacaaggttcacgtgcttccaacaacttcggtcgaggccgtgtgaatcacattcaagctgaaaccgctcaggatgctccagaagttgtgatgggtatgttctctgtcaactccgtacccgcaatagttctgtttgattcgggagcttcccattctttcatatcgcaagcttttgtgaaaagaaatggttggaaaacccaaaatttgcgtgtgccaatgatagtacattcccctggaaggaatataagggcaactcaaatatgcccggaagttaaccttagaattgaggaagttgacttcctagccaaaccgatagtcctagactcgcaaagcttggacatcatcctagggatggattggttggcaaagcacaaaggacagatagattgtgccgaaaagtccatcactttgcaaggacctggaggaaagcaagtccgctttacccctaacactcctaccgcaaatcggtctattctaacctgtttacaagtcacctccttggagtcggtgcccatagtctgtgaatatcccgacgtatttccggaagaattaacaagaatgccaccagaccgagaaatcgagttcgccatagaactggcaccaggcactgcaccaattgcaaaaagaccctaccgaatggcagctaatgagttagcagaagttaaaagacaaatcgaagagttggagagtaaaggttatgtgcgacctagctcatctccttggggagccccagtgcttctggttaagaaaaaggatggctctgagagaatggtaatcgactatagagccctgaatgaagtaactataaagaacaagtacccgttgccacggattgacgatttattcgatcaacttaaaggagcaagagttttctcaaaaattgacttgaggtcaggttaccaccaactgaaaatcagatctgaagatatcccgaagaccgctttctcaacgcgttatggtctatacgagttcacagtaatgtccttcggactcaccaatgctccagcatttttcatgaacctaatgaacaaaatctttatggaatacctggaccagtttgtcgtggtattcatcgatgacatcctgatatactccaagaacgagaaagaacatgctgaacacctgaggctgataatggaaaagctcagaaatcatcgactattcacaaaattcttgaaatgcgaattctggttggaccgagtagcatttcttggacacgtgatctcctccaacggtgtcgaagtagatcccagcaaagttgaagctgtacttgcttggaacccgcccaagaacgtgtcagagatccgcagcttccttggcttagctggatattatcgaagattcattgaaggattctctaagctagccagacctatgaccgagctgttaaagaaggaaaagaaatttcaatggtctgcagcctgtgaagacagctttcaggaaatgaagaaaaggttgaccactgccccagttctcaccttgccagatatccgaaaagatttcgagatcttctgtgatgcatcaagacaaggcttaggatgtgtcctaatgcaagaacgaaaggttgtggcctatgcatccaggcagcttaggcctcatgaagtcaattatcccacccatgatctcgagttggcagccgtggttcatgctcttaagatctggaggcattatttaatcgggaacagatgtgaagtatacaccgatcacaaaagtcttaagtatatcttcacacagaccgagttaaatatgaggcagagacgatggttggaactaatcaaagattacgatcttggaatccactatcatcctggcaaagccaacgtggtcgctgatgcgctaagtcgcaaggcctattgcaatatagcccaaatacggcctgaccaagatcacctgtgcaaagaattggagaagttgagggtgaccgtggtacagtcaggtgtccctgccagcttgacggtacaacctaccctagagtcgcaaatccgggaggctcagaaagacgacgaagggataaaagagttaataaaaagaatacaagaaaagaaagacaccaatttctccatagacgatcaaggcacagtttggtgcggtccacgcatctgtgtaccggccaagaaggagttaagagatctcatcctaaaggaagctcatgagtccgcctactccattcatccaggaagtacgaagatgtaccaagatatcaaggcatacttctggtgggctggaatgaagcgagatgtcgcagaatacgtagccttgtgtgacatttgccaaagagtcaaggcagagcatcagaggccagctggtctgctgcaacccctaccgattcccgagtggaaatgggaagaggtcggaatggatttcatcaccggtttgccaagaacccccagcgggtacgactccatctgggtaatcgtggatcgactcacgaaatcagctcatttcgtgccagtgaaaaccacctatgatggaaagaaactagcagaactctacatgacccatgttgtatgtagatttggctgtcctaagaaaattgtgtcggaccgaggcactcagttcacctcaaggttctggaagcagttgcatgaagccctcggaactgatctgaattttagtacagcctaccatccgcagaccgatggtcagaccgaaagggtaaaccaaatcctagaagacatgctacgtgcgtgtgccttggatttcgaaggcacttgggatcgttgtttgccgtatgccgagttctcgtacaacaacagttatcaggccagcattcaaatgtcgccgaatgaggcaatgttcggaagaaagtgccgcacccccttgtgctggaatgaggtgggcgaagccctggtattcggtcctgacatactcaagtcagcagaagaacaagttaagctgatccgagaacgtttaaagacagcgcaaaaccgtcagaaaaattacgctgacaatcggagacgtgaccttgagttcgaaaaaggagatcatgtgtacctacgggtatcacccctccggggtatgagaaggtttgggatgtccggcaagttagcaccccgctacatcggcccctacctcataaccgccagacgtgacgaagtggcttatcagcttgagctacctgaaggtctcgccgatgtgcacaacgtgtttcatgtatcccagttaaagaaatgtcttcgagttccagaagagcaagttcccctgggtaatatcgacctggaaaagaatctgaccaacaaggaaagaccgatcaaggttcttgaagaggcagaacgtcagactcgaaggaagaccatcaagttctacaaagtccaatggagcaatcattctgaagatgaggcaacctgggaacgagaagatcttctccgcgccgagtttccggagctgctcccttaggtgctaaatctcggggtcgagattcttgttaggtgggttggtctgtagcgcccgttccgtcgtggcgcctagcgggaaaattatctcttaaaaaccctaattgcgaaatttgtttctttgcttgttgtctagtgtccgtgccatctcaagatctcaatccccgatctatcgtcgagttcaattccgaatccaattccctccaaatcaattcctccgcaaaagtctagtttgcctcccccgggtttgatgggccgatttccgctcggcccatctctcccccggccccctctccccgggcgctctctctctctctctctctctctctctctctctctcctctcgctccctccccaccccggcgcgtttccccccccccccccgctcgctgctcgcgcgtgcgagagccgcgccgagcgcctctttcttcgctcccctccgctccgcccgcgcgccgcgcgcgcgtgcgcgggtgtcaaccgcgccgagcgccccctcctctcgcgcgagctccccgctcgcaaagccggccccgcgccgttgctcgcgcgcgcgcccgcgtggtttcccgcccgagccgcgccgtctgcgccgtcgtcatcgcccggtcccgctgcccagccgcgccgcccgttgcttcccgcgcgcgtgtgccgagtggccgaccgcccggtcgccgccgtcgtcagcgcctgcggcgcctgacgcccgtgtcgccgctccgctccaatccgctcgccgtcatcgccgtcgtcatcgcccggcccccgccactccgcgcgcaagccgccaagggacggaggccgagctctccttttcctctgccgcgtcgccccgctccctcctctttttcccgtttcggcaaaggggcgagccccctttctctccctccttttccccttttctccttctttccctcgccggcgtcaccttctgtcgccggtggggacgctagccggagcgccagctcgccggcttgaccgcccatgtcggttcctctctcccaaaccgacattgccgcccatttaaacccgtcttccccctcccttcctttcctctcccattcgcctcctcaccattgccgccgctcctgtgctctgcctcgcctccgccgtccatcgccaagcgccgggagagccggtgcgttcgtggacgcggaaggggactccgggcgcgccctcttctcccttttcctcggcctgaggccggagagattactcccgtgccgtcggcctctcgtcacagcgcccctcctcttctcggtgatgcctctctccgttctccctcctcgctccatctcctcccccctagctttcggtagtagctcgagtagaacccccgtagctagccggcgccgccccaaccgtagccttcgctcgccgtgtgctcgccgccgtcgccgcccgagctccatagcacccgctcgtcgccggcctcgctcggcgtagttccgtccaatccgacgctagcgttgagttcccgaagccgcgtagatgctctcaccgccgggaattagcccctcgtggcctcgtcgccgtttcccctttctcccgccgccggttgccgccgccgcaatccgccgccatcgagcaacccccggcaaatccgagccgttggctcgtctcccctcgtctcgagcaaccgcccggtgtgctcgcttttggccgtatcgccgtggttcgctccgccgctcgccgctgtcgcccgccgtccattcgcggccgggtcgtcgtctacctcccgccggcccgcgtggctgccacgtaggcgccacgtcggcgccacctcggccgcgaccggatcagccgacccagccagccgctccctccgtttttccccgtgcgcgtggtccgcggtgagccgtgaggttgcgcgtgggcccgccgcatccgttcctccgcaaaccgcgcgcgtgcaccgcgtcccaaccccgcccgcgcgcgtgcgccacgtgctccctccgcacggtgagccgagccgctgacaagcgggtcccacccgggaccgcgcgtggtgagcccggtccaccggactctctctcctccctcccgcgcgcgcgcttgggccgtcttgggccggccggcccgttaagctcggccgagccgccccaaatctattgggccgcgccctagccgcccgagagaagtctatgttccctccctcccttcttttctttttctttttccaaaaaggatttaactaaatcctttttcctttagataaaaaatcaataatcttagaaattcaatatcttcccgaccataagtccgttggactccgttcaactttcaaaaatcctcaaatctcgagatctatctaatggcacgtttagaggccattaatagggctttatttttcgccgtttgttgagttgcccgtttcgcgtgtaggttgggagcccgaagacccgcagcgcgggatttggagga

SEQ ID NO: 7307 - DNA, 7406 bp, Oryza sativa
gagcgcgatagaccgatggtgcggtctctgaacaggccgtgatgttgtcggcccatccatgtgtccatgtgctgtctaggcagtgggccgtttactaggtcaactacttcgacatgtacgggccgagatgtttggaggcccacggaaagcctgttatgttgcggcgaacaccagacggggccgcggccatgtcccgcctccggctgctttcccggcgacccggccggcgattgaagatgtgcagcggcgggtcagaggcggcagcgtctgcacaagggcggggatctctcccggccatcctcctggcgagctcggaacgatctccctctcctgcatggtgcacgccctgcctgaaggctgaagcgcatgccgccctggagggcctgcggcggcgccgccaccagctgcggcgagacttccacccctcgctgtccttctcccccacctcaggcggtcccgcacatcccaatccgtgataaccgccaccacttggacctcgccggaatggggcatgaggttgtaagggggtgaggatgaggggggcggagaggaaggtgagatggtatccaaggttccagatgttgcacttttcaagcagatattgcagtcggcaatcaatggatcgctactgggatgtcccgtcctgtccgtctgcttcgtcatcgccctcttcttccaccaccacaccacgagggccaccaggtgttcaagagaatgcgccaccggcccaccgcacaggttagcgcaaagagcacattgcttatagatggcgccactagacctgataatcacatatacaaaactatgcaaagcagaaggctgcattcttatcaacagaaaatgaatttaaattctcactaattacgagtacacacatacacatatatcatgtccgtaggtggataaacaccatacatatagtgtatactaacaatcatcgttttttgcgattccatcgttctatgtggcacaatgattcgaaccagactgccaatatgaagcccactgtgaaccccaggccagaaaagatgaacaaaaggatcacgccaagtctgtcctgccagaaactgttggtacctgaaggagctgatgcacttggagatgttgagcctggagtatcacattgtttagagagtggctttccacagaggttgacattaccttcaaaggagctgttgctaaatgacccgaactggttaccctgcggtattcttctggtcaagttgttgtacgaaagattcaaccaagcaagagaagttagagaagctaactcaggagggatttcccctgagagtttgttccaagagagatccaatgactccagctgagtcagagaattaagctgcgatggaatgtgtcctgtgaaggcattgtgtgacaggttaagtccacgtagtgaaacaagcttccccaatgactttggaataggaccaccaaatgagttatctgagagatcaattactttgaaggtggttaggattttagtgaacataagagtgccccctttgtaattgacaaccgtaatatcctgatagagcaatggtatttttgtgtttgtggtatgctctaatatgtgtccctcatcgttgtcattttccatcattgattgaaaatgctcaaaccattctggatgtatgttgccagagaaatggttggaggccaaatcaattatttgcaaccttttgaagtgattacaattttggtgacaacctttaagaccccttattgtgccattgagtttgttggatcttaagacaaggactcggagatttggaagtttacccaaccaaaatggaaaagaatcaacaatctgattatttccagcatccaggagctccaaatattggcagtatgatagtgatctaggtagtttaccttcaatttggtttccattcacatctattgactgaagattgcacccctctctactattgttaggtaacaccccatggaattggttgtctctcaatttcaatacgcttaagtttacacttcctgtaagacatgctggtactgatccactgtagttgttgccagataagtccgtgataatggctttgcttgcattacaaatcgaagatggtacattgccacttagtttattattggagaaattaatatagctggcgttttcaagatatatgccaaagttcggtactattgaaaagaagtggttgtttgagtagtccaatgcgatctcactggatgtggttagctggtattggtatgcttccttgaagtctattgaaactgagatcaagataagctaaattggacatattaacaagagaaggagattgttccaaagtagttaacatgttgcacgagaggttcaaaatattaaggtggcccttccaattctcccatatccaatttggtatagcccccgttatttgattactcgaaaggtcaagaagggaaaccgcatcaagatattttaatgtgcctggaatttttgtaaggttgcaagatgacaggtataagtacttgatgttaggaagataaggaggcactgtttaaccttcatcatctatgagtgatatcaaattgtttgacaggcttaggataaatagattcttctgcttccagacagagctaagttcaactgtgcctgtgaatttatttgattcaagaatgagataattaagatttgtaagatgaaaaagtgagttgggtatcgggcctgatagttgattgttggctaagtcaatacataacagagatgaagttaaagggtaaggaatgtcttctagtgaaccagaaagctggttttcttgaaggtaaacattttccagcctcggaagagcgaacaacgattgtggaattttccctgcatgcaagtgcagtatactagtcaaaaagttcaaagatgaatgttcactgaactgacagtctggtaccttaggacgcacttgaaccaagacaactcattcgtccgagttaaccaaactaagctgattttccgtaatattgcacatggttacattaacatttatttaaaatattgtatttgataaaaagaagcattgcttttggttctatatatataattgtttgctagagatactaaaacattttttataaaattctactaacaaagtttgatttagttacttggaaggcactaataaagatttaaccatgatcactactacaaaatcattttttgcatgtgatcaaaatcaattttcgcaggcagctagacggcccgcctgaacctaggtatatgcgaaaatcaacattttcccatgcatgttgagtaaccgcatgcaaaaacatgatgttcacgtggtcacctatgccaaccgctgcgaaaatgattttggagaaaacaaataaaagttcccaaaacaatttcggccaaaactctagcttcccatcctctttgagctcgtcgttgcccctcgaggacggcgctgtcggatccaccgcccgccattgtcgtcgcccctcccggggcatagggcggcgccaccggatcagctgccctcgaggtcgttgctgtatttgctgtcgccggcactgtcgtcacgcgcgtcaacatcgcacctgagtgagcctactgtcgcctccatctcagtcgctgaagaagagaagggagggaatgggaaagagatgaggagagggagtaggagaggagtgatgggaggtggagccaaggagagaagagaaaataagtagtgtgcgtgagtggagaggagaaaaaaatatgaaaaaatgtagtgcggtgacgcgtgtggcccacttgctctccatgttgctcacttgcgaaaatctattttcgtaagagaccccttaaggtgcaacattgcaggcaggcctcttaagggtcatctgcaaaatatatttttgcatgcgacccttgaaccgtactcaaaggagcaatttttacaggcgaaagtagttatggtccacctacaacttggagggggtctcgtccaaaaatcaattttgcagtagtggatgtgtcacatcaacgtttgtaaaaaagttggtaacaaattgttcatacgtttagcttttcccttttatataataaaaccatggaccaataagcatcttccctttaacttattaaataaataaaaaagaaggctccatattcgctcttatggcctagaaattctcatattaatcgaagaaataggaaaaaaagagtccatacaggaataaaatttaaaaataaaagtagagaagataaaatttaaaaatagctgaaattcagaattaaaaagaaggaatgtagtaagagaagactagagtccataccattatacaatagaactaatggaagttcggaattaaaaaaataagaaaaaaaataaaagtagaggttagagttcatatagaaatacaatttagaaataacgaaaatttgaaataaaaaaaattcactctcatggtctaaaaattcttatattaataggatagaaagaaatagacagagttcatatagaaatacaatttaaaaatagctgaaattcagaattagaaataaggaatataggacgagaagactagggtctgtaccagtatacaacgcagtatacaatagaattaatggaaattcggaattaaaaaataagaaaaataaaaatagaggttagagttcatatagaaaataaaatttagaaataacgaaaaatcgaaatttaaaaaaaggaatattgaaagaagaatatagagtccatatagaaatataatttaaaaataattaaaattcagaattaaaaaaaagaaatattgaaagataagtttagagtctatatagaaataaaatttagaaataataaaaattaggaattaaaataaggaatattggaagaagagtataaagtctatataggaatttagaattaattaaaattcagaataaaaataataaaattaaaagtagagtttagagtaattatggaaatacaatttacaaataactaaaattagaaattagaaaataaaatttggaacaatagtctagagtccatataggaatacaattccgaagtaactgaaatttgaaattaaaaaataaataatatcgaaagatgagtttagagtctatatagaaattaaattagaaataatgaaaagttcattttttttaaaaaagcaatattataattatagtctacagtccatatagaaacacaatttataaataacggaaattcggaattgaaaaatatgaaatattggaagaggagtctagagttcatataggagtataatttagaaataactaaaaatttgaatttaaaataaaaatataggaacacaatttataaattatagaaattcataattaaaaaaaattaaagaatgttggaagaggagtctagagtccatctagcaatataatttagaaataactaaaattcggtattaaaaaaataattaatacctatcacatatatacaacataatatgaatattgcacattgatagtttattcaagttagtacaattttaaattatcttgttatttatgatattttaataaaaaataagaaaaaaaatatatgctactataatataagaatgctagccgcgcaatttgtgcggggcaccatgctagttgttataatataatatggacccgttccgattaatccgtgtgcattattctctttttttcaccaattaacatggtaacttctagggctctcaaaacaaacatgttactccttttagcattctattataatattttagtagcaatagatttctaagctcctagattagttgtagataggaaaatgttgtaagtttttgaaaatagacgccattgatttactgtaggtggatgttaatatctagatgcgagccacaattatcaaacagaacgtggaacttgctccaccactaccagtctatcatgttatctactatgtgtgttttcacgttccaaatcaaaatacagaaatatatatattactacttaagcttttgagtgttcgacagcactcgcttggtggcattttgaataaatttattttatgatgatattttaaattgcatatgtatgaaggaagaagtagccgtcgtataaagacttaccgttgagttggggattagatgtgatccgcagactttccagttgggtcagattccctattgttgagggtatcgacccagagaagccacaactatccatctctaaatttgccaacttcgtaaaattaccgatccacggtggtatttgctgtccaaagaactcgcaccctctaaagtccaaggtctccaattttgcaagattgccaatctgatatggtattattgacccagagaaattgcagtcccagatccacaaaaacttcaaattcgtcaaattgcctatccaggagggtgccgattcagagaaatcgtacgatacaagctccaaagcagtcagctgcttaaggttgcctacccaagataataccgccttctccaagcctgattccgatccttgcaattccagttctgtcaatgaaggaagcttatctaataaagagggcagctccttggaagttcgtgccgtgctcatacccaaacgcttcaaggacttgagattggcaaatgaggacggtatgtgataagataaattggttgctgctagacctagtgtttctagattatttccatcagggaattctggtaggttaatagaaagattggggttatgagacaaatcaagcgttctcaaactttttaggtggaagatttttgttgggaactgcccttcaaaagaattgcctgcaatttcaagaatgctcaaagaagataattcagcacagaactcaggaactttgctggggagtccaaaattgtatccaaggttgatcacctttaaggaacgaagccttgagaaggaagagtgaataggaccagatatacggcacgcaaacaagctaagaatctcgagttgaggaatgttgtctgctaaaacaactgaccaagttgatccgaaaatttctatctcatcaagatggagctccctcaggttgctcatgtttgccatgacggtttggaaacttggttcatcgaaatacaacccatcattactagaaaagtcaagagtgacaagtttcatgaggcaagcaagtccaatggggatctgaccataaaagttgctgtgtgagaagttgaggtggatcatatctgtgagcctctcaaacccagatactgggagttcggctctccaaaagtaattggaagcaaggttaaggtttgtaagagaggtgaggttaaagagtgcagcatcgagacgattgctcatcaagttcaactcactgaggtcaagggaaatgaccctgccggaggccataccacatgtgatgccctcccagtggcagcagtccgatccagctcgccatgacgataagtttgcattattgatgaaggatttttgagctgtaggagggaag

SEQ ID NO: 7308 - DNA, 16502 bp, Oryza sativa
aaattttagttaagcaaccggagggtaaatctgtctagtcaaccattttggggaaaacttctgcatgattgacctctgagatgcattctggtcgtctgatgcacacagcttcaactttcagttggatactttggagttttaactttccagcttctgtttctctaatctgcaattctgcaagcaggcaaaatgtgttccataaggagctttgcttttgtgctggtattagcattttcagttgcagtcgcggagagcagagattcatttaatgtattgggtaagtcatgaattcattatgagaatgaataatgttactaatattttctccattcttattttcatatcaattggtgtttctgatgataattctaagtagatcaagcgccgcaatggcaagcaatataacactctctacagttctaaaatataaaggaatacatttatgtgttgatctacattaattattccacatcacgttatatgcgttggtctaagattgcacaagcacataatagtaaaattggtatctgtgtgtttgctgatgacgaatgttatgagaattgcatttctgaccagtcttgcttgacacatctgctgcatatcagacatcatgagttacatttattttatctatttttgttttcattttgaaaactcttatcttcacctgtaataaaattgtaattcagatatcacacagtggtcaatatatcttcagcataagaatgattccgttctacaattttgttttcacttgaaaactctatcttcacctgtaataaaattgtaggtcagatatcacacagtggttatatcttcagcataagaatgatttcgttctacaattcaacttattagtttttgactctacggtcaatttgtcatgtatttcagctcataaaagctttccccttgaaaacaagaagacagggttaacttcagccaatggaaagctgtgtcaactatgcgagcagtactcaacggaagcactgttctacctccaacaaaatgaaacccaaactgagattcttagcatcctccaccatgcatgcgcaaacgttggacctctaaaacagcaggtctgaataaatttcaatgcccgccttggaatcagaacatgctaatttcgtcagactaatttttgtatgccaatggtttaccctgttacagtgcatcactctggttgactactacattccccttttcttcttggaggtttcgatggtaacacctgaaaagttctgtgaatcagtgcatctctgcagaaagggaacgatgcttcgcctaccatctcgaggagatacatgcggcatatgccatcatgttcttgttgaagttcttatcatgctaaaggatcctgacatgcaggtaactgccatcatttcagattttcaatggtcacaaccaattctgtattgctggggtcatacttaatcgaattcgtaattttgcagctggagatagtcgagatatttctcaaagcatgcagcaaggcagataattatgtacagcaggtaaattagtcacatttatggaaatacaaaataaatcagcctctactaaagaatcaaacacatttttcatggttgtttatacagaaaatcacttaacatcctgtaagcaaagcatttcaaatgctataatgcttttctcgaatgtgcttgcatataccgatttgagacattaagatgtcgctgatcaagcccagcacctagaaatttatctgtaattagcttagttacctgcaactttgtatcagctgaatggttttcctgatgaaatactgccattttaaccatttgcaaggcccatttctagttctgttcttctcatggcagtcctatttgtaatttttgcagtgcaagaagatggtccttgaatatacccctttgattctggtgaaatctcagaagtttcttgagacgacagacgtctgctctacaattcatgcatgcaaaacggggacacaagcatctgcagaaaccatgcttctgtctgccgcatcgtgaaaacaatgcaaatcaagaaattgctacttatttcccaagagattgaaccggtaatgaattgaagatcagatgcctgtgggaattctttactctattgctgaaacagtattgagtgaggcaaaaaaaaatgttgtatgtagagatttgtgttgtatattttgaacctacactgctctcaagtttgaagcatggagcagctgtaccaccgttcatcgatgatcgagcatacaaagttacaaactgtctgatgtcattgaatttggaagttacatgtgcaattatcgcattgtatcattatcatttgacaaacattcatactattattattcagtgtttctctgttgctctggctggtccaatggtaggtcaaatatatgaaaaaaagagtaaatattgcaagtgatacacggaaaattgtatgttaaaattttggctcaaagataattgaaacatggcatggaaggttcacttggttgataaaaatatttgggtgtccatccaatactagaacagcacttcaggctgtagaatttgctgaaaccaatggcaaatcggatggcaagcctgtaggtgcaagttcaattttttttttcacaggtattgcaagagatgcttttcaggtcagataacttatcaaatggcattgatacttccataggatcacagaagatgttgcagatccacatcttgatttagattttagaccctagtggtatacacataacattgggccacggccacaagtggattttacaagcacattttactgtgatctcatctcattgtagcctctccttcctgagcctctccagctccttcaccatctgccagtgctccatggagagactcttctcaccaaagcttgcagccattatctgtgccatcgttagccatctgcagatccacataagcagaattagtttagcaaaaggtttcatttcataatcctcatgtaaaagtaactggagatggtgtaggatgccagattgcccacactgacaggcatcagcggcacacacctgctaagttcagaacaacccaagctcctatcatcacgcatggcattgaccatttcatcttgaatcatctacaattaaggcgcaaacattatgcaatttaattaagtctgttcatgttcctgacaaacatatcagtttatttcttgatagagttgagcaagggataatcacctggtatgtatcagtttcagttgactgaggaagagacctaactgtggccaaataccatctccaactttcaagttcctcggagcttgcatttaccgcaggaacagatgatgggcggaaaggtactatcaagtcagaaggtaggatatttgattttccctcggagagaattagtagctgcacatcagttgccatttccaacttgtagaactcaaaatcatactcaacctgcaaaaatgtttaaagatgttatagataaattggtcggcaaagataatttgtagcctcatgaagtcatgaggcttattaccttctgtgactccatcaagttcttaagcagcatagtattctcgacacctttggatgtcaatgatccagactgcaagagagtctcatcaaaggtcaggtgagtaccctgaggtaactgtaaaactcctgtaaccaatctgcagcaaaatttaggtggggttatgttaaaagtgattgttgaatgatgaaaacatcaggagtaacaaattcttcataagacaaacaaacaatatgtaccttcctgattggttgtcctttctaggctgaagtgtggctgtgttgagatactcaattgacagaggaataacttgtgaatatggtagtagcctctggaacaaattatttagctggtttccaaatatagaaacactctctctgttaaagccagtgaaattcaaggagagcctaccaacggtaaccacatccaccttattacgaagctgcatggagattgagaaccaataacttagtaaactaatatgaactgtttttagcagttacaatgcaaagaaaacaacttgatgtagtatagatcagctgtgttagtgatatgacgtactctggatagaagatgcaacagtaaacattgagctgccagttcatctttccctaataccagagtaagatgtgagagcaaagattgccgaattccccttagcaggattggtgatggctgcatgataaaaaaaattgggattagttattttaaatcaacgctaaaactgttaaaccaacttctgcattcaagattcagtgctatgtacctcaaccgcaggaggccttggtagaaaatcatgagcagataagtttctccataccaagcagtgaagacggggaacctgtacaaatatttacaagcattagaagtcagaaaaaaatacaaatatgaatacactttcttttcattgttagatatgaaattgatcactatgtagtatgtacttttgatgcatgtaccttactgggaggcagctgagcggttacatcttccataaggtcaaacattatatcatccgaattatcgttaggagcagcaagttcagggtcaaatgtatatacacctatgaactcagaaacatcgttcagtttcacctgactttcaggcatatcatacacctgcaaagaatagttcaatccgtaaaccatagaaaaaaaagattgaatagaatgcatttcatgcagaaagcttaggagctctaccttcactaggcaggaaaaggagcttccaggaatatgatgatctcccccattcatctctgggacatgatgttcttcattcattgacatttctactgaactatttgagattttacaccatcatccttctgaggaaaagtaaggcagtttaaatcagattcccagtcagctaactgtatggattagatttagcatgaaaccaagcaatttggagaagcatatatgccataaatctactaagacatttaagttatcctactttattagcatgcagaattaatctacaaccaagcaaggcagttgcgagactgtgtaaatgttaggagactactaggaaagaaaaatcaatcttccttcttaccgtcttcttgctggatgaagaagtctctccactaccactttctgaaacctgcatcagtcaactcattagacgacaatactacttgttaggcagcaaagtgtcaaaagaaaccattgcaacaaacttagcaaaagcttacatccatggcgtcattatctgcacccctcttccttttctccctttgttcagatgtgaagcagcttgctattctgcgcaagtcagggccaggggacgactcgcgtgtccaagaattttgtccaggcacctgaaataaaccaatggcattgtccaggttgaattccaacataagctgcttatcagcaatgagtaagactaggattaatagcaaatgagcagcaggtgctcttggaagcggcaacatacaggcacacagtggaaaagatggcgctcccagagatgtgaatcacaagggtgtggcattgagaacggcgaggaatcggagaatttgtttgtcctccaagtggagccatcctacacaaataatggttcaaaataagcataacaagcactaaaatgcagctttacattaacttatgtactaaattccaataccttgaaagcaccaacatagaactcgttcccgagcatgtcctgaaccatcccccggaaccgaacaagggtattcggcttgatcaatccaagatttgattcatccaacaccggaacctggaaaggaaaatattcccacattccgtcattccctgaacttcctaagattcatttacacccacaatacaaaatatcctctttctctcttttttttgggacaagctcaacataaacatatgtgacattctaagtatctgaattgaaatgtttgcaagaacagcaaaaagcagttatctttcacccaacttagatctgagagcatagtacttcctaaccacatctactgatgattccaaatttaccctaagaaaacctttaatctccccgtctcatattcattatagacattcaaagatcactaactttgacgatattagggtttcagcgatctaccaaataacatcattttcagaaatcgacagctgcggcaaccatcaacacggggggggatcagacttcttaccttgtcaagcccgccttgctcgaagagaaaggagcggaacacctcggtggcgccccagtctttcccccggaacgccgccaccggctcgtgcccaccggactccgccgccgccctctcgaaggtggagcgcaccgcccccagggggttcccgacgaggtcgtactgcggccccaccatcctccctctccctctcctcgctctctctctctctcgttggggagattggggagcggagcaatggcgggagaagtggtgaggtgaggagggagaggagttatagcgggtggggttttcgcgccactggcggcggcgcttcccgccgttttctccccctcttcccgccaatgcgcgcctctcctggtacttggaccttggtgcgtctattgggcctaatgggccgtcctagcattcggcacgggagtgcggcccgtctgcgggtgcgcgctgctgccgggccgagatgcctccggcccatatgaggcctgcttattggttagcgatccaaatctggaaaaagtccactttgactcccttaaatgtaaaacgaatctaatttgtacccctcaaccagaaaaccggttagaacgactcccccaattactaaaaccggtacaaattgactccctcggtggttttgtaggacggttttgctgacgtggcgctgatgtggcgataccaacccggtcttcattccacgtggcgctgacgtggcgatactaatccggtcttattccgcgtggcgcctacgtggcattagaattaaaaaatatctgtgggacccatctatcattcacatataaaatatatcgtgggacccaccgacatgtgggacccactgacatgtggggcccaccgacatcctttctccttcccttcttcttcctcctccctccctcctctcttttctctcccccttttctcttccccattcggacgcatcagtggcggcagcggccgggtggattggcgacggatctgggcggcatggccgcggcccctgcgcccccccccctcttctgggcgtcggtttcctcgccttgtgtgataactaatactcccactagctgctactactacatcactagcttagctaatgacgtcgccaagcaaccaacaacactaaattaaccaactaaatacaagctaattaagctagtgtcgtcgtcatgttgcctagctagctagctagctaattactactccggtgagtggatggcgccatgctgccatggcggcgcagcagcggcagcacatgtccatgtcagcgtcgtcgtcgctggtgacgagcctgagcaactcacgcgaggggagccccgaccgcggtagtggccttccagagggtgtcggcgacggcgatgtccgcggtggagtgcaccgggacgatggcgacgccgtcgttgctggaagggagattcgggcggggcgggagctcgcggcggcggtcgagcctgaacgcgttcgacatcatctccttctctccggcaactccagcgccggcggcggaggtggagctgtaccgccgcggcagccgcacccggcatccgaacttcccaccgccgccgtcgcctcgctgcaggatacgcgacaacagcgaccgcggtgactggcagctctcgatgccgccgcagcgccgctctgccctgccttcgcgccggccttctccacccaccgccgcccacggcttcacgcactcccttgccgccctccgctccgccatccgttgcctcggcaagctctccgcgctgctcgccgacgggaagagaaagagagagataagggagagagagggggaggaagaaaggttggaaaggctcgccgacaggaagagaaagagagagataagggagatagagggggaggaagaaaggttggaaagagaatgatatcgggaccccacatgtcagtggatcctattataatttttgtgtgtgaataataaatgggtcctacatatatatatttttaaatctaatcttacatcagcgccacatgggacgaagaccaagtcaacactgccacgtcagcgccatgtcagcaaaaccgccctccaaaacaaccgagagagtcaatttgtaccggttttagtaattgggggagtcgttctaaccggttttttggttgaggggtacgaatcagattcgttgtacatttaagggagtcaaagtggactttttcctccaaatctcgcgcacgcgttgaccgttagatctaatcgtgtggttcagatcaagttgtggaacgtgactgagtgaagtatattttacacataggcccttcaattaatttcataatattgctagagagcgcgggccgatggttgagccgtccaagagcggcggcggcgcggcgctccggcgagcggcggccggagtcgctctcccggttggcgttgtgtatgtgatagaaggccaggaacccgcgccattgctcttctcaacaggagcaggtgagatctctgacctgtcaacggcaaggtcgtcttcctcgtcatggaccttctctccctcccatggcgtcgcccacctccgaggtctgtacactccataaaccaacctctcctcctcccataacgcagcgttgccggatctacgccctccagagtctgaacccctccgaatcctctccgttgcgtgtctctggggtaaagtaggctatggaggagcaacttgctttctatttacttcggatgctaagattgttcatctcaaattgctaatacatttcgcataaagaaattgctaatacatgcctccagatgccttttttttctcaagtcatcctactgagttggcgactagtaggtgttaattgctgctagttttcctactgaacatacctaacaatactgttatgggtgaatttttgtaggctcagattttcttactgaagaaataacagaagcaatcgatggaataactcaacaacatctcaggtgtgctccgaacctcactgccaaagcaaaattctattgttttcactagtaagcaagtgttacctataaatcacacatgccaactcgttgattcagaacatcactagtatgtaatgtaaactctgtatatcagtatatgatgtgtgcatcctactggcttgtgtaactctaaagtaaataaatataacaccattatcacccatacttacagtgattcaaatattatcttgcgacaacactgacatggccctgattacaataatgcactgcaagtgaccttgatacagaaaaaagtttatttcaatacatgatacagagggctctctgtcttactgtagcctgttttctaatgggtattccccatgatactacaacagcaatggccaacccaaggccgaatcccaatccagaaaagaggaacaacacaatatctacggatttcttcttggaagggatcacattcagaattgtcatgttgatgcaacctttagatagcggaggaccacacaaatcattattccccagaaatgagctgttggtgaatgtcaagaaatgaagtgattcaggtatttttcccttaagcttgttgtaggataggtttagcatttcgaggaagtctaaggatgctaattcttgtggaatgactcctgaaagctgatttgaagatagatccaaagcttccagctgcttcagcccaccaagttgagatggaattggcccagtgaggaagttatgtgacatatttatcccatgagttaaaacaagttccccaacaatttctgggatgctaccattgaatgcattattggagaaatcaatgaatacaagggttcttagtatttgagcaagtgtggtgtcatgacctttgtatgtgagtgaggctttatatctatatactagtcctacacttggcacagcatgatccatgaccaatgatgtatttgtgtctatatgtagcatcgactccaacttcttaaaccacttgtctttgggcaacggaccagagaagttatttgaggatatgtcaataattattgcatttggaaatgcacatgtgctttcttcatcggtgagagattgaacgacatgtccaaatagcttattggatttcagtacaagcacttggagtctacgaagtttactcatccagcatgggaaaatgtcatttatttgattgttcccagcatcaaggatctccaaattttgacaagcaagtagggatctgggtagctgtccttcaatcctattgccactaaaatatagtgcatgaaatgagcagccttcctttatagtatctgggatctccccatcgagttgatttgcatttagatttaatatttgtattccattaacgttctcgatcaaacaagatggtattgagccactaaagttgttgttagagagatcaaggtattgtaattcagttgcagtacagaaagatggtgggatttctccggagaagttgtttccaggggcattgaaaagtgtgacatgactaagatgggcagtgaaattaaaaggaatcgatgagaacatgttgtttgagtaatctagcaatcttgcagaaccttgaggtataggtatagtcccctcaaacatgttgttgctaagatcaagccaatcaatttgtaaaggaataaaagggttagatccaacactagtaaatttattatgtgctaaaatcaaactagcaacgccagaatcattccaagactcccatgcccacgatggtatagccccatggatttggttttttgaaaggtcgagccaaaggagttcatcttgactcctcaagaaatcagggaatttagtgatgttgcaacccgataaagctaatatttgtagtttagggatgtgtgttgatgaagaatcgacttttccatccaccaccacaagattattatcagatatatccaagtaacggaggtgttgtagtccccataatgatgcaagtttcattgtaccgacaagattgtttgaattaaggaagagtgtgctcagattggtgaagtttgagatattttgtggtagttttcctgaaaagttgcattcatacaacactaattttctcaatttcgttaacttacctaaaaaagaagggatagatccagttagaccacacctagagaattgaaggattgttaaagaggtaaggtttgtgatccatgatggtatggttcctactattgttgttccagaaatctccaacgaattcaatgatttaagccacccgattgatgagggcagctcccctgaaaactgacttgcaccgacgccaaggttcttcaaatatttgagatttccaatggaacttggtatttcaccgtagaaactagtctcagtgacaaatatattttccaaattactagcaactgagaaatttggtaacgaatcagatagttctagattattgtaaagatcaactgttactaatttcttgtgttggaagattaatggagatacctgtccttgaagaaaattgtgtcccagttgtagaacacgcaaagaggagaaggtggcgaagtttggaatgggaccagacaaatcattaaaccgtaggtcaataacagcaagcgagtgcatggcagaaaaggatccacaaataggaccagagagcccacagtttggtaagctaagaacccgaaggttaggagtggacgaggatagagcatcgcaccatgtcatcccgttgtcggacaagtccacagcgccgaggtagagctccctcaattttttatgatttgcgattaaagtttcaaagtttggctctttgagcacgctagattcaactgaatcaaaggacaacacagaatgaccttgtgtgaattcttctacttcaaatcgagtagataggtcgagagatactagatttgttaggcgactgatgctagcggtaggtacctggcccacgaaatcggagctggagaggttgagataggtgagcatggtgagccgctcaaaccctgtctgcgggagttaggatccattgaagctgttgcaagcgaggttgagggaggttagatggaagatcgcaggatcaagaccgccgctctccaatctacgccctcccaggtccagagacgtcacacgcccatccccattcctgcagtggatgccctcccaatggcaacagtctgtgccggccttccatgacccaaaggtggaactggagtttttggtgatggagaaagaacgtttcaaccggagcagcgccgatgcctggtccggcaagcatggaacaaccgccggcggcagggctccggtgtggttggcgtacgtagctgctgatgaagaagggacaataatgagctgggtgtgtaagaggatcagcatcaacggcaacaccaatggcttgtaacgggtcattgtggagtagcaactagcaagtacagcagtttgattgggtttactgctagtctgctatacgtaagagggtgtatcgatcggtgtatggacggaggattctaccgcataccctcgcacattcttatacacgataactcgccaactcggattcgtacgttgctagctggattaacagaagatcaactcggccagccagtcgttgcttcggtgttctctactattagtagaatagtctaagccgttgatttataaggctatatcagtactttgctacttatatgattagggataattttgatgtttatttatggatctgactatccatttattgggtgatttctagaaaaaaaaatcatccaaattttttccaactttagatttacatccaacggacaaaaaaacaaatacatatttatttacacaacatttttatcaaaattacagtacacttatatgtcatatcgactgaatttgcaaatgtaattttagttatataggactgtaattttatatttaaaaaataacaaatacatatttacttacacatcttttttatcaaaattacaatccacttacatatcatatcaacttaatttacatatgtaattttagttatatagggctgtaattttattttttatattttttaagtaatcgttgaatttatcgttgatggtgctgcttctatcgtttcttcgcgttgtagctccacgcgcccagctcttgcggtagcgccaagtagtcaaaggcgattgcacctctatatgctactccatccgtctctaaatatttgacgctattgatttttctaaatatgtttgatcattcgttttattgattcttttcctatcatttgatttattgttaaatatacttttatgtatacatatagtttagtttttgaataagatgaatggtcaaacatatttaaaaaagtcaacagcatcaaatatttagagacggagggagtaaattatttttattcatctcatcagtcatgcaatacacagctacgtacaaaattcaggtttcgcatacacctacaacaatcgacacagaatagagcaatcaaatatcaatacttgatctgcatccattcaaaaaaaaaaaaacttgatctgcatgggggaggaaatggatggacaggaggttatcttgtactccctccgtcccataatatagtaacatagaaccggatgggacacagtacaacgaatccggacatctatgaaatatcccatccggtcctaggttgctatattataggacggagggagtataataatatgctgcttcagtgcctctcacagccagaaccgctgcaaccacaacagccatggttgcgccatctccacgccttcacagggttggaaatttcggacattttggatcccttcgataagatattattttggtcaatttttttttaaaaaaaattcataaattttgataatatttattcaaatttaaataaattttgttcaaaattttgaaaatttcagaccgaaattttggtattttagtgatgtccgatcaaatcggctaaacccaaaagtttaaccctgtaccttcagtcactgatctgttgtcagttgtcaccatcgccccggacctcagcctcctcgggcaggctcctcgccctcaatcatggatcagccgccggcaaccgcaatagggaccgcgccaccattgccttccaataccggcagacgggatgcaccggctgaggagcatgtctccccgagctccgacgagccaccgaacgacgaaaataaggacgagcgatgtgtaaacgtataagaggacaacaaagacgcagattagcaaatggaggaggcacgaggtgggaggcggcaggtgttggcgaaggatgtccaggagcagatcagccgccgccgcctgcgacggctgcggtagccgcctccgcccccttgcttctgtagcgccgtctcgactgatatgcatatttacaaatttatccctcaacttctacttttcaatggacattttgccctctcacgtttctactcctgttaataagatggcagtataaatacatctagtctcttggataaaaaaaaatcaacggtttagattgatttttactataagtaaagagcaccgaagcatgactttgtggcgaaaatgatttagccagaagttactgtatacgcatagcgacttggtaattatttatttggttttgaattacttatacttttataaaatattattggattcctcgtcagtatatatgccgaggctacatatgaaacaacttctgcttgctgccccctgggcagaggaagatgtatccgttcacgttttgtgcttctaatatattaagttcttagaaaaaaacttcgacggtttatactccctccatactcgtaaaggaagtcgttttggacagcgacacggtctccaaaacagaactttaactttttatttctataaaaatatttattaaaaagtaatatatgtatatttttatgaaagtattttcaagacaaatctattcatataatttttatattttcaaactcaataacttgagagttattcatgatttatattctcaaggtttgatttaaacattgttctaaacgacttcttttattagtatagagggagtatatgtcttggtgtttcttaaatcttgcaaagcggcagatggaaaagtactaccagtagtctacatgcattgattggaagatggttaagctaaaaatgatctgatacttagggctcctttgatttgtaaaaaaagtgtagaaaatttgaaggattttaatcctatggaaaaattttctatgaaaccctttaaaacaaaggactgaatcctatactatcctttaaaatttctatggaatgggtaatcctatagagattttggaggaaagttagcaagaggtccaacctcttggaaaaattcctttgagtctatctctcttatccgattcctgcgtttttcctgtggtccaatcaaacggtcattcctgtgtttttcctgtattttccaatcctctgttttaaaatatatattcctgtcagaatcctgcgtttttttctattcctctgtttttccattcctgcgattcaaagggtcctaatggtggaggagagattaatgatgttgtttaatgggtggggactggggggaatcggaggggactttcgcctaattctgtaaagatttgtcaatccaatggttgaaattattgtgcctgtttgtcgtagatatagatagattcggtccatcgctacatacagacatgcgcaacgttctatgcacggcatgcatgggtacaatgctaattctctgcagatggagtagtaacgagtataacagggaggatgtcgtattcgtttcaaaatatttttctttttattggattgagtaaaacatatatatctttaccatgaattcttaaaaatatatactccctccgtactcgtaaaagaagtcgtttatgacaatgtttaaatcaaaccttgagaatataaatcatgaataactctcaagttattgagtttgaaaatataaaaattatatgaatagatttgtcttgaaaatactttcataaaaatatacatatattactttttaataaatatttttatagaaataaaaagttaaagttctgttttggagaccgtgtcgctgtccaaaacgacttcctttacgagtatggagggagtataaaccgtcgaagtttttttctaagaacttaatatattagaagcacaaaacgtgaacggatacatcttcctctgcccagggggcagcaagcagaagttgtttcatatgtagcctcggcatatatactgacgaggaatccaataatattttataaaagtataagtaattcaaaaccaaataaataattaccaagtcgctatgcgtatacagtaacttctggctaaatcattttcgccacaaagtcatgcttcggtgctctttacttatagtaaaaatcaatctaaacccgtgatttttttttattcaagagactagatgtatttatactgccatcttattaacagg

SEQ ID NO: 7309 - DNA, 11529 bp, Oryza sativa
ctgtggaactaaacatggcctgtctctggttttcgatcgagggatgattttctaattcggtgataagatgagggatcttcgcagtactttttccacatcaaaattacagattttgtatgggcctcagacatctggcccaacaagggtccgactcattcttcaattttcgaaaatacgtaacctctggtatctgactaagcaaattatgtacgtactcaaaattctaaacttacagtatagttaaatttagcacggttttccaaatagtaagtgatttttaatttgtcctatatatttcgatgtttgtaacaacaaagactaattatagaaaattacattcaaatctcagttcaacggtattaattttatcaaataaaatttaatttatattagatttattggtcgtgagatattaccagggttgaattaatatttatgcataccttgtattttttttggaaaagagggtacaaatggttgactgaaaaccacaacaagttttcttaatcgaaaattacatcaagtttgatttgcagcaaactaataaaatcataaaaaaattacaacacaagcacacaagggcaacaacaattaaaaaatagaaacacaaaagaaccacgtatccaccgtccaattagaactccatgccttccaaattgatgaaactgtaagtgtcgcaaatgcaggcacattcatagtgagcctagtgcttaggagggcagatcgctggccgcaaagcgagtgggccggtggcgtacatgaagttatagtagccatggtcggcccaccgcttgccctcgtcacggagcggcgcaccgtcacggagcggcgcaccctcaatgctagagtagttgatgtttgtggggttattgcattcgaagtccggcaacaaccgaagccgcacatagcacgccttgcgcggatcgcccatgtagaagtcggagactttggtctcatcgagctccacgaggaagtagccattatcgttggcgacggcccgacggcacctcaccatgacgcgattgttggcgtcgtggcaaatgacggacacttccgccttaggcagcggcttcacgccttcgaggctgtgtgttcctttgcgcgcagctctggcagtacaccataccctccaccttcaccagcagcttgtcgctgtgggccggcggggtttactgctgctgcggcggcggtggcggtgatggtgatggtgtggtgtagccatagtttgcagtggcgccggcggccaggagggacacgaacatgaggatcgcgagaggatggaaggcagccattgctctgagctagctcgctgtgctcgactgatgagatgttttgttttgaagctttggctgtgtcgaaacgtagagacgtgtgggttatatactgcatgccatggactaaacatgcggacatgtagatggaaattaagcttgattttgattaagatcacagtttattttttgttattcgattctgacaatatataatgattagcccggcgaaagaaatgataacatgtaacgattgatctgtaaggcacttttaagagaagaaatcacatactcatgatctgcttggtgattagttaagaatttgtagactataaagaatattcaggatgaagatatatatgcagatttgtcagaacgtgctgcccgtatatgtccctaacggcactgcaatatggtagggcagcctgctcgcgctaaaaaatctacgaaaatagctatttttgcgtgcaggagtttgagagaaagtgagagagtagtatgtggaggagaggaggtgaaagataggagagatgataaggatgacttgaaaaaaaaaattaagtgctaagagagaaagatgaggtaactcaaacttctgggcgggcctttaatatggccgtctgcgaaaatatattttcccgtgcagccccttaagaaattcgtatagaaaaataatcttattttcctgtgcagcagattaatagggtcgtctgcgaaaatacaagtcaattttcacagacacggatacttatggtccgtctgcaatatattgaggtgctcatccatgaaaatcatttttatagtgattatttatgtcagtagctacattattctccatagagaggcgtgtgggttatatagtgcatgccatggactaacgtgcagacatgtaaatggaaattaagcttgattttggattaagatcacattttatttcttgttattcgattctgacaatgtatgatgattagcccagcgaaagaaatgataacatgtaacgattgatctgtaaggcacttttaagagaagaaatcacatgctcatgatctgcttggtgattagttaagaatttgtagactataattctataaagaatattcaggatgaagatatatatgcagatttgtcagaacgtgctgctcgtgtctgtccctaacggcgcttcaatatcttgttgggcagatgatttccctaatggcctagccgcatgtgaaaataattgctggccgtatgtaaaaacctattatgtagtagtggcagtatgtggagaagaagaggtgagagagaggagagaaggtgaggatggcttgaaaaaaaattgaaatgctaggagggaaaagaggagataacttaaactactggacggacctttaagatgatcgtctgcgaaaatatatttttactactggacggacctttaagatggccgtctgtgaaaatatatttttcctgtgcggcctcttaagatgtccatctataaaaataaccttattttttcgtgcggctgcttaatagaatcatctataaagatatgagtcgatttttgcaaacacggatacttagtccacctgctatctattcaggtggtcatccatgaaaatcatttttaagtagtgattatttatgttggtagctacattactctccatacagataggttttgctattttactcgtgacagatttttgggcttctgtttttttatattttgtttataggattttgcatcaagattcgtgtttatgtaattctaacttccaattacactcatttatttagtacgtttcatgtagtattaaagtaccacgacgtattttttctttgggcctgaaactgacgaaaagaaaacgggtatatttttctcattgtttgcagaaaggagccatataggcgctatgtcggctaaaattgggaacaataccaccgaggaactttgtttgcacttattttgaaagttggaagatgcattgtggatgtgtttagttgaaagttggaagttggcctgtctctggttttttatcgagggatgattttctaattcggtgataaaatgagggatctccgctgtactttttccacatcaaaattacaaattttctatgggcctcagacatctggcccaacaagggtccgactcattcttcaattttcgaaaatacgtaacctctggtatcggactaagcaaattacgtacgtactcaaaattaaaatttaaggtatagttaaatttagcaaggttttccaaatagcaagtgatttttaatttgtcctatatattacgatgcttgtaacaacaaagcctaattatagaaaattacattcaaatctcagttcaacggtattatttttatcaaataaaatttaatttatattagatttattggtcgtgagatataccagggttgaattaatatttatgcataccttgtatttttttggaaagagggtacaaatggttgactgaaaaccacaacaagttttcttaatcgaaaattacatcaactttgatttgcagcaaactaatataatcataaaaaaaattacaacacaatcacacaagggcaacagcaattaaaaaatagaaacacagaagaaccatgtatccaccgtccaattagaactccatgcctcccaaattgatgaagcttcataggaagcctagtgcttaggcgggcagatcgccggccggaaagcgagcgggccggtggcgtacatgacgttatagtagtcatggtcggcccaccgcttgccctcgtcacggagcggcgcaccctcaatgctagagtagttgatgtttgtggggttgttacattcgaagtcctgcgaggcccgaagccgcacatagcacgccttgcgcggatcgcccatgtagaagtcggagactttggtctcatcgagctccgcgagaaagtagccgttatcgttggcgactgcccgatgacacctcaccatgacacgattcttggcgtcgtggcagatgacagacacatccgccttaggcagtggcttcgcgccttcgaggctgtgtgtgtttctttgagcgcagctctggcagtacaccataccctccaccttcaccagcagctttttgctgtgggccggcggggtgtactgctgcggcggcggtggtgatggtgtggtgtagccatagtttgcggtggcgccggcggccaggagggacacaaacacgataaccgcgagaggatggaaggcagccattgctgtgagctagcttgctgtgttccgtactcgactgagatgttctgttttgtagctttggctgtgtccaaacgtagagatgcgtgtggattatatactgtatgccatggactaaacgtgggtacatgtagatggaaattaactgtcttgattttggatgaagatcacattttatttttttttgttatcgattctaagaaatatataatgattagcccgcgtagaaatgctaacatgtaatcattgatctgtaaggcactttgaatagaagaaatcgtatgctcatgatctgccaggtgattagttaaaaattcgtaggcgataaagaatattcaggaggaagatatgcagatttgtcggaacgtgcagcccttaacggcactgaaataccaggttctccacccaggcagatgatttttgccgatagagctacagtatttatgtcagtactctgaaaaggagtatggcatgtcatttcctactcccaccgtcccatctagaacgggacgtgacatattatagacaatgaatgtggatatatgcatgtccagattcgtagtacatactaggatatgtcatatctaatactaagttggttttttatgggatggagggactatgtaaaatataggcaaattttgctacaggacattgcgactttatggttttagctgtaggacaccgcgcaaagtaacttttgagagaagacactatgtaaatgtagttatttgccaccaaacaccacatccattaaattagtatttttgtgctgacgagcctagaaggggcctactttgttaaacatcgtgaccgaattgcccctcttcctcttcctcctcctcctctcctctttcttccttacctctcttcatctctctccctactttctctcttctctcttctccggcgaagcatacgacccacaagcggcggcgtgaccaccagagccgcagcggcacagggaaccactcctcacggcgccacccaagcgtgaactgcaggtacgccgcgagcagcagccatgccattgcgcgcaccaccctgacgacggcctccaacggtatgttcccggcggcgaggaacaccgcgatgtcgctgagctcaacgtggaggtatgagaatgagccaccggcagaggggatctccgtggcgagcagaggactgggggcaccagatccagcgcccccgctgagctcggaccaaggagagagggggcatgcaacgacggtgggggagggggagcagcggagagggggcaacggaggacgagcggtgccgccagtcgtgagagtggatgggagggggaggaggagctcgtggtggggggtgggagaggaaagtgtgattagggttagggttttaggcaccaacggttttgatggatttagaatcgatccgagccgtccatcaaaatgagtggcttagatcgatcctgtgtcgggccggcctccatctcgggccatagcactgttgggccacacgctctttatgggccggacgcgcaatagcaggccgatagggtccaatggggcctttttttctttttttagaacctttttatttgtaagcaacatattttttttatgggctcatatcacgaaaaactaaaccctaatcatctaatatttttatatttgctataattttagtttacccgttggccgttgcaacgcacgggcatcttttctaataaaatttaatttatattagatttatggttcatcagatattactagggttgaattaatatgtatgcacaccttgtttttttttggaaagagggtacaaatgattgactgaaaaccacaacaagttttcttaatcgaaaattatatcaaatttgatttgcagcaagctaataaaaacataaaaaatttacaacacaatcacacaagagcaacagcaattaaaacagaaacacaaaagaaccacgtatccaccgtccaattataattccatgcctcctgaattgatgaaatgcgcaactgtgcaagtgtaagtgttacaaatgcaggcatttttatagggtgcctagtgcttaggagggcagattgccggccggaaagcgagcaggccggcagcgtacatgacgttatagtagtcatggtcggcccaccgcttgccctcgtcacgtagcggtgctccctggatgctagagttgttgatgtttgtggggttattgcattcgaagtccagtgaggtccgaagccgcacatagcacgccttgcgtggatcgcccatgtagaagtcggagactttggtctcatcgagctccgcgcggaagtagccgttttcgtcggtgactgtccgacggcacctcaccatgacgcgattcttggcatcgtggcagatgacggacacctccgccttaggcagcggcttcgcgccttcgaagctgtgtgttcctttgcacgcagctctagtagtacaccatactctccaccctcaccagcagcttgtcgctgtgggccggcggggtatacctgtggcggcagcgggggcggcgatggcgatggtgtggtgtaaccatagtttgcggtggcgccggcggccaggagggacacgaacacgaggatcgcgagaggatggaaggcagccattgctctgagctagcttgctgtgctccgtactcgactgagatgttctgttttgaagcttttgctgtgtccaaacgaattaaattttaaaatatactgtttatccaatttttttcaggaatattcgggataaatttttttttttacaaatataccatcaatctcgcgcaatcgttttacgaaaatgacgtggacatgacgtcaccagcggtatcgcgtgacgaaagcgcgagaccgtgcggtatcacgcggcagtggcgcgagaccgcgcggtctcgcggaagcaaagagcgagtccgctcggtatcgcttgttcaagcagcaacaccggcatggcagtcccggccgtcaatggttaattacctaattaactattaactaataataattagtaattaattatcctgattagtgattaattaattgctaatcaggataattaatcaacaggcatgtcagtgcggtatcgctatttcaatcagcgagaccctttggttccacgagaccgtgcggtctcgcgcagttgttgcgcgagactgtgcgctctcgcgctttcatcgcgcgataccgtccgtgatattacgtccgtgtcattttcgcgtaacgattacgcgagatcgacggtatatttctgtaaaaaagtttgcatctcaactattctttaaaaaaaatgaggaacaatatatttttaaatttaattcatgtccaaacgtagagaggcgtgtgggttatatactgcatggcatggactaaacgtgcggacatgttaaattaagcttgattttggattaagatcacagtttatttttgttattcgattctgacaatatataatataatgattagcccggcggaagaaatgataacatgtaacgattgatctgtaaggcacttttaagagaagaaatcacatgctcatgatctgcttggtgattaattaagaatttgtagactataaagaatattcaggatgaagatatatatatctatatatatctatatatatatatatatatgcagatttgtcagaacgtgctgcccgtgtatgtccctaacggcactgcaataccatgttgagcagatgatttttttgcctatagggctaccactactaagaaagagatttttgcacatgggccaaaagagattttcgcgtacggttggacagcccgctcgcactaaaagatctacgaaaatagctatttttttgtctgggagtttgagagaaagtgagagagtagtatatggaggagaggaggtgagagagagatgataaggatgacatgaaaaaaaaattgaagtgctaggagggaaaagaggaggtaactcaaacttctgggcgaacatttaagatggctgcctgcgaaaatatattttcctgtgcacctgcttaatagggtcgtctgcgaaaatgtaagtcgattttcgtagacatggatacttattgtccgtctgcaatatattgaggtgctcatccagaaaaattatttttatagtgattatttatgtcagtagctacattattctccatacatataggttttgctatttttcgatatgttgttcatatgattttgcatcaagattcgtgtttacgtagttctaacttgcaattacacttatttatgcagtacgtttcatgtagttttaaagtaccatgacgtcttttttcttagggcctggaactaacagaaagaaaacgagtgtatttttctcattgtttgtagaaaggagttgcataggcgctatgtcagctaaaattggaaacaacaccaccgagaaacttcgtttgcacttgttttgaaagttggaggatgcgtgggacgattttgtaattcggtgataagatgagggacctccactgtactttttccacatcgaaattacagattttgtatgggcctcagacatctggcccaacaagggtccgactctttcgccaattttcgaaattacgtacgtactcaaaattcaaattacgactcattcgctaagggtatctgactaagcaaattacgtaagtactcaaaattcaaaatttaaggtatagttaaaattggttttccaaaatatttagtgctttttactttgtcctatatattacgatgcttgtaccacaaaagccataattataaaaaaattacatccaaatctcagttcaacggtattatttttatcacgtaaaatttaatttatattagatttatggttcgtgagttattactagggttgaatcaaaatgtatgcacaccttgtatttttttcgaaagagggtacaaatgattaactgaaaatcacatcaagttttcttaatcaaaaattacatcaagtttgagttgcagaaaactaataaaatcataaaaaaattacaacacaatcacacaagagcaacagcaattaaaacagaaacacaaaagaaccacgtatccaccatcaaactagtttctcccaaattgatgaaacacgcaagtgtgcaagtgcaagtgtcataaatgtaggcacattcatagggagcctagtgcttaggagggcagatcgccggccggaaagcgagcgggccggtggcgtacataatgttatagtagccatggtcggcccaccgcttgccctcgtcacggagcggcgcaccctcgatgctagagtagttgatgtttgtggggttattgcattcgatgtccggcgacgcccgaagccgcacatagcacgccttgcgtggatcgcccatgtagaagtcggtgactttggtctcatcgagctccgcaaggaagtagccgttatcgttggagacggcctgacgacacctcaccatggcacgattcttggcgtcgtggcagatgatagacacttccgccttaggcagcggcttcgcgccttcgaggctgtgtgtgttcctttgcgcgcagctctggcagtacaccataccctccaccttcaccagcagcttgtcgctgtgggccggcggggtgtactgctgtggcggaggtggtggcggcgatggtgatggtgtggtgtagccatagtttgctgtggcgccggcggccatgagggacgcgaacaggatcgcgagaggaaggaagtcagccattgctctgagcacagctccgtactcgactgatgagatgttttgttttgaagctttggctgtgtcgaaacgtagagaagcgtgtgggttatatactgcatgccatagactaaatgtgcggacatgtagatggaaattaaacttgattttggattaagatcacagtttattttttgttattcgattctgacaatatatgatgatttgcccggcgaaagaaatgataacatgtaacgattgatctgtaaggcacttttaagagaagaaatgacatgctcatgatctgcttggtgattagttttgaatttgtagactataattctataaagaatattcaggatgaagatatatatgcagatttgtcagaacgtgctgctcgtgtctgtccctaacgacactgcaataccatgttgggcagatgattttttgccaatagggctaccactaggacaaaagtgatttttctcatggctcaagagaaattttcgcgtacggtaggacaacccacacgtactaaaatgtctacgaaaatagctatttttgtgtacgggagtttgagagagtgagagagtagtatgtggagaagaggaggtgagagagagaagagaagatgaggatggcttgaaaaaaaatagaagtgctatgagggaaaagaggagataatttaaactactgggcggacgtttaagatggccgtctgcgaaaatatatttttcccgtttggcctcttaagatgtccatctagaaaaataaccttatttttttttgcggctgcttaacaggatcgtctgtaaaaatgtgagtcgatttttacagacacagatacttggtccacctgcaatctattgatgtggtcgtccaggaaaattatttttaagtagtgattatttatgttggtagctatattattctccatacagataggttttgctattttacttgtgacaggttttggggcttctttttttatattttgtttataggattttgcattaagattcgtgtttatgtaattctaacttgcaattacactcatttatttaatacgtttcatgtagtattaaagtaccatgacgtcttttttctttgggcctgaaactgaacgaaagaaaatggatgtatttttctcattctttgtagaaaggagccatataaacgctatgtcagctaaaattgggaagctgaggaattttgtttgcacttgttttgaatgttggaagatgcattgtggctgtgcttagttcccttcaaacttccaaatattccgtcacatcaaatatttggacacatggataaaaaaaataccaattgtacagtttccatgtaaattgtgagtacgaatcttttgagcctaattacg

SEQ ID NO: 7310 - DNA, 9503 bp, Oryza sativa
tttgtagttgtttttgacatatttgatagtagtagtatataccttttgaacatgattcaaaaccatttacacacatgccggacttggtgtgcttaattcagtgtctctgaaatctgaatgatgctactctcatggacactttgcagttttgagtgtctgaataacgtcttcatgcatttgcactatagcttattattctgaaaacagaaggaaaaaaaaccatgtattgatacgtgcagaacatgatggcccaatctaattaattcaaattagctatgcatgttgaggagctgtaacaattaaggaacagtactgagtagggctatcagtacgtacaatttggccatagatttttcccccatctgaagggcatcaggacagtggaggagacattgcaaggacatttccaagaagacaatgatcaattatattaattttagacagctcacttgacaaatatacatgtatgtccccttacttaattaaccccggtcttaagagctaattaatccatcgacattagtttaactcacactaacctccgtcgatggcgccggtaagtccactctaattaagagtctatcaaatacattctttgaaagcaaaacaaaacaaatgaactccttgcatcaacgggctagctatcacgtgattctatatttttaaaccatttttaactctcacctgattaattagcttgtgagtaacttgattgtactactagctagtcccaacaagtgggtttaacggtaaaattaaactaggtagctaattggccgagatagatgtagtagcaagaacatgtattgctattgattggaattgatgattattgtcatagctaggtgtaacttggtttagttaagctagcacagtagtcgtatcttgcatgctttacaaggcacttcaaaggattggaccaagccagctagcagcattggcaaatggcaaatcataatatcaacgagaagctagcatgaaccgtcagagtgaatgagcactgcattcaatgtagcgtcgtcattttgtcagcaagtaatggtgttcctgcatgtgcaactactttgcaaatcgatccacattgcttcagataaagtgtgtatatagttaagcaccttcattaatctgtaaggtatggatcatgagagcacagctaaggtgtcgatttcaaagaaaagaaaagcatctcggcttatgatacatatcattgaaagattaaggtactccagcatcttcaagaaccaataaattacatctcataacgttccacctatgtaattcagtgacggtgaaaaaaaaaagaggcaaaactggcagttttattcaggcatgtagcaagctagctatattcaggaaaaaatcaggcagctgaagaatgaactgaatgtttgctgaatttacagacgtttcggatattgaaattcagtttactcattcagaaaaagtatatggcactgtacacgcttgaggttgtaagatgtagcagcaccaataaataactttgcttgttctaacaatctgtctcgagagtgcacctgaatttaggaatctgtcgctggtaattgcatcataatcgtgattcatgagcctcggttctgaatctgaaaatggttttaattatatatctgttcctgtaatccagtcttgtcaagtccacttttaatacctagtttaaatacttttaagacggcatgattataacataaagcagaattcaggcttaattaacctaactaacgaacaaaacgacgttcttttcatttcaaacaaccccatctaataaaactgtttcagtgagacagaaaatgatgtgagcgatcgatgcataagtcctaacgcccataaggacatgatgaaccaagccgtgctgatcgattgatgcatatatgctctgttcaggagagcacgagattttaagaagttgcatgagtagccagctgtggtaaaaattttaaaaaaaagaagctaactttttaaacctctaacttctaattttttttaattataaaagtattaccaaactgtttaaaaagctcgagattttttagaagaaattttagatgtcagaagctcaaagaaaaaattgtgaattttctttgctcgtcaactgaataatttcgctgcgtgaccggtgacggtttgcgacagtggcctgtgttttcgcatggcacaccattcaatttttcagagaccgaaaggagcaattcaacgacaaaaccacgtggaaataaagaaaccaatggatcgatcgatcgatcggccacactctctctccgttgcagactatgccaaatacagtgatggaataccagttctattatctttttaaaaaactgagaaataagcactgcttttcaccttttaaagaggctaccacacttttctaccgttaatttaggataaaattaagctttgtcataggcgtagaggcgattggtcttgtatattcccagcagtgtgtgcaggtgctattggcgcatgattgtaagctcggaggtgagcttgctgagttttttttacaggtttttttagtttctttctaattgtagtttttagggttttagtcttgtgttttcttctgctatatattgtaacatcgcacaaaattatgagtaataaatctcgacattcttctaaaatcgaggtacgaggcactgcgaacaattttttttttaaaaaaatcccctacataatactttcaccggttaaaaatatttgatgcatgggatataattcaatcaaaatatttaaaaaattgttcatcaactgtacattaaaataaattgtgaaatctaataggtttaaaacactattccttatcaagacaaatatgctcatgccgcattgtttttaggttttaaacaaaccatttgagaaattaccgatggtcatttttttaaaattttaattaaatcttgtcctaaatgaatgttaaataattttgactggaggaagtatggtagttgatggaactgtagtactacctccatattttaatgtatgatgccgttgactttttgtccaacgtttgaccatttgtcatatttaaaaaatttatgtaattatcatttattttattgtgacttgattcgtcatcaaatgttctttaagtatgacataaatatttttatatttgcacaaaaattttaaataaaacgaatggtcaaacgttggttgaaaagtcaacaacgtcatacattaaaatatggagggagtatatactagtaccctttataactcaatggagagaaaaatttgaaatgaaaaaagaataaataagatgttatgggtaatctaaaaaaaatattgtgaatgtgagttcctccgttcttaaaatagtgtagttttaacctaaaaaagtatcataaaagagtgaggttttagagtggcccactagagctctttaataccatttcatatttttcttctttttagtcattaaactaatagtagtaccttttattctctttttttttctccgaaggacgtagtaattttttaacctcatgcttaatactatgtttttactaactaaaactatactattttagaaagatggagggagtagttttgcttagaaatgtctgaagaggttgactacggccaatactgtataaggctacggccaaccatgtgtgaatcatacgttaacagtgcgatcagctgtcgctgtacatacgtaagtgtaggtagtttctggtgctagattgtcgtgtaatgagaagggacatatatgctaatgactgtcctgagagtgtgattagtcggtccagccagtgttaatgacgttaattaataatttaatttgaaatggacggcagcgtcctgaaaatgaggcttgttacatgcgtcactgtttgtgccccctatctgatgtgtcactttatttttaagaacttgatcgacaaaatttctctgaattaatcgactcaaaagtaacagatgaactgaagagttcgtaattcagacattcagtagctgctgtactgactagttcagcttcccttccctggtcagcataaaaatatgagacgtatatagtatctatttttctctctttttattaaaaaaaaattaaagagacacatacctatcacatattttatttaagaatttccaaaaacaccaagaattttttttttgaacggaaagaaaaaaacaccaagaatatttagtttcagaaaattgctggcatccattaattggtgtgtttctgcaatgcgtcggcgcaagttatgagggagaatgttggagaacagtggaatttatatgcagctgtctgagcaacggcatcaactgtgtgtcagtatcggttagcagttcaattccccccccccccccccccttttttcacattaattcgttacaagaattgtaccttgtgccagcttaggagtgctgttgattagtttcagtaaacagttctgatcttgacctcctttattttgggagaataatagttctggactgttggtgatgcatcatctttcatggctgttgatgcacaagttgcaaattgctaatttctagttttgatattttgaaatataagtgaattttcagttttctcttatcattttacgaacgcgcaaaaggattgcacgtcaatgtattagaagggaaaagatgttttgttgcacaacgcaatcagccagacatgcctatgccggaggaagggagaaaagacccaaatagaaaaggaaaaggaaactactgaaaaaaagcttttacgcggtatgatatgggagctaaagttctcaagtttaaatcatgcttgacgcataattaaataaaaataattatatcctatttctattccacgtttgagacttagggaccctctcatgagggggagtggaatataccaagtgattgcccgcttttcgtcattagtttaagttctttattgaactagtcaagtgcatttaacacaatatgatcattgatcattctacgagtcaggatttagcaggtgacatccatcttgatgcagtcaattacaattactgattgcttggtaaatgatttgatagtggacactaactaagaagaatggaaatgatactgagatccagtgatttcatttcacgtaagatccagtgatgcgatcgggatacgttgaaacttgaaagatcttgcctgtaccagtagccaccaagtggaggaaataaaatgagtgatccaaaagggaatcaaagatgaaaatatgagtgatcaagaaacagaatctttaaccggtgccatctatcacgtgtagcattagtagtaggtaaaaggatatattattagaggcaggagagagatatctgaaaaatagtcctccttttacactattcaactctggaatgttaagaaccgaacagttgtcacaaaaattgatgataattattcccaaaaaaaatgatgataattgcgagccctctaaaaatacactggttagtttacatgcttttataaaaataccttttttattggataaatctgaagaaatacttttatttcacagtgtcaataccatacacatgatattcccgaaaacaaaaatattcccgaaaatatcatacacatgaaacagccacattgctaaatcagaccagaaaggatgtacaggaaagggagcactcaggaacagtgcccacagtgggaagaacaaaaaccaaaaaaaggtaaaaattgacctaagctagccacacatattggaatgtaatttggaaacatgccttatccttgtcagtttttcttcactggtaggattgctatgtatcattacactttgtccttgtcatcctcttgcacactcatcatgccctccaattcagagctcacaacgacagtgacccgggttcttgtgtcgggttccagttgtcggtgagcaaacatccccctagcaaacgctcatacggatttttcgtccgcgaacagggtcactgacatgtgggcccttcaccgttctgatacactcggtgaagcatggctgtttagtctgaccaagaatgtgatggaagttttgtagtcttcatgaggtggggatgcaggatctggcaatttgtcatgtacagttgtgataatgagaagtttcatggtgttgatgatggtatatggctggcatgatgatgacctggtgacagttcttctttggtaacactgccaagaacaggtctccatgtctagatcttcagatccactgaaatctgcagttaatggcctagttagcaacaaactgatatcaatggaatggacagtaaactagcagttgatcagtgttaatatgctatactagtcgctgccgacaagagacagacaggattaaataaaaactctcagcatgtgagatttcaagcttacacacattctgaagttattgcagcagtgcaaccgtgtggcttgtcaacttctgcagcagggaggatgactcctattataagttcacatctagctcgaggaaaaatataatcagaagaacagatctggtttcatccaagtggtaagctttttagtagtaccagcaaaagtacactgcaatgagtttacaatgtgcagaagatgaactcctatgcaagaactggaaaccggtacaggacattctactgcgaatcttcagagggtcagaaatacacatggccaaggtggtaaatgggctggtaaatttctgcagctaaaaaacagagaagaaataaaatacttcctccagtgaaaaattacagctctccatcactaacattttctcattttatagtttattttcgtttgtccatagcaaatttagtttacattcttctgtcagccaaagtcttcagtgaatcacggcttcatgtcgctgtacatccttgttcaacatttataagcagagggtttggttgaagagctacagaattgcccatgccaccataatttgtgaatgcatccaaagctttccatatcggaaccatcattttgactggtggatacaccttctgcaaattaagggactccgtcagtcaacggattcctcgtagtgcacttgaaaccaactgaaagcaggaaaaatttaccttaaaaacacgcacgagtttgtcttcgctgtgtagaagcaacactaagctccagtaacatgtaataggggtcacatgctcattcaacactggctttaggagcttgccaacgggcacaaattgacgatgaactcttccactataaaaggtagctttgatgaagagaagataaaagaaaataaatctacgtgctgcagcatatataaaatctaagaaacatgggaagtgtctctgcaatgcctgtattcctgaaaaactttgcatgttcagtacattttctctcaaaaaagagagaagtatttgtagttatttaaattttgaagacttcacttccactaccatgatacccctatctatttgcaattgccaaagtccccttggggtgtcactaaaatttgaataagtaagagtggaacttattgcacccctgtaaaaatccaaattggatcttcatacctccaaaagtgttgttctagctgaacaccaaaggttggcatgatcaacaatgactctgcacaggattaaaatggtatcaatgaggagcacacaattgcacttccatataagcattcctaatcaggatcctgagtaacaagggtatacatctttatccttccttcaggtaaaaaaataactaaacaatcagtgcaaaatgcacaaaatagataatacagacactgcccacctacctttcttcacaggcttatattttaagcattttgcaacggcaaaagcaaatgaaatactccaaaaagaattgatgcatagactctcctgaaacatttgagcacagaaagtcagaaactcattaaagtcacaagcgtatggtgacacctttcttctctttctgaatcttaagtacccaaacaaaatcaacatcatgtgagtatcactgacaaggcatgtatgataagcttgtttttgaagaacctcacatatctattcacatcatgaaaaatgttggcattcagcaatcagcaaataaattttttgggagaatgcagtaggtcactgaaatagtgaagactcagctaccacttgggattatcatccgagagaacaacgacctttaacagcaaggcatgcagtacattcgcaaagaggaaaatttcgccgacataagagaacagcaccctgaatttgctcctcttgatgtagatttcatggatatcgaatcctccctcgcagtgatgtttatacgtgtacacgccactcgacatctctactgctcgattcttcatggtttcaggctttcagaacatcaaaacactcgaagtcccaaccaatggcgttcatttcagaagctttcaatccttgaacgaacctaacaagaacaacacatccgcccaaatgtctagtgaatcccatgatctcctaactgctgatatagagaaaaaaaacgcatcactgcaaattaattgcgcaaatttaatacggggagacacgaaaaaaagaagtctgtatttctacatagcattatcaagtatggtgatgaaacaacatccatgcccacatcaatgcaccccaaccacccaaaatgtacagcaaaggatcgacgtgagcgcgcgtacctgcgaatgaaacgcgagacgggtttggaggagtaaacgcagacccgccgccggcgacggcggcggcggaggaggaggaggacggctgaacgggtaacctaaccacctgcagctgcaggctgggatttctccgtgaattctaacgcgatgcatcgtagccgtccgtttgtagaagtaataaattgagtaaattacagtttggccaatttttattacaatgccaaagtttcactgtgaagtttgaaccaccattccaactaatgtttttattttataaactagataatttaccattgttgtactttaggccaccttacttttttttcgaacgcgtaaaagaattacacgtcaatatattagaagaaaaggagatttgttacacaacgcaatcgagcaggcaggcctatgctagagaggagggaaaaagaaaagggaaaaagaactagtagtgcaaaaagactactccaacatacaagagggagggggcggagcacactacactcctagcaaatccccaaagcagcaatgcccgcagaagaccacagacggccttccgagtgaatgggctcaataagcacagagaccgaggatagtgccgagtcaaaaaccctggagttccactccttccacagttgccaagagactaggaggaccaaggagtcgaagcctaagcgaagatgctcgggtaagcaagccctagaagatggccaccaatcctgaagcgaattgccatggagaggggagagggcagtccatccatgtggcgacaatgcacggtgtcatgtctaccgagtgaacacacgatcgagataagtcacttgactcttttttcaaatacatcaatgatctagattatgtcggtttcttgcatattgataaagttttgaagctttatgtagac

SEQ ID NO: 7311 - DNA, 18151 bp, Oryza sativa
ggcttggatatctttggaatttcattgataggatgaaaatctcttgccgcatgaagcctgacggagtttccgttagccaaagtggcatcaggtacagcatattccaaggaatctgtgtgcttcctatcaggttttgctggaatggaaaattgtgctggctcagttttgctgttccccctacttttcaataaatcaggttcaccttcttttcgcagaccagttgaattttgtatattctctttacaagcagatgctgaagagtggcctaataaattatttggtgaaacctctaaatccgattcacccagaagatttttcgcacgctgaagtgcatcactagaaatagccattgttctgccgccagcagtgctgaacctgatagcttgctcactagaatcagagaacgttgttttagaaaatgcaaaatgctgatgtggatccataagtacttggttttcagctgggccagagcttatagggcagccaccagaaattccactgactgatgctacaccaaactggtgctctgaattttccctctcaacagttatctttgtacctagcttatcacccacatgtcctaaaagttgtgttgaaagggtattctcctccaaacccaacaaagttgcagctcgagaaacaccaactgaagatatatgtacagtccttgcatagcttgtcttgagaggtgaagtaaagatcggaatatatttgtccacattgctaagttgtttgtgattttctgaaaaataatacctcaaatcagaaatttctaaagaaaaaaaatacttatatgttgaaaagtgcataacaaacatcattttcaaatttgctaatactatttgataaactagccatattactacatcataacactacaacaccttattagaattcgcatgctgatcatactcatacatcatgcatttggaaatctgtactcatgtgaatattcatttactaacaatgacataaaagaagttgatacagcttcctcaaaacaactagatacataattctgattgaagagtgcacaacatcggttgctcattgctagttttctcctccagtgaagtgggcttaattttcaaccaaaaggcatagaaatagtactacaaatttcataacaataaccgcccatccatgatttaattattccacaaagaaaccacaggagcacagactagccacctcaacaatcgaacacacattcatgctaaaaatttatgaaataacagcaatctgtgatgatctagcagacactaatcaactcataactaaagctactctacttatccaaacaactgagaaaccccagatttcacaggatcaaagaagatgaattttctatcaagatgataatgcatctttaaatagaaatctgtacagatacaccctacttttactcattttcatggatatgaagtacagagatggcggagaaatgcaaagattggtggaaagatgtgaggtgaaacaagtggtggatctatttctcaaaaaaaaaaaacctcagaatatttccattggcattatacacacctttcttcatattgccttcttcctccagaaccgcccttgccttctgcacggagctgtgactaatcaagactgacttcccagatccagttcgaaacattggtggttcgtttccacggtctatgtattcttagaaaaaaggtgcatgttaatggaacagaaaacaaatatacctggtttgcttttattttttctgaacaaaaatttgaattaactgtgcaaagacacgctaaagcgcaacccagcaattaaaaatttaccttctttcatagagctcccttgctccatgagggtgatcgccttatgacttgagtttctattttggggtgcaaacttctgcattccagcatggagcattggagcaatggcttctccagtgtcattatttactgatatgcacatatgaaatcaatattaaactgagagttagctgtgaaaagctattcataccaactttttttgtgaaggagctatgaattgagaacatttatttaccattttttactggttcctcgccctctaagacaacgtgggctttctttctagaattttcacttgctgtgatagaccttcctgatccagttttgaacattggagtggcacagccatcatctgagtgagcttcatctaacagatgaagaactttttgttaacatgctacatgcctcctttatccttggtagactaataaaaacacatttcaatggcaaaaccacagtaagcaacatgttgagtgaaacctaccttccagttcttttgtaatgttccttggctccagaagtgcacttgctctcttaattgagcctttacttactgaaatggacctccctaacccagtttgaaataatggcaagtgaccatcagcctccaaaaaatttcctgttggatgacagtgattagtatggcaaatatctaaaacgcatcaacagtaaatatttttattgttccaaatttgactagatagtaacacaggtttaaatgaaatgaaaaaaaagccttttacaggaaacttcagaaaaccatgtaccttgcattgaaacacccccctcaggtgtaacagatctatcattcatagtcaggccaccactcatcagaacagacgttggtgtttcagtttgaaaagtagtggtggagacattagtatctccatgtcctgaacccaatagaaaaataagcaaagctgatgaccttgtgcattatgcagtaaaaaaatacaagcctgcacacaaagtttcttaccacttcttttggcacattcttgatctaatactgtccttgccttttgaattgaggtctggctcaccacaacaggcctccctaaccccgtttggaacactaggaattcacggtcagaattcaatttccttcacacagagaagaaatcactaataacaacagctacatttacataactccaatcttaccaatattttcagcacctccatccttcaccacagagctagatctttcactgatcaagactggtcttcgcgaaccagtttggaaaatcagagattggtcaggcctaccaaaatcttccgtgttttctactatgggaggaaagttcattacaaccagaaggcgcacatttctcaataattaggtagaagtatttaactcaaaattaacaagcaggacaatctaatcttatcctcacctgtattattttgctccaggacagccttagctttctggatagatgctacactgaccgatacagctttacctgaaccagtttggaacaatggaaaattttccttgtcatacacatctgccacatctcctgaaagatcagccgttcaaaaagtaaaggcatgattagaattttgtgtaaaattttgctagatgaaattatagaatattctgtcaacagaataaccttgttttggatttgtttgtccctccaaaacagtcattgcattatcagtggagctcctgctgactgggtctggcctaaccaatccagtatggaacatagactgtacagcaatgacagaagaattctcggcatttcctgaataatagattacgaagattcattatcatgatagattgtcgagtgctacacagctcaaactatcctaaattaattagagccaaatatatgtcaccatgcccaaagaaatgaaacattctgcgtaattacacagaaagtaagcagatgacaaacttcctaccttctaaaacagctctagccttctgaattgagcccttgctcagtgaaaccattttacccgatccggtttggaacatcggagacaaactatctttatgtacaccacctgaatttcataagatgcaaaggcgaattataccattgaacctcgagaatgtgtaactaatcagaactttgtacttctacctacagttgaatcatccaacctgatctccaagaagagagattgaaacaaaacttacctttaaatgaaacattactttctcccaatccgcactccaaattagaaccatcaccaaatggttgccctgcaatacatacaagtatcagcctggtatgcaagtcttggagaaagagaacagaaagacattgaattccatgctatcaacaaagcaagaaatgcaaaacttcagaaaagataggcagcaacttttaagaaaaagaaaagtgtgtgggtatcttcatctagtagtagcccgaggaaatcatcacagcaactaaagaggaaagggcatgaccagaagattggaaataattcaaatttattgctccatttttctcttgtttgtttgtaattcagtggactgcaatgacttgttgtcttcgtttcttctaatatatctaagatgtgcggatattatgtgtccccaaaagacaaaaggagggccacaagaccaataaaattgttgtgagaatgtaacactttgaaaaaagcaaaccgcaaaacctcttacttctctcattacttatctcctccgcgacctccccaaccaatgccttggccctctctacagccctctcgctgacggcaactgatccccccaacccagtgcagaacaccgcacctttccctgaatcctcgatcgcttcggccattccatcagcagcaaccagcttatccaaagctgcgatttccacatccacagcaaacaaacatgacacttagtacaatgcagtggcataacaagttcgtaaatgggaggcaagcacgcgcgtgcccgcacacggacgagtggagatgagatgggtggacgaggcggcagtgcggcaccttggttgaagaggtcagccatcgacgggacgctgcatccatcggcggcgccggggcctagggtttcgaggcgaaaggggatcagtaataatgcgggggctcattccacgaacgaatagtacctcgaagagagagagagagagggagagaccgaaccttcgggaatcgcatcgccggatcgcgcctctcccagctccgtcgcagccggctgcggatcgggacgaggaagcggcgcctcactggccgccgccgccgccggtggcggcggcccgtcggaggcgggtacccagacgaggctcccgtcgggcttcccccacacctgccacctcctctgcatcccggcggcacagccagaaatcgctcgcggcggcggcggcggtgagaggatgaggaagagacgagcaaaaaaaagaaaaaaaatggagaggaaaaaattcaaaacgggaggaggcgaggagggaaaggaaagcgcggagcggaaatggcgaagcggctgtcggtgggtgggctgggcccgggtagattcgagacgggccggcccattagcgggggtgggtgacagcccatcaacatccatttggctggacgccgccgccgccgaggaggattgctagggcggcacggcacggcacgacgcgtcgcgtctgttgcgtcagcgtgaacagatcagccaacccgccgactcgtctcctatcaccacctgtaccgaactgccgccacgtagatcagcggccatggtatacacatcaacgctcaacgcaacaaccaggtcaaacgctatatcaacagtccaatttgcaccctccgtattattaggcataactaaaatttaaaattttaaaacctatttttgtgtttatttgattatttatttatcgtagtttattttttatcatttgatttttaagtcatcagtacacacaatatataaatgttgtacacataagttcttttcttgataatgtgttcgctaccagggatgggaactttgcatagtgcgtacggaaaacggggcggcctattagcacgtaattaattaagtatttgctattttttttaaaaaaatagattaatttgattttttaagcaactttcgtatataaactttttgcaaaaaaacacaccatttagcagtttgaaaaacgtgcatataaaaacgagagagatgagatgagaaaaatggcatccgaacacaccctatagtcttataatcaactgtagacgaacgaaacgtaatgattttccctgttacacggaaaatatacaacaccacagatacctattatacgcgcacacagtcacaaaagtatacccttttacacacactcatttttcttttttaaaaaaagaacatactcccttcgttctaaatataagagcttatctagattcataatactgtaaaatgttcaattttagatttaactgcgatgcattcgaagttggaatttttcaaggatgaatcgacagaccatctgtcggtgatatgggaccgggagtatcatgaccagaggcttgaggcagacgcaatcgcccacgtggcctggcaccttcggggacgtcgggcccgagggtgaggtgtccgccctcctcgtgatttcccccgagggggggtcgggttgcgcttgccccggccccgagggccgaggcaccccgaccccttaaagaagtctgcgccacatatatgggataagtgagcacagctgtgctcacctaacagcatttattgcagtctggtcaagcgtgtcacgctgcgtgcaacgcagtacagcacgctcttttatccggtctgtgaccagtcacagaccggtcagatcaacggttaggtggcgactggcggtctgacgcacgcctcgccccgtcccgtcaagacgagtgcctctaggcacacgtctccaaccgaagctagcgtgttacctcttagagatggcacgttagccctggttagatgaataccaggcttcatcctaaccattacaggcaaggtgttacacgaagaagggcaaacatgcacgttgttaatctgacgcgtggtggacaagaatgaccggtctgacactggtcgcgtcagtaacgggcagccacgatctcacgttgcgcccgtctccgccgggagtggaggtaggtgtgggctgtcccatcgaagtgtgattcggacggcaaccataccagtctctgttcataaagagaagaaaagtccagtttggaaaggaaagggtgcatgtggtatccccttgaagtataaaaggaggaccttgcccacagagtagagggttgattcttttccagattaagagcttagaacaggggagaagggggcggacactttgtagctcattcatacacaaattcacaaaaacacaggagtagggtattacgcttcgcagcggcccgaacctgtatacatcgccgtgtctcgtgtgtcttgccggcgagtaatctttccacatacagagagagcttgagattgcaccctaagcccccggccgaaccggcaaaggggggcctgcgcggtctcccggtgaggagccacgagctccgtcatctggcgcgccaggtagggggctcagcgtgtgctttctgagctctcgcactcttccgtgtgcgccaagtttcccttgttctgcctaatggccgagcaagcaaaggcgcacgacctctctccgagtgtgagcggcgacgacggggagccaaatccacgccgtcgagctcgtactcccccacctcctccgcgccgaagccctaagcagggggaggcgcttgagagggtcgacaaatccgcggcgtcaccagtcgcgggtgatgcaggagaacgccgagatggggagcgtcgcctcctcgtctacggcgacggcagcacgcctcagggtgcgcttcaggctgctggcgcgctcctacgacacccgcctgtcgtccacgacccggagtctccagcccaacgatggctggaggacgtggccaacttggtcatgacggcacagcagcgcctgggtgctggtggacggtccgctaccaccaaaacctccggcgccgctaccaccggctccgtgtcgtcaaggcggagggcgcggcgagcggcggcggctgcacgtcattcggctgccactccctcatcgacaccgtcgactcgggaggatcagcatggggagccggatgcccgcctcaacatcgagcgccggcgtaatagccgacgtactccccgtgcaacggagggcgcctcctcgtccagagtgtcacctcgacatggacgtgaggatcagccctccgtgcccccggctggtggtgtcggctgtagatcctttgtggcgagtcttcggaatgtccgttggcccccaaggttccggcccaccatcaccgagaagtacgatgggagcgtcaaccccaccgagtttctccaggtctatacgaccgggatcgaggccgctgggggtgacgacagggtcatggcgaacttctttcccatggccctaaaaggacaggcgcggggttggctaatgaacctgccacccgcgtcggtccactcctgggaggatctgtgccagcagttcactatgaactttcaaggcacatatccgcgcccaggcgaagaagcggacttgcatgcagtacagcgaggcgatgatgagtcgcttcgctcgtacattcagcggttttgccaagtccgcaatactataccatgcatccctgcacacgcggtgatctacgcgttcagggggggcgtgcggcacaaccgcatgctcgaaaagatcgcttccaaagagccccagactaccgcggagctttttcagctcgcggaccgagtggctcgtaaggaggaagcgtggacatggaactccttcggttccggagtggcagcttcggccgcccccggatccgccgctcagactgggcggcgtgacaggaggaggaagaagaggtcggaccgttccggcgacgagggtcatgtcctcgccgtcgagggcgctccgcgggccacccgaaaggggaggcctgcgagcgacaaaaagaaagaggctggtactcccagcaaggagcgccccgccggcaggtggtgctccgtccacaacacctccctccacgatctcgcggactgtcgcgcagtcaaaaatttggctgaacgaacgaggaagtgggaggaggacaggaggcaggaacgccgtgagggcaagtccccggcggttccttccggcaaacggcgaagtgaggccaagcagaaggcccccgctgttgacatcgatgatggtgatgatgacctaggtttccaagaacctggggccaccatcgccaccgtcgatggaggagcgtgtgctcacgtctctcgccggagcttcaaggctatgaagcgagagcttctggccatggcccctactcatgaggcgacgcgtcgggcgcggtggtcggaggtggtcctcacctttgatcagaccgaccacccaccgtgtgttgcccggggagggcagattgcgatggtggtttcccccaccatctgcaacgtgaagttgggacgtgtcctcatagatggaggagcggctctcaacatcctttcccccgcggcctttgatgctatcaaggccccggggatggtgctccagccgtctcaaccgatcatcggtgtgacgccggggcacacgtggccattaggtcacatcgacctaccggtcaccttcggtggacccgccaacttccgcacggagcgggtgagcttcgatgtggcggacctcagtctgccctacaacgcggtcctagggaggcccgcgttggtgaagttcatggcggcggtccactatgcctacctccagatgaagatgccgggccccggtggccccatctctgtccgtggcgaccttaaagtcgcgctcgcttgtatggagcagcgcgcggaccgcctcgctgctgcgtccaagcccgagggtggtgacgagaggcttggcccctctgcccccaccgccccgaggcagcggatggccacatgcgacgaggtcccggtcaaggaggttgccttgggcgacggcccatccaagaccacacggatcggtggtcttctggatggcaaataggaagacgcgctcgtctccttcctgcgggcaaacgctgatgtcttcgcatggagaccagcggacatgcccggggtccccagggaggtgattgagcaccgtctcgccgtgcggccgggcgcaaggccggtccggcagaaagtgcggcggcaggccccggaacgtcaagccttcatccgcgaggaggtggcgaggcttctggaggccggattcatccgtgaagtcatccatccggagtggctggcgaacccggtggtcgttcccaaggcgaacggcaagcttcggatgtgcatcgactacaccgaccttaacaaggcatgtcctaaggatccttaccccctgcctcgcatagatcagatcgtcgactccactgcggggtgcgaccttttgtgttttctagatgcatactctggttatcatcagatttgcatggctagggaggatgaggaaaaaactgcgttcattacccccgtaggaacctattgttatacatcaatgcccttcgggttaaagaatgcaggtcctacttttcagcgtactactcgaatttctttgggtagccaaataggacgtaatgttgaggcgtttgtcgatgacttggttgtaaaaacgcgcaaccaagaaactttactttcagatctagcggaaacctttgagaacctccgctccgcccgcataaagctgaaccccgataagtgtgtgtttggtgtacctgcgggcaagcttctcgggttcttggtctctgcccgaggcattgaggccaaccccgagaagattcgagctatcgagcggatgcgcccccccagcaaacttagggatgtgcaatgcgtcaccggttgcatggccgccctaagtcgtttcatatcaaggctgggagagaaggcgctacccttgtttaagctcctcaggcgttcggggccgttcacttggacggaggaagctgaaaatgccctcgcccagttgaaggcgtatctcagctctcctccggttctagtcgccccggagccaaatgaatccctgctactttacttagcagcgaccccccaagtagttagtgcagcgttggttgtggaacgcgatgaggacaatcctcattctgcgcacccccattctgtgctaacttggcccgggagcaagcagggaggagaggcccccgagtcaaacggtggcctaaggcccctgacgaccggagacggccctctgcccgcttgtcagacggtgctgggtgcccccgaccctcaggaaggccccgaggccactgcgggaaggccgcacttaacgccctttgaccccgaggctaaccctgtgctgactcgacccgggaaagagcagggagaagaggcccccgagccgaacggaggccagaggcccctgacgaccggagttggccctttgcccgcttgtccgacgatgccaggagcccccgacccccaggacggccccgaggccactgagggaaggccgctcctgtcgtcctccgaccccgaggtcatcggcacagaagacgagtgccccccgagaggccacttggacgaagaacgccccgggggtacggcccctagcagagaggatcggccccaccgaagggtgcagcggcctgtctactttgttagtgaggccctccgggacgccaagacccgatacccacaggcccagaagatgctttacgctattctgatggcctcgaggaaactgcgccattatttccaggcgcatcgggtcactgtggttacgtcttaccccctcggtcaaatcttgcataatcgagagggtacaggacgagtggtaaaatgggcaatcgagctttctgagttcgatctgcactttgaaccacgccacgctatcaagagccaggccctcgccgattttgtggcagagtggaccccggctccagagaccgtctcaatgcccgaggccagcacgaacccctcacagctgcctcatgccgcccactgggtgatgcaattcgacggttctctatctcttcagggcgccggtgcaggggtcacgttgacctctctgaacggggacgtcctcagatatttggtccgtctcgactttcgagcgactaacaatatggcagagtacgagggactccttgccggactcagggtggcagctggactggggatccgccgcctcttggtattaggcgactcccagctagtcgttaaccaggtctgtaaggagtaccggtgctctgacccacagatggacgcctacgtacgccaagtgcggcgtatggagcgccatttcgatgggatagaacttcggcatgtacccagaagggataacatgatagccgacgaactctcacggctcgcgtcctcgcgagcccagaccccaccgggcgcctttgaagaaaggctgacccagccgtcggcgcgacccgatcccttaggggagacggatgcgcctgaccggcccccgaggcccgtcggagtccaggcctcgggacccgaagggagcgctccaagctcccttagattgattgcttggatctctgagatccaaacatacctcacagataagactctacctgaggaccgcgaagggagtgaacgcgtacaacgcatttccaaacgctatgtgctggtagaagggaccctctatcggcgcgcggctaacggaatcctcctgaagtgcattcctcaggaacaaggcgttgagcttcttgctgacatccatgagggcgagtgcggagcccattccgcctcgcgcaccctggttggcaaggcctttcgtcaaggattttattggccgacagctctcaatgatgcagtcgatctggtccggcggtgcagagcgtgtcagttccacgccaagcaaatccatcagccggcccaggccctgcagatcataccactgtcatggccatttgctgtctgggggcttgatatcctgggaccgttcagacgggccccgggcgggtttgaatatctgtatgttgcgatcgacaagttcactaagtggcccgaggcttatccggttgtcaagatcgataagcactctgctcttaaattcattaagggcatcacggcccgttttggagtgcctaaccgtattattacggataatggcacccaattcactagtgaactcttcggcgactactgcgaagacatgggcatcaagctctgcttcgcctcacctgcccaccccagaagcaatggccaagtggagcgcgccaatgcagaaatccttaaaggcctcaaaaccaagaccttcaacattctcaagaagcacggcgattcatggatcgaggagttgccagcggtgctctggacgaaccgaaccacaccaagccgagcgaccggggaaacgcctttcttcctcgtctacggcgcagaagcggttctcccatctgagctcaccctgaggtctcctcgggccaccatgtactgcgaggctgatcaagatcagcttcgtagagatgacctcgactacttggaagagcgaaggcggcgcgcggccctccgagctgcgcgctaccagcagagcctgcggcgctaccatcagcgccacgtccgggcccgatcactctgcgtcgacgacctcgtcctacgccgcgtccaaacgcgcgctggattgagcaagctctcaccaatgtgggagggtccgtatcgagtgatcggtgtcccccggccgggctcggtacggctggccacgggcgacggcacggagctgccaaacccgtggaacattgaacaccttcgtcgcttctacccctgaaaggggggggtcgggtgtcaggttttggctcgggccaaccccgcacccccctcgggtgtgcggggttagccgggggctaccacacatgcacatatattcctttcagcatttcaataaaagcagtttcaatttcctaaaggttgtgtctgtgctgttctttccttttgaagaatcttgacttaaaataaggtcactcgtactcaaccttgccctcgggggttcggttcggtcagctaaaatcgccaaacggggcccagaaccgagccgtgccccggggcgtggtgaactccgggggggaatcggcaaaaacccacaatcgggtcacccataaccctcggtcaccacgttcccggcctggccagtctcgacatgtggatctccccaggcactagccccgacccgagccattcgaggaccgggacttgggcgcgagcccttatttcaagctaaggcgcaaaaggaccatggcacagatcatcctcaactcatatgcatagcaaaataaagttaacatagaaaatttttcatcatttttgattgcagattaagttgatctatacacaaaagaggcatgaaggccttagaagaaagaaaaagaaaaaaagtaaagattggcgggggcctgggggctcattcaaatgcacccgggtcgctggcctcgtcgccaccgtcgtcctcgccgctggcgtcgccctcctcgtcggaactgggggcgaacgcgagccgatcggccgagccctcgaagccgttgacgatgtggtcggcagcatccccgacccgcgcgcgcgcgtcatcctcggtcccgggagggaactcctccagcgccatccagggagagaagttggggtcccgggcctggtaactcgctagcacgagttcgaccgccccccgggcgaggtccctcgaggatgccttaatggtcttctcgagctcctcggggagttgctcgagaacccaagccatcctgttgaggtgcggagcgaggccttccagattggtggggggcaccgacgtctggcctccccagagtcccgcttgccgaccggcgcgcttcatgcgggagaccgcatcccaaagcatgtcgggcccaatctcgcccgccaagcgaagggcctcggcctccccggtggaggagtccagcgctcgctgcatctccgcgacggtgtgttcggcagctgcgaggcgggcggctaagccgctttcgcccgcggccgccccgccgataggcgccctcgcgtctagctccttctcccgtgcctcgaggccagcagcccgctgctccagcgcggctctctcggcgcggacgcattcaagattgcggcgcgcctgctcctcctgcgccgcctcgcgaagggataggctgtccgccagccgtttggtcgtagcctcggcctcctcgagagcccgctcccgctcggcgagtgcatcctcgcgaaggcggagcgcggactcctcctcggcgcaggcggcctcgtgcgccgccagcgtcgcctcccggagagcagtggcggcctcgcggtccgtcaagcccctctccacggcgccggcatgttcttccagcgccatggcacgggcctcaagggcctcctcgcgccgccgggacgccgcttcggcttccgttgcccgccgctctcgggcagcggcggagtcgagaaccccttgggcggcgtcgagcttgctcttcagctccgcctcccagcttgcgtgctgaagacggagggtgtcttgcgcctcgaccatcgcggtggtggcgacgagggcggcctctcgctcctcctccacctctcgggcgatctccgccagcgccgccttgcgggcttcgagctccgagatatggcggcggtgagccttacggcccacctccaccatggcgtccaccgagcgccgcccctcctcgacgcgcgcccatgcggcctcgagctccgctcgttccgctcgcaaggcctccacctgggcgctaaatccatctagcaccgcggtgtttgcggcggccaaggcctgcataatgggctcggcgctcaccggggcgacggaagaggaggagaaaagccgccttggagaaaaggcgacgcggcttggccccccggaggatgcgctgggctcggggatgtcccccgggcccgtttggtcctgggcgtcgcccggtgaggtaggcccaggcgatgcgcccgcggcctcgtcgcgagccgcctcggaggatgtcgcctgagggccgcccgagggagtgggcccaagtgacgctgtcgcctcagcctggcgagcccgggcggcctcctcccgggcagcttcttcggcttggcgggcccgggcggcctcctcccgagcagcttcctccgcttggcgaacccgggcggcctcccgggcggcctcttcagcttcccgaaggcgggctgcggcttcacgccggtcagactctcgcctccgctcctctgcggccgctggatcttcggcctcggattggccggacttggggtggcgggaggaatgcgacgggacatctctgaagcagaaggaaaagccagaagacgaacaaagtgagcaagaaaaaacttctttttggagaaagatggttgcaatgagagtgagacgaacctgcgagggggtcggttgaatgaccaccttgggggggaaattaggtttccccgggctggttccgtctcccccatcttgcggagccgcttcttcttgcgctccccctcgggctgagacgtcggcgcggccccctccgggcgccgaccgctggtacgcaccgccccgccccctcggggaggagatgggggaggtgttcctcccagcttcctcttcccttgggcgtcggcagggcggctgctccccgggcccccgacgcgaggcccagaagcacgaccccctcctggggcagattgtttcccccggcggctctcgcccgcgccgtcgtggcccttaggggctctctcctctgaggccccgacccccaacataatggatagaatggagacgcggtcgggatcaatgcagagggggaggatctcctgaggaaggcaagacgcctccgcggagctaaggttcagcaccctttggactacgatcttgaagtcctcaggagcccaatcccatctggctccctggtgggtccgcgtgtagtcttcaggcccagtgtactcccaggcgctccgggcgcgccgttggagcggcgcaatccggcgacggaggtaatcgccgaacaccatggccccggtgagcccctgggatcgcaggcccgccaggcggtcgaggacggcgtcgtactcctcccccagatctaccggcgcccgccagctggagacctgcgccgggggctggcttggaaggcggaggcgcgcttcgtcggcaaggggggtgtagaaccagtcgctcttccagtcgtcccacttcttgcggaggacgcaggggatatagcggttcagcaccggcccccgcggctggaagtagcagccgccaaccaccgacggcggtgacaccgactgcacggtgaagagccaccggaacagctgaagagaggggcgcaccccaatgaacatctcgcacaggtgcgcgaagatggccagtgtcatcaccgcattgggggtgaggtgcgccatctggagatcgtagaactccagaacatccatgaaaaaatgagaaaatggcgggaccagcccagccatcgcgaaggggaggaagaagatggaccgccccgggtagtctggtgccgggcgcccctcgcccagcatcactatctcccgaccggtggcggactccggcatgaagcggcgcggcagtccggcgtgcctctcgttcacgatgcgggaaggcggcagcacactgccgtcgagcagagcagagccccgtgccatggtggtggaggaagagatgattgggaacgagcgtgtgtggcgaaagtagggcgtagcagagaaagagttagagcttaggcagcgaaggcaagaggaacaatggcgaaaggaagggagcaaatccttttctcgatgcttttatacccttgccatcgctgggcctggctcctcgtttctcgcgcccactacttcgctccctcgtatctcgctatctcgctccctcgtatcccgcgcccacgcttccactaatcccattcgcccgtttacggcgcgtgaagtggatatgcggttgtggcaatcgaaacggattgtatcgtgcgcgcgttaattacgctcgccgaccgaagcggcgttaccgtatatccgagcgagacaaatctgctcacccagattcgcgcgctgctcaagtgatgtggcagtcttaaatagaccgcccattatggacaaccaaagttaccaataccaatgtgcatggattgagaccgttgggtattttgcccaactacggagaccggtcccacctgtcaccaggctttaggggtggcgtcacacctgaccgcttcccttgggaagggagattgctctggcataacgccgggggctactgtcggtgatatgggaccgggagtatcatgaccagaggcttgaggcagacgcaatcgcccacgtggcctggcaccttcggggacgtcgggcccgagggtgaggtgtccgccctcctcgtgatttcccccgagggggggtc

SEQ ID NO: 7312 - DNA, 32579 bp, Oryza sativa
cggttcaaagtagtgcaattcagtctagtaaatttgaagggcaccttggatgatggtgaatttgaggcatttgattatgtggtgttcttttatataaaaaaaaagttgggatggctagaaagagctagccatccgatggtattaagatacgagaagccacatatttttccaatccttctttaatccaggtggaatatgagcaggtcgagaggtcaaacctaggtctgctgggcgaaagcaatcaacccataccaaccgagctaggcacggttctcatggtgttcttttatctcgatgaaagatgggacatgtgaaaattttccgtaaaccgacatcacaacggcatctgattggttgagctacaaccgataagtcatagaaaaataaacgaagcaataaaaataatttatgagtaaaacttttatatttgtattattcatgatataagagccaatattggaaaataaactacgatgaaaagccctaaaatctctggttcttcaacagtttcatgtgcaactacattgcttggctcatgtttgacacttcctcacttaatcatatgcctttggtttaatcaacacgatatccattacaggtttataacgaccagtcaagtcccatgttacaggaattacaacagtcgaatgcaacaaatcctcatcccaagtcggagcttacaacttacaagtcacactcaatcaacactgctaatttgccttacaacagctagtaaaattttcaggtatacacggcacaagctacagattctacagaaccattgctctggcctctgggctagaagattgcagagtaagggcctgtttggtacagctccaacttctaaatataactccagaagttgagtttggagtggagttgtggagctgcctaaacccagctccacaactctagtacattttgtgagagagctccacccaactccactcccagttttggtggagctgaaactgtttggctgagctccagctccaggaggggtggagctggagctggagctgtgccaaacagggcctaaatcaactgaaatccacggctgattttaccctgtcttgaattcctgatgcgcttctccttcctccattcccatggtttgtcagggttcggcaaagaccataaaccaatttgactcgcttttgcctgattctcccactgaaaatttatgtctgtcagtaactcgtgtttatgcttgaaaaaaatgttcagagcatggtcttcagtcaagtaaacttgagctgtcaggtgttccatacttagtactggacaatgcattgcttaccctggcaagctccggtcgttgatcataggcaatgtagtgccatgcaagccctttcttcagcatgtgttccttttgaaaaataaagaataagcttaatatatttcgtattcaaaatgtcactaataactctctaaaatcagtgctagaaagcatgtgtcttcttcagcacaggaaattcagaaattttcttgcaggatttagatcaaagcttgtgtctgtagctctgacttatgctcttatcaaaaactctaagcatttcatgatcctgaatacatacatttcgttgtacatggaagaacctcaatgaaacagttgtaaacttgtgatcacaagactagagggcccaaacatttcagtatgctagacctttcggacagaactccagggcccaagcagaccgcaatgtgatttcttacctgcacgaataccccattgcaatcgacatctccaactaatcgactgtaccggtcattgccatacacagaaatcttcagtctctttccctgcaccagcattgttagctcctcctttgcttctctgccataaggcattgaggtctctggtgcatcgatgcctctgcatttcatacatttcattacattatatcagcccagttggaaagaagtacctcactcgaacaagaatccagaagccagataaaccttagcctaatccggtatttcttcatgagaacctgtccacctcttgagtcagtaacttgcctgcactgaaaagtttcagaagtgtcacaggcagaaaccatgtgaagaaaactgaatattgtgctgaattctaagcaaaacaacctaaaccctgcatcaagtatgatcttctgcaattcatcagccctctgataattcttggtcatcagtgcttcggcacggtcagccgctgttctctgaacttcctggggcacattcaaagaccccgggtgatcagctgtgacaacgtgaacagtaatcgtgtcgccgtcagttacagccttagaatccacctgaagaaactagcacacatttttcagacattcaactaccacagcattgctaaaggatatgccaattgcaaagagagtgaggcctcacggggagcgtgtgcagctcatacttaacaccttgaggtttgggcgtcaacgacattatccaattaaatccatggcttgataccttcttctgcaacagcaaagtaaaacgaccaagaaatcgaatttaggacaccaagacattggagtttcttcaccagctgaatctacaacggttccactatcaatcttagacagtataaacaggtcaacaaaaagaaaaatcgacagatttcttcagatatatgtagatctgtaatttcagtgctaatttggaagggaactcagctaatcagtggatttaaacgcgtcaggaactcagcgctcatttctcaatacctgcgggaacagcccgtggcaggcatttccgacgaggacagcagcggctacaaagcagaacagcaccggcgacgtaccgcgccgctccttagctcctcctcctcctcctcctccgccgccgccgccgtgggcatgggcacccctctcgtggcgatgcctgtgagcggcgtacatgccaccaccaagcacccgagcccgtggtgcaccacgccgttccggtccgcagatctggccctggaggaggaggaggccagccagccacccggcgcccaggcggcaagctcttcccgctcgccgccggcgcaggcgagcggaagccgtcgcgaggccgaggcggcgccggcgcggcgggggtcgcgcgtccgtggcgtgcgaaccgagctgggtcggcctgggaccgttactggtggtactgtggcctttcgaatgtgtatcatgggctcatgggctgtatcctttcttgggcctactttttggagattttgttgggcccttaggttctaatgaactcagcacctccgttcataggcttgggcttctatctccctgtctgagctgtctccaattcaggtctgtttatgacaaagtcattggatgtttgttcccttcgttaacagatatactccctccgtattttaatgtatgacgccgttgacttttcgatcagcgtttgaccattcgttttattcaaattttttatgcaaatatgaaaaatatttatgtcatatttaaagaacatttgatgacgaatcaagtcacaataaaataaatgataattacatatttttttgaataagacgaatagtcaaacgttggacaaaaagtcaacggtgtcatacattaaaatatgaaggtagtaattgattatttagcaaaaattaaggttgtaataaaaaagctgagatattatctgttgtacttctagcacatcgaacgagaattaatgataaccgatgaaatgtctgttatagtttctttattctcgagaccccaaaatcccttatatttatagagaaatgaaatggtcaaaatatttgtatgtgtggatggagctagtattctctggctaggggtggatctacagtataagtgtcggtgtcagacaccgacggttttcagcaaaacctatagcaaaactgtttatccatatattataacaccatgatttaagcataattagcatactatggcaccgatagacacgttatgacaccaacgaatcgattttctgtatccgccactgctcccggcaaaaaaaaaaggtacaatatgctgctttaagatttgtgctctttcagagaagggggatagatgattacttatattcagctttatgaagttcctgaacaacattgaattcacttggacatcctctaccagtttcagttttacaacaatgcaattctcaaatacaatacaacacacaaatcacgatatgcacttaatcaattatagtacacacaccaatcaacgccctcttcttccttgacaacccctctgccgatgtactagtgtacacactacacgatctacacttctactgtggtgtaaagcatatattgctccgggctacaagtctgaaagagctaatattataaatcaatcatctgttgttcatggttcatgttcatgctgtaccattgcgcttgtccctcctccattcccatggcttctgtggccttgacgccgcccacaagcccttcctgccagattgcgcctgtttctcccactgatagattgaaaaatcaaaggctctcatttagaaatatgatacagaacaacctgaatgttcatggtgcttttcactcaagtgatctgtgtagctgtatggtttcaatgtaccttggccagctctggtcgttggtcataggcagtatagtgccatgcacatcctttcttcaacatttgctcctgttcagaaagcaagaggcaaattatgtaccttgtgtaagtatggaagaaagataggcttcaggaaaagataaactttttcagtacgtgtcatgtgatgaaatattttcacagttccttgcagaacgcggaagcaaaagttttaaaagaacgaattaactttccttcatattccagttaaacacctgaactttcatgatcctaagtaacactccattaaacaaaactgcagtataacaactgcaagcgaaatggcacatggcgcaaactatcgcagtagtactttctaagcttctcccattggtgcacaatgtgccattgcaattcaacaagaacaaaagtgttctaacgatgaaattgatttcactgcatgattacctgcacaaacaccccatcgcagtagatatctccgacgcatctaccataccggtcctcatcatacacatagaccttcaggctctttccctgcaccattttcagaagcgcctcttttgcctccttgccgtacggcatggcgctctccggcgcatcaatccccctgcattttcatttcatttcatacgaccacctcaaacttgagaagaagaaaaacggcagaatcatttgctcattgatcgagtgatcaagagatagtagcacacagaccttagcctgatcctgtacttctttgcgagcacttcctcgcctctcgcattaggaacttgcctgcattgaaaacttcagaattgtcacacagcctgaaccattaaccatctctgaaaatttaacaaaaaactgattgatcgatgtgaagtgcaagctgatgacctatatcctgcatcagctatcatcttctgcaacccgtcggccttctgataatccctggccgcgcgcgcccttgtccgttccgccgccgctttctgaatttcacggggaacattgccggactcccgaggatcggccgtgtcaatgtacacggtgatcgtgtcgccgtcggccacggcctttgcatcgacctaagaaactagcaggtgcacttgtcagtccaagagcctttcttggcatgaaaaattcagatgatatttgttttttttgcgaggaaaattcagagattagaaagtaataatcagtctcaccgggagagtgtgcagctcaaacttgcaaccttgaggttttgggacgtgtgcagtgtgaggcgcaggggtacttgctgctgcatttggaattggaaggccatagaaaaccaagaatccctggacaagcataaacaggcatgcatcgattgttcagactttcagaattcaagcgcctagaatatgagtatgatgacattggaagtttgaatctttgagatatacctcgacgtctgctttctgatgattcttcagcgtggtgacgacgagccgcgcggcttcctccggcgtcctcggcgtcggcctggctttcttccatgtcactatcagcttcttgtacctacagcaccaggaaattttatcacagtagtactagactactagtgtccagggcttacaaaatcatgcgattatcacgcgatttatcgcgtctaataatcttttcagtttttaaaaccacggtaaacacggtaaacacacggttaccgctaaaccatgaggtgacgataatcctgatcccaaacgatttagtaaaccctgctagtatcatggcagcggtttgaggaaatcctaccgtgcctactggctaatgacaattactgcaagcatttatgactgatttaatttaccgaattctccactgcctgattaagcttcactcaattattgcggttcagtttagtaaagttatctctcgatacccctcgacgtactgaaccacaattccgtcaccaaaatcagcgaatgatatattttgtttcttcttgcttgaaaaagaaaggaaattctcttttccaaaagaaagaaatgaactttgttttttcaaaaaaaaaagaagagttattttcctcttgaacacgtcgctttcaaaattttcacacgcccaatccctcgcgattacgacaaagctcatcggctctgatccatttccagctcgaaacaaggaggaagaaaacataagtaggaggaattgaattacgcaccaattagcctgcgctttcttggaggagactacatgccggctcagcccatccggaaccttaaaaattcaaaacaaaccaaattaaaccccccaagaaaaaaaaatcccatcaccttacgacgccgacgcatcgcaaaatcgaatttcatcagcttcagcctcacgccctcacctgcgaggtggcctcgaactgctggatgtcccggccgagcgccgcgacggcggggtgcgcgccgtgcggctggtactccggcgacggcgagcagaggccgcacaggaacctgtatatgctgttccccatgcccccgacctcgccgccgaaacaatcctctcaccggagaatcgactgtgggtttccgtgcgcgaatccgcttcgggatttgaaaacttttccggtggttttgtatggatctgcgcgaaagaggcagtgtgaaagcggttttagccgtttcggaatcggagctctcttcacgagggaggaaaagctgttaagctgtcgagtcgaagcgagatttgccacgtggagggcggtgattggatccgggcggtgccctggctggacggtccggattcactgtggagcgaatcctgtggctatctatgtgtgcttttgtgttgtgtcaatgtcttgatgctgatgtcgagttaggaattactgaattaggattatgttctaactaatctgtccaggcgtcgacaggaggtttgttcccggcgaattcaggattctttgccttcaattcagggaggaaaaacgaattcaaaatgctttgcttttcttttttttggtgagatttcagaaagtcgtcgtcgttgatgctaggtggcatgcgaacaaagcagttgcgaatggcgatttggacgactgcacacgagccacctcagacgtcagttagcagcagctaagggagcagattatttgatggtgaggattctcgtgatttttaacggtcgcagcgcgtcagttcattccgttactccacggctgcactcaagatgctcaattctcagttcgagcgtgcaaggccttgctggaacctgacggtcgtgcatccgttcacgataaggattctattcacgcgagtgaatgtccgtttgtttattgtatataatctattttttaattttttttaacaaaatagattaatatgtaatatatcacttcacgaccaaattgtaacaaaatagttaacaaattaaactttagctatgtaatatattcaatcaaatttattatttttattataatttgtagaagttgaatttaaatttatatatttgtgaattcctgacaaccttgcattggcaaggattttggatttagcatctgaaagaagaaactgctggaaggcttcacgaagtggctaacacaaagcatggaatttatttatttgttgagagataaaactggaaatattgccgtgactgatctgcctacggactcaggattacttgctcacgattatcaagctgtacaaacttaatctttcctttgccatcatgatgccaggaaaccggacaaggctctcctggtacagcacgagtcgcattgaatcgtcgtcgcccggccagcaatggaggccatcttccggagactgtcggagtccgggtcgtagatgtgggcctcctgcgcagtggtcgcgagaaggagcttcctcctcctcctcttcttcttctctgccatggagagatcgccgtcgtcgtcaaggtacctgagcgcggcgacgagccacggcggaaggaatcgtcggcggcgagagccgagaaggagaggacgccgtgggggcttgtcgaggtagtctgtcctgaaactccagtggaggcacccgtcccgtccgccaacaccgggtgcatgcacatcgctgtcgatgctggcgtcgtcgtcggtgaaaccgaggaacgcgtcatcatggttgccgatggcggccggggccctccagcctcgggcatcgccaacggtgagcacaatggcgtgcaggtgcagtttgcccacctctacgcctaaccgcaccaccttgaactctttggccgtcacgtggaagcccatggcggcggcacagtgaggtcggtgcgaccgcgccagatgcagaatctcacctgtggtggggctgcatacggagtagctagccttcgaatggcctagcgacgagccgacgagagcgaggacacaacagggcttggaggctggagccgatcaccctcagactgtcagacagtcgaagcaattgccaatcgccatgtgcgtaggtgtgcggcggaagcaccggagatcggcgcaggcggcgggcgaattcgcgagaaaatgggagttgagcccccggggggtgtcacgggagactatagttggccataaggcccgaggcccgacggcccggcgcaaggcacgaggttttggcccgacctaagcacggcacaacccaatcgctgtcaggcccgtgccggcacggcccggctgttgggtcatgtctggacctatgcctcagcacggtgggctagcctggcaagtcacgaagtttagagaagtgaaatagacttattttcaaccataggtaagacagggcacaaagaatagagagaacaaatagacatattatatggcacggcccaaagagtagggacgcaaaatagacttattttagctatatatatgtcacagccgaaagagatggagggtaaatagacttatttcaaaaaaaaacacgatgggctgctcgtgccttcgtgccggcctggtggagcacgtgggccagcactgcatgagccgacgtgtaggtcgggtcgtgccggcccgacaaatcttggcccgggcacgacaggacctagggcgggctaggatgggccctatgaaagtaggatcaccgactctatgccaagttctcaaaagtgttttcttatatagaaatcaccagaaaagccccgatcgagcacttgagaaagactaaagcttgaaaggggcttcacttctgggacttcttggctaagaggatgcttgctataagaagtataagtaggcggataacgtttcatttcttccatagaatctcaatatggcgaaaatgaagcaaggcaattaaagctacgagccgggcggcccatttggccatctatacgggagaccgttggtccagctatattagtagggagtgctgtttgggccaaattgaggtggagtctcactttggcacgacccaaagccgcccggggttgcttgttggatcaaatcacgtggctctagggccacgagctcacaaacaacaagctatttgtgggatggaaaaagtctacttcgactcccttaaaagtcggtcaaatctaattcatgccccttaactagaaaaccggataaaatgactccccgaactaatgaaaccagtgtaatttgactcccttagtggttttggaggatgatttcactgacatgacgctgttgattgggtctttgtctcatgcggcattgacgtggcgcttatatggcattaaaattaaaaatactagatgacaccccgcgcgttgctgcgggacattcatgtacacattgctatatatttcaatatatatatatatatatatatatatatatatatatatatatatatatatatatatatatatatatatatatatatatagcagttgtaaatcttagtaaaaaaataactaagtaaatagaaaggaaaaagaaagactcaagtagggttggtcagatgtccagtgcactgccactcaggtagcaagacccacagcgctgaatcttaggcacaatatcttgtaatgtaatggaaaatgatgctagtgatcattgtttttttaccgaatacacgcatatttccatgcctggtcttacattctttaataatcaaattcctctgacattgtaaagataaactaaacagaaaaaaaaaaagaaagcggaggaacttaatttttgcaatccattcgatttctatagacatgtttcatagacagttatttggaagcatgaatatcaaatcaaacaattaaagaataagatttttccaaaaagaagtaaggatagactaactgtgctgatacgtcgagaacacactccgctggagacttgtatatgtcatgaagccagagttatgtgataccctgaatatgaattgaaaaaacaaaatcatttctaccaataatattttcctgcgtgctgtaaggttaaatcaaccatatatttcgccatcaaaaacaaaaataagccaaacattaattccaagacagaaattcatatttcagtgatgtaccgtggtttgaatagaatgagtctacaatctataaagcttgcattcagtccatagaaccaccacacctgcgaccaattaggcaaaagtcataaagaaaaaagattgatcaatctctccattagagcaagtttaatagtatagccaactacaggctccaattcatctatagccaatctaatagctcattcatacaatagttacatactacactattaatatctggttccacctatcatacacacacttcgtcttggaatccgtgctacagctggctacaaatatatagcctgctgcccttctctctcctcatttatctgcttaagatatgtttgcagttggcttatagcctgctattgtacctgctcttactgcagcagcagctccgtcagttcctgaaggcaagacatgttcgctgaggtttcgcaataaagcggtgtgtatgcatccgccgcgggctgcttcagctcccatcgtggtgtttagcaaaaggagatgtaacagatggaaagttaattagcgtgaaaaagatgagcgatttactcagcgtacaaatagctattgtcgtcgattcgtatgccgtgttagatggcagccgttcctctaatacggagatgacgcagcagactattggaagggttccgcatgacctggtgaccactcgtctgcaggggaaggttgaaggactccatgcctcattgcctggtgggctgagaagaatttccaatgctcctaatcgagtgaatgggccacataaaggagcatattggagatgatcagatggttgagaataactccctcgaatgatctaacggttgatttttagtggatgacatggcttcatagaatttgagctttatagcactaaatgatctttagtgggtaccaattatatataggaagaaaggatatttgtgggacccatttatcattcacacaaaaaagatataatgggcaagaggaacaagtccggggaaggggatattcgccggcgccggtaggtctagccatttcccaacattgccctattggtgggtccgcttggggctaaatacacgaacaaattgtgaatatttctgcgaggggatcggtgatgctgcgcgcgcaccgcgctggtctgggtgtgctgcggcggcgcaaccccgttctgggttgcatcctcgtcggcagcggggcgtagggatacggatcttgcgtctgcgtgcctacttgtcggcgtcgacgaggacttggaggaagccggaggaggggtggatgaagctcaacttcgacgggtcttccaagcactcgaccgggatcgcgagcatcagcaccgtgctcaggcgagggctcgagctggcggtgcagaacgggtggcgcctcatttgggcggagggcgactccaaggtgatggtcgacgtggtgcgcgaccgtgccgacatgcagtcggagaaggacctgagactgtgcagggagatcgccacgctgctcccgcaactcgacgacatggccgtgttccacgtgtgccgcggcgggaacaaggtggccgagctcggccacagggtccccacctgggtcgccggggcgtcgtacgttgccctggccgccgtctccatcgtcgttgtgccgctcccgtacccgcagctccagcattgccacgcgcgctgtgccgttgttcgccattggccgaaggggaagagaaagagagagataaggagagaggaaggggaagaagggttggagagagaggatgaccatgtggccccacatgtcagtgggtcccattgtatatttttgtgtgaatgataaatgggtcccacaaatatatttttaattttaatgctatataagcgtcacgtcaataccatgtgggataaagacccaatcaacaccgtcatgtcagcgccacatcagcgaaaccgtactccaaaaccactaaggagtgaaattacactggtttcattagttcagggagttattctatatttctatctggttttttggttaatgggcatgaattagattcggtcgacttttaagagagtcaaagtgaccttttccttgtgggtttgccttgtcgcgcgtgtatgactggtagaatcatcagtagcatgcctttgtgacggcgcctagaaaaactattttagaaatagatcctttttcagctcgggcctcattggcgccgaggtcattaggcttgacagtcgacaccaattacgttggcagcgagactcataccgctgtggcaccataggctcgatgccaatgaggttggttgtttatgtagcactgattctcatcgtatccatgacttatctaccatagagatcgagggtgtagatgacagtatcattagcgtggagacgctaaaacatcggagtcgatgatcgtggcatagagaaaaaaaaaggagcattggcgaaatcaattttcgtaaagactcatttaaaaaaaacattgttaaacaaaagaacaaataaaatgtagtaaaaatcacagtgcaagtgcaacccactcatccgatacaccaccatgtccccaccttggctggaactggaagcctggaaggcgtggtccgccgcgttagaaatccaatccaccactcactccattagtttaaaaaaaaaagccgcgttagaaatccaatctaccactcactccattagtttaaaaaaaaaaagtcgcgttagaaatccaatccaccactcactccattagtttcaaaaaaaaaaaacagagagagagagaagaaaaaccctaaatctcggcaatggaaggcgacgaagagccaccggcggcggcggcgatggcggccgtgctgacggacgatttcctgctccgatccatcctgaagtgtctgtgtccgagggatgtggtccgcgcggcccttgccaacaagagctggcggcgcgcggcggccctcgccgtcccccgcacaccgccgctcgtcggctacctcctgcacccggagaaaatccggtcggcccagatcccccccgtcttcgtccccagcgacgcctcgttcccgcgcctctccctccccttggctcccgacgacctctccggtgtgtccgtgcacgatgtccaccacggcctggtccttctactaccctgcgagcttcccgacattctcctgctccgcatactggtgctcgatccggcatccggacgccgggctctgctccctcctccgccgcgcgacgctctgcccgacgaccagtggcgccaaacccggcgcatcatcggcgccgcggtgctctcgcgcgcgcatcccagtaggctgcacttccaggcggtctgcgtcaccatcgacgacgaccgccctcgcgcctgggtcgccttcgtcaacggcgaggattgcctctggtgcatccttccacgctccaagcatgttagggttcttcgttttgatctcagcatgtgctgtgccgcccacgatcagggacagatctgctggatcgcctccaactccaaccaagtgctcgcactggaaccttcatctttggagtttcagttcataacttcttctccagctgctgtgccggttgatgtatttgcatattttctgtcttggccacctgcatttcttagcctgctcgaggttgttttctcacggttccaacctatttaataatttagatttgtccatgcaacaattgtgtttgctaaactaatttattgttgctaaacttattttaggagaatgatgatgcgctaactgacagcttgatgagtcttattaaaatagtcttctacaatatatgctacgtgagaggattgttttctaaggagttcttctctgatatgccttttctaccgacaggttgaaatcttatttgaatctatacctattcttttgtcacacttgtagcaatgaactgataagtttgtttcttatgacagggatgcagataaaaaagcttacgccgatggatgacgagtcccaaaggcttgttgattggctagaaaaaggtgaaaagtacccgacatagcatgagctccttaaatactttgcttgtccagcatatggttatgcgtgaaaaaacaatttcttatctgtccatttgattaacttttggtatcaaacttaggtgtttatgatgctctgaaaaagaagttcctcaaaactatcatcttctctatctatgatgagaagggccctctgttggaggagtattgccgtaagtttctgctagagtggggctttggcttactaatagcatatcaagctgacatggctaatactatcacacatttacatttcttttgcagtatcattcacatacttcagcgaaattacaatcgacttacggctgacgggatccactcaaagtatatggacaatgaggtccgatgcagctgagagctttgttaatcaaatttggtgagcctcttatacttctactagaacttcatggttcggacaacacgacatgtacagcagtgaaacaggtcctgaatggggcaacatgtgaatgaaatgaaccagattttgaatagggcaaaatgtgaacaaagtgacatgcataacttgaggtgctagagatgaacatcctttttgcagtagaactgaactttcttgatctttcattccatactcaggattataatacaacctagcccagcttcgactggtatttcaatatgcaatcaaaaccaactaactggttgatcagcaaagtaaagccttgtttacatattaaaaatgcatgtgggagtattgtttacataattggttaaggatattcttctagattactatttcacctcaaaaaattcttctagattagtatgaccaaaaggcgcgtgcgagaaaattgtcatgaataaggagacccttctgtatttccagtgacctatgtggctatttcaaagtgaaatgtattatgcctttttgttcaactgaattgagtgaaccatgggtgttttctccagtagtaatattaacctgaaaaatattttatatctatcactgctgaataatttagttcatacactagtagcttccactgaaaagtactctacccatatgctagtacctgcatcctctctattctagttatagttatatatattgatccatcctgaaattctgagctgctacactgatgtactatctctatgcactgacagaaaattgttccatacaactttgttactggaaactaacacaaccttcttttccccctattgtcagcctctggactatgaacctcctttttttgagagttatgatgatatgagaaaacgttgtccgctcccactacatactactttatcagattactcacaaggtaattgtatgagtcattttaaactagttctgaacattggtctctatagccctgagtaaatgtctttttgtgctcattattcagatttgatcagtttacatgatgtaaaatcagtgctctccaacaatccctttcattccaacaaggtgataatttatctctatttatattcttatgttcaatgcatgcacctttcaatttcttttcgcctgaacaacctctgccgtctcattttaattaggtttttgcaatggacccaaaaagcaaaatccaacaagggcaccttttttgcattactaagaaagatgtccacttctattttgattctggtgctagccaccacatgtgtgatgatgataaactcttcaaaaatctccatgaggttcctactgaacatcaggatactgtttatgatgctagtggcgacccagtgtgcctgcacatgtccggtgaagtgatatatgatcaaatcaaattgagtccagtattctaccactctactctcaaatttaaagttatatctcttggtgaactggatgattctaacaccctcatgtatgttggagataaaaggattaaaatctttgatgtaaataaaggtgaaatgatcggcgagggatatctccacgaaaagagaaatgaatatatagttcgaagcatcatatgcagaaaagaagaacaacaagctataaccagatcgatgttgtcctcaacggcaattgatgaggttagttctaggcttctagcccttctatccatacctggtaacttcctctcataatttgtctttacttgcagaaaaatttgtgggtagttgattctctatgctgcaatcacatgactggtataaagggacttctatctgatacaagacacgaggtacagtcatttgttacccccagaggtgcatttttaagctcaaaaattggaaatgtgaagactagtacagtaacactgtttaatgtgttgtactgtaagggactgaggtatgttcattacaattgaatcgtatgttgaaaatgttctcatccaataacgtatgggttgcaactgtttactaatccaatttaatgctttcttctatgcaaaaacagacagaatctcatatccgaaggtcaattagaccgtgacggctattcatgtacaaggcttgctcacaaatgcaagattcagtggagagggactcaagaagtgttggtctagctcatcaggacgagaatgcactgtattacgtggattattttcactatgtcagcgacccatctttgaagcatacgaggaatgatggagaatgcatacagaagttgaagcgtccgcggcaagatggatcctctccatctagtaggaaaaggactgcgtaaactggatagatgtgttcattttgtcttttgtaaacatgagaagaataccacccaacatacgaagatttgatgtgctctgttgtttcaacatttttaaacctcgttcttacagatgatggttgcatgctagtaatacccaggaaaatgctttttccatttgatttacattggctcgcgttagtatagccctcaaaaaaatctaaggataaagtttctttatagatctgcattaaggtttttatatgtattgctactggactgtcgagatggtccggattttaccgtgaccgaaaacaagggagcttcctttgaggcataatttgttgaggcgcgtccaatgtaatactgaattttaacacattttggtaaataccaaatgttgttggtgttgagatgcatttggtttacaactttgcaaccttaccagatcttactatattttgccaatagtaaagggtctaatctctggcatttccaccattctacctttcctataattcccatgtgtagttttatgcggccgagtagcaatagaaactaatttaaaaatataatattcatttactagcaaatatgcccgtgcgttgcaccgggtgaatatcaaacaaatatggatggttaagattacttgtgtacttataacacgtgcacaaaaatattgaatttgtacataccttgcaaatatctccaagttttatacatggaaatatcaaaacatatctcatactgtatacatatttagattcaggtcgtatctcaaattttataatacatgcgtgagatattccaaattttctacacattcagaacatattccaactttcacaaaatttcataaacaggggcagttatagctctgatttcaccatgctctacaaaaggaaaaaggtaaaggcatctgcaatgggaaagaaacacactttgtagtatcaaaataaaattcactaaaaaatctttagtggaatatgtgcgaattttgacatgaaaccatattaacgttggtcaaatacaatatcatatgattaatactttctagataatttttttgttggtttcatttatctaaaaataatctatgagtgattaaataattgatcgtaatttcccagtaattttaaatggcttaaaatagtagcaaacaaatttatgtaaatataaaaaataattaaatcagttgcttagaaaaataaactgattttggcctagcattgtggtttagggatgaatttcaaattcggggacaacttgcgggaccaaatttgaacttatctgtgcggagtgtatacatggcccatgaggtggcccaattatgtggcgacctgggaacggcaacccgacgcgggagaagccgcaaccgttcgatctgatcaacagtcccgattgatccggacatatatataaagtcggcagcccaaaccctaaccctaaaatcatttcccctcccccctctctctctcaaaacgacggcgtcagcggcgcctctccccctccgccgctccccctctccctcccgtttcgctagcatggcacgatgttggcgagtgctcgacgcaatgcagcgaggtgagggtacgacgaccatccttccatttcccctctccccgtcggcctcgatggtggggctacgagcctacggcgcagagacggcggcgacggctgtccttctctctttctcctctgtttccgagcaggaggagagcgctggagggtggggccccggggtagagggagggggtgccagcgcaattggggatgtggtgaatgtggccgtgcccggctggccaggctatgacaggagcgcggtcgacggcaatggtgacgagctcggaacaactggatccgacgggaaactcgctcatttgtgtgattttttccctttttctagggttctcaatctgtgtaactgtccgattggatgattcttattcttttagattctccgtgtagttctattcgataggatgacttttttcaggttctcagtccggtgtagttctgttcgataggatgacttttttcaggttctcagtctgtgtagatctttgatttgattttgtgctttatccatagtacatgattggtatatagatgatgaggacatcacttcatcggatacgctcataacttcacacgttacaatgataattccaagtccaagtccagttcggccttcggagacagtactgacttcaaacggacctagcgccttcatgccaactctgatttgggtgatcttggacttcgtggaaagcttatctcgctaccttcaaacgcatccggtctcatatccaaattcatctcgagtaaacgggaatagccaaaacaagacagtgctgttgctgaaaccgaacttgggccttgggccttgtaatagactaggcccatctcataagtgtctccctccacctccacgaattagcacttaaccctagctttattttcctctataaatagctttctacatcctcaaaaacttttgggttttgtttagttgaattttgccaagtgccattcaccttgtctctagtcctcgttcgattagtcggcgactattgattcagagcccccaatagttggtgtgttgatttgccgggtcgattagatctaccacttcaatcgcaactatttctttgtgcttaattacctattcgcaatatttagattgcatcttatcttgttcttgcagtgttctctcgtttgcattgcagggatcatcaaccgcgcgtcacggttggtacgacatcgtttgtggtgtaccgattgcacggcatcctggacttgttctggttggtagccacgtcgtaaatgtcacactcgatcaaaacgagagttatcccctcaccagaagatcgggccacaagagagagcgtcatcagattgattaacttgtaatgcttgtattgaacttggtactactgtaccttttctttaaattgtgacattgtctttgcttgtgggatatggttgaactgatatttggacatgtaaacgggcatgcccgcgggcatatggcgtccgcgggcgacgggcatgggaagtactcatttcccgtcatgtagtaacgggcatgctcgcgagcataaattacctcgcgggcacgggcatgggtagtcaccacccgtgcctgtcgtgcccgactgccatccctacacataacttaccctaaccaatgcatttcaacccaaatcccccaaaatatccctaaatcagctagggtctcgacggtgaggttagcggaaggaggccgagaggtagcggttgtagcggcctcggcggtgagattagcggcaggaggcagcgcagtgcagcggggttagcggtggtacagtgcggctgaattagcggcgggagccagtgcaatggcaattgctaatcgggactgcattttctatacatgcaaggagaaaaatgagagggaagaacgatttgaggatttttttttttgggattctggtgttactatatagctacaaggagatatatgcgacgtgttgtgatgtggagggggttgagagcaaaagtgttacctacgtggcatgccacgttggcggtcaaatgcaatcaaaggacgtttggaccaaggtggtacattaaaccaagttcacggatctaaacgtgcaatttttaagttcacggacctaaggccctgtttgtttcagcttaagattattgtaatctagattatcgagccaggttactataagctagattataataagccgacataaaataagttgttagctgtttgtttctctggattattagttgcttgttagctattagccacccaataatctaaaaaggcacctttagagtagattaccatattacattaatctggcttatagattgtaataatctgttataataagatatctgtttgttttagcttacatctaataatccagattataataatcctaagctgaatcaaacagggcctaagtgacaccaccacacaagtttaggggccggccatgtatttcactcaaaaggttttatgctactagaatgttgctgagtacatagattcctattttctttcaaggaagagcgaggctggtttgaactattaatttactgaatcgagtgaagctgtgttgcgtaacaagactataggttgccaaggcctataagtacaagtggtcgctctaatggtcactctcaaacttactacttgagtgactttcgtcacttagcttctttaatagggttcaaacaatataagaattcacaatatgaagaaaaagtcaatgaaaaagtttataaattaaagcattatgattgctataaacattataattgaaaattttaatgaaaaatcttcattgttttggactgaaaaggaaggaaaaatgggtttttacccataaactaatgaaaatattagtcctcaacccgtttctctttgacccagcccataagtgaagccacggtatcagttcgaacaaccctcttcaacctccggctgaatctttctcgatctccttaaattggttgacaaatcgacgtggagacagctgcggtagagtttggcccggcagcgaaccgtgtgaactaaaaaacagcgaaaaaggaaagaaaaaaagacagaccaaaaatgcgtacgatacgaaagctttacttatttattaattcggtacggatatatatatatatatatatatatatatatatatatatatatatatatatatatatatatatatatatatatatatagatagatagatagatagatagatagatagatagatcagttcgcctgcaccgatcgatctccatatcccgcgtgcgtcgcgtacgtcctgctgcttcgtccgccgccgccgccggcgtacgcgtacgcgcgcacatatatagatcgatccgtttgtgggtgtgacatacagtacgtacagcaacgcgatggcgagcccgcgaaccaagaaaaggaagacgggcgatgagcggtcggcggcgtgtggcgtcacggtcacgctgcccgaccacgtcgtgacggaggtgctcgtgcgcctgccggcgaggtctctcgcgaggctccgctgcacctgccgctcctggaacgccgaggtgtcgttgcccggcttccaagacagacaccacgctctcgccgccgccaagttaaccttcctggagcctgcacctacgcacatggggtcgtaccgaataagaagaaggctcagtaggcggactttgccgtggctcagcaattgcttcgactgtccgagagtgatcggctccaagccctgctggggcctcgtcctcattgccaggccgtgcgaaggctactccgtgtgcaaccctaccacaggtgagattctgcatcttccccggtcgcaccgacctcactgtgccactgtcatgggcttccacgcgccggccagagagttcaaggtggtgcagttaggcatagacgaagaggtagtgggcaaactgcacgccattgtgctcaccgttggcgacgcccgaggctggagggccatctcgtcgttccagctcggcctcggtttcaccgacgacgccgccagcatcgaccgcgatgtgcagccggtgttcgcggatgggtgcctccactggagtttcaggacaaactacctcgacaagccccacggcgtcctctctttctcgctcgccgacgagtccttccgccgtgttccccagccgcctttctcaatggtcgacctcgttccggtccacttgaacggagtcagaaactaccgtctgttgcgagccaaaggcataaggtccgggagcggcgaggaagtggccatgccggttgggaaaacgctcgcggagctcgacggccgcctgtgcatggtacgcgacgtccgccaccgcagcgaccacgacgtgctgttggagatatggaagctgcaggactacgacaccgggagctggtcgctggactaccgcgtcgacctgccagcgccgggccagcgccagcgccagctgctcacggcaccgtggctcgtcgtcccgctcacctaccttggtggctccccgccgggagacaagaagaggaagcttcttgtcgcgaccacggcgcacgaggctcatgtctacgacccggactccggcactctccggacggtggcctccattgacagctcgggggacggggacgacgattcaatacgtctcttgctgtaccaggagagccttgttcggcttcctggcatgcagcatggcctaggaaatattaagtttgtacaactttccaatagtgagcatatgtaatcctgagctcgtagctaggcagagtgaatacttaatatatttgcatccaccgcgtccagagttaatcaagtgtggccagttttatctctcaacaaacaaatatatccttaatcgattttgctatatctcactcgaaagattttttcttatctctcactcgattttctcactcaaatttacagtgcattttcttgtaagttacagtgtaatttataaaacttacactgtaacttttgtaagttacactgtaatttttgaatttttgcatgtaaattttaaattttgtattggatttggtctttttcttgaggatatggtaatttagtgtccattatggtgtttcttaattgctttttgctttttattatatctatcggattttaatctaaagattaaaaatctgtgtgatacgatcataaaaatctttcgaaagatgtataggtactcccatccttaattgctacaggattgtacgtgttagccactttgtggagccttcgatcagtttcttttttagataaagtccaaaatcgttgccaacgcaagggtgcgaggaattcacaaatatatcacttaacaaaaaattcggcttctaaaaattataaattatcaacaaatttgattgtggataaattacatagttatagtttgatttgttaatcaatttgtagaaatcaaatttaaacttgttattgtatcgtgaagtgatatatttattacatactagtgaacgtgcacgtacaaagcacattgatacatagaattgttgatcatttactgatacattatctctttttttcccctccaaaaattgtatgttccaggcgtaaaaatgcacactttgaaaggaactttagtggaagtgtcaggtttcaggtcaacaagcatttttaggactccattcaggatattgccccttgggggaacaaaaataacatacaataagagaaagtgcaaagcataatttgtggcttttatcagctgaaaaccagcatagctaatagttggcacttaattaataaaggttgttctcttgttcacatattagaagacaaaaataacgaatctaggaaagcatttccccccattttgatttaggcagcaactgaaggttacatctgggagggggagggcgccggccgtctcgcccgccacgctgtgccactcccgccgcgccaggccggcaccccgccgccgcgccccttgccagagcgccatcccgtgcgcgcggccgcgccaggctggcaccccgccgcgcgccatgcccgcccctccccctctggcgtggagaatcgagaagaaaggggagaagagaacagagaaggagataagaaagagagagaaagaggaagagaagaagggaaagaaaaggaagaggacacttacagttgggacccaccttctttaatccaatgaaaaactttgaatcgaattttatcgtagtaaatgaactcatatgaaaaagttgtcaaaaacaaagttgcagaattcattgacatctaccatttttattttggtaatttttccatccgagttttattgaactatagaaaatttgaattttaaaatatatgaaattgaaataattttttgggtagtaaatgttttcaaatgaaaaaaactgtcaacaccaaatttgtaaaacgcatcaagatctacaacttttgtttgggtcatttttctatgtgactttgtttaaacagtttgaatttgaatttcaaaatatgataccttcaaacaacattttcaaatactaaatgatttcaactgaaaaagtcatcaataaaaaagttgtataactcatcaagatctataacttttatttttgtcatttcttcatccgacaaagcgatagttacattttttacaaaatttacatatctcacatatggtttcataagttataagagagatatgtaaattttgtgaacaatgttactattgctttgtcagatgaagaaatgatcaaaataaaagttgtagctcttgatgagttctacaacttttatgttcatgactttttcagctgaaattatttaccgcttcaaaatattatttgaagttgtcatttttttgaaatccaaaattttaattgataaaacaaagtcacaagaaaaatatggccaaaataatagcagtaagaacacaataacacaatagagcatgattttacaaacgtttaggaaaaagaatcatccaatttggagttcatatgagtgcgataaactagtcttaaggagctgcatgagaaaattaaggtcgatttttgcatacaccgtcaccctcaaccacaaaattggatatagcaaaattattaacactaaaatttggaaatgttgatatgttctattagaaaaaataatgaattatatttcttcgttgatttgtgatgcttagtttgaggggtttttatgttccgattaatattcgtcaccgtattcgtttcgtttcgtattcgctccgtatctgtattcgacaatattcgattccgtttttgtatccggggtttccgattccgattccgaaaaaaatgtgaaaatgaatatggtagagctagtttccgtccgtatccgatccgttttcatccctagctgctaagagatctctaagagcaagtttaatagtatagcccactactagctttaatttatctatagttaatttaatagtcaattcatacaatagttgtttactatactattaatatatggtcccacctgtcatacacatattgtgttttggagtctgcgactacagatatgtaacccactacttttctctctcatcttttatcttattaaaatatgtttacagctcactaatagtctactattgtacctgcttgaggatctgaatgaaactcaacgcaagttgagcgatataaactgaactttatcccctgcgaaaatcagaccgctacaagtctacaactggtagcggttcaaactgggcccttcaaaggtatagtaggcccagaaattaacttggaccgcaggaatcaggatcaatcgagcgtgaggacgacgatcagatgcagagctcgcgtgatttccaaggagtattcatgaattagttcccaaatcattgccgggaatctcagcgtccatcgatctagcattgcctgctgccgtggtatcatcgaaaccgatgggtctcgttgctgtttatctgaacttctttttttttttcatgtacaaaagaaaaaaaaaagagggccggggttgggggggggggatccaacatgacacacaacctcacttcatgagttgagttcatatatatatataacttgcaagtggtttaattttcatttaatttcgcatcaatcagagctgccgacttgtttaattttgtatgaacaagttcgttcgctttggtaaacccaaatgaactttaaaaagaagttgcaaaatgttgttcgaagatacaagaagatagaatggaagtcgctttgtgcttcgaaaattatacacagttgttgatttcagaatgtaaaatcggcacatcactaacacaaaaggtgaataaaaatatttaccgggcaccagaggaaatttacacaccaggcaaaaaaaccactgtgaattcagagaagaaaaagaaattaagctaggcgctagctcagggatcctcggtgatgcacgagaggtgcggctgccacggcgaggcatggctgccggtgctcatgcgccgccggtgttggtgctgctgcttctgcgccctcatcatcctcgtcgtctccggcgacgcgctgccggccgggctgcccaaccgatcggcggcgacggcgctgccctccgacttgctgcggacgtggtgcccgcggccggcgccgccgccgccggtgctcgtcctcctcttggcgtcggggacggaggcggcggggatgaggaagtagatctcgccgcgctccagctccgactccggcgacacgatgagtatccgccccgccgccccctgctgcgacgagcacggccggctcagaacgtggttggggtgcgccgccagcacctcgccggcggacacggcgcggccgtactcgtcgacgcggccgctgaggtgcacgatccggaccaggtccagcgcgccgcacggcagcacgcacgccaggcagcatctcaggttgttccccatttcttcttcgctcctcggtcgaacacttggcgatcgagctaacccaccacctacctactagcttagcttctcttctcttctcttcactgtgttgagctcggtgaggttggccatggattgtatatataggagaggacaaaatgacaaattaaggacttgtttagttcgcgaaaagaaaatttttaggtgtcacatcggacatttaaccggatatcgaaagatgttttcggacacgaatgaaaaaactaatttcataactcgcttggaaactgcgaaacgaatttattaagcctaattaatccatcattagcacatgtgggttactgtaaaacttatgactaattatggactaattagactcaaaagattcgtctcgcgatttccatgcaaactgtacaattaattgtttattttatctatatttaatgctctatatacttgtccaaagattcgatgtgatgtttttgtgggaaaaaatttgggaactaaacacgcctaaaagaagcaaaagagagagagatagatagagagagagagagagagacttaacaccattaacagtagggttttcatcacttcaccgtttggtgagatcacctcatctcacctcactactactcatcagtcatgtgtgccatgaccttatctagatcctaaacaacaattaggtttgtctaatcatggagagatgctgggttctactaagtactaacccatgttctaatgtttttttccttttttcaagattagcagctagtgccttaattagttaattgtgctgtgtttttttctttttttttcttctgctggctgcaatgattcgagcatcatggacacagccatgctgccttgctgtaccttggttgtatgctaatatgctatgccatgctaccctctgatgagtgtgcttccattgcatgcatgcatgcatgcatgagtgctgcaagctagctagccgattatactacgagtgtgaatgctcaattggatatataggagtttaggtagcatggatttgtttaagggcctccattgattagttgtttggtgccttcatctatataagttaattaacatatgaacctggccgtgcaacatcttaattttttttcgtagtagaattaaggtgaatatggaacagaccatatgctagcctacaagctaagaaagctatagtgttgttacttctgatggattgtatatataatggctacctagctttttgagacgatgattagttagtatgttaattcgacgtgctaccatacgctgaactaatcgagtgattagtcgagctgaacgcaacgacaagccaagctgtgacaaaaattattgtgcaggtagagtagtagctctctggcttagatcatcagtgcggtcaacgcattgcacgcgttgatgcttgttgccaccgtgtttcagctagattgcgttgcatgacaagtttgcattgctcgatcgctagctttacaatttagctcgacagatcgaccacagccgacgacctgcataattgttccatccatgcaagtagaggcagggcgaattaagctaggagaactattatggctcaacttcatatataaatgtatgacaccccttactactaggtataaattaatataatcttggtatttataaatatggttgtgtacatctaagtttgtgcgcaaaaaagaattacttaaaaatggactatacatgattaaaaaaactttttgaaatggaaagtattcatatattagaatatgtgtatatataaatacagtgaattttattgtaaaaaataaggtgttccacatgctgcctttcctgcgtaggaactgagcttttatgcggcacggaaaccaaagcaagcaattgacctataattaattaattattaactattataaacttaaaaaatgttcattcattttttttaaaaaaacttttatataaactttttaaaaattatatcgtttaattaacagtttggaaatatgctaacggaaaataaatgagagttaatgtttacaatatactacccctctgtttcaggttataagacgttttaactttggttaaagtcaaattgctttaagtttaactaaatttgtagaaaaaagtagtaacattttcaacccaaaacaaagttattatgaaatatatttaattatttatttgatgaaattaatttagtattataaatactactatacttgtttataaacttagtcaaacttataaccttaaacggaaggagtagaacggaatctaattatagtattgttatggctactcatgtggatccactgcgagtagattcctagctcgatcgcggcattactgtgtttgagctgtgcgagagatcgatcggcaagttgcgagtttaaaacatgctcgtgtacgcgcgtacgaagaacggtacgttcgtaggcacggccacgcacgtacgtttgtccacacgtgggaaggaaaacaccgtgcccgatcggatccgtcgcgccacggactgacacgtgtgcgtcacgtgggcccggggtccacgtgggcgccttccctgtccatcgcggtgggtgcaccaaacatgtgttttcccatttcctactttaagattcggactccaaccgttagctgtgcatgacgtagctgattagtaaattcgagagtttttgatacgtagactcactgggccgccattagacgttagtgaaatccgagcccagacttgtgcagttttgtttcttaagatcactttgactccctcaactgacgaccgaatctaaatcgtatccctcaaccgcaatgccagaaatctcgacccccgaacttgtaaatccagtgcaatttgactcccttgccggttttgggaggtggtttcgctgacgtggcgccacgtggcgcttatgtggcgatattgaccgagtctttggtccacgtgtcgttgacgtggcacttacgtggcaatagaattaaaaaatatgcgtgggacccattagtcattggcacaaaaagaaatgtgggcccactgacatgtggggcccacatgtcagacctcttcctcctccctatctcccttctctctctttctctccccttcttcccattcggccgatgggcaggaaggcggcgagagcgagctggcggcatcggggcgtatcggaaccgaaccgggggcggcggttggcggctaggacggcggcggctcggccgcggtggctcacggcagacggaaacggcgacagcgggagggaagtggggatggaggcggcgaggagggagttggccggccaacacgttgtcgccgccgccgccgccgttgtccttccggccgttgctcttccgcgaggccgtccccaacgagccgccgctccagccgtcctcccccgttccagcgccatggcaagcgacgaaaaccggcggcgcggcgcccccacccgaagctgccgacgacgatgaggccgagcggtgcggagtcgtcggcgccgccgctcccatccgcagccgcgctcgcctgctgctgccgctgcctctcgccatcgcgctcgcccaactcccttgccgccgtcggcctactcccgcctgttgccgtccactcctcaaccgcgtctccgctgcttccatagccaccgccgcagcgggctcgccttcgccgccacgtgtcgtcttacctcacgcggctgtcgccgtgctccgggagccccgccatgggcgtcgtcctgctcgtgtgcgtccatggccgccgccgctccggttacgctgcgccccgatgccgccgccgctctcttcgtccgtgcgccgtcgcgatcatcagtggaccccagcggtgcgccgccgcctccccaccgaggccgagccgggccggccgctcgctctcgccgccctcccgcccgccgccgaatgggaagaaggggagagattgagagaaagagagagaagggagatagggaggaggaagaggacagacatgtgggccccacatgtcagtggcccacatttctttttgtgccaatgactaatgggtcccacgcatattttttaatcctactgccacgtaagtgccacatcaacgccacgtggaccgaagactcggtcaatatcgccacataggcgccacgtcggcgaaaccacctcccaaaaccggcgagggagtcaaattgcaccggttttgcaagttcgggggtcaagatttctggtattgaggttgggggatacgatttagattccgtggtcagttgagggagtcaaagtgatcttattccccagcaagaagtgagtgtcattgccacgcgatttcaaaacaggcccaggaacagaattgtcattcccgtgataactgaagatttcgtcagctcagttgtgcctttccgggagctgtaaggcggtgttcttttctcaagaaaaaaaattaagtgttttattcaaaataagttggtatttacgtatgattaattgagttttaatcattacaaactaacaaaaatagattaatttggtattttatagtaactttcatatagaaagttttcatacgaaacgtaccgtttgactgtttggaaagtgtgtcacaagtattcaaaattttatccaatttttattggagaaaag

SEQ ID NO: 7313 - DNA, 108773 bp, Oryza sativa
  unsure (1)..(108773): unsure at all n locations
ctaaagatatcggggggcctgacaaggcctgacagatttagaaccgggactaaagatcatttttagtcccggttggtaacaccaaccgagactaaagatcaaatatgcccgctgtagccaccaaccgggactaaatatcatctttagtcccggtttttagtggaaccgagactattgtggatttcgggcgaccgaccaaagatggtttctccaccagtggacgcggcgatgggcggggtggcgaccggcacgggggcagtggccaggggcctcgccgggggagcggacgacgacgatgcaggcgtagcccggctagccagctccgagacgaggcgctcaacgaatggtgctacgacagtctcctcatcgagcccccgtggcttggtgctgcgaatcaccttgcgcaggcacgatgggctcgtcggcctcactgcccacgccgccaccgcagcgcggccatgtcacccatcgccgcgagatcgacgagatgatggcaatgacacctcttgccgcatctatggtggtggagagagaggaaggggaaagagaagagaggggagggaggtggggcccatgtgcagttgcggggtaacggggatttttgtcggaaaatatgatggagtggcatggttccaatttctccaattttcagtggtacatagccaatatgctgaatagtagtggcattttttcgaattggcatatttccagtggcatggatctaattaaccctttattttaagatgttttagtggatatagctagcattgcgctatataaaatacaattgtatctataaaaaatggttgagtgtataaatattttaaaataaattttaatctagcccgcgcaatattacatggaaaatctgccttagttcggttaactcaaaagaatgaactgtcttggttaaagtgttccctaacttatagttttgatgaattttgatgaatgtttgcccatgcatgcaggaaaaattccacaattgttgttcactctttcggggctgaaatatgttgaagttattggaaaccagctatctggttctctagaagacatcccttctcctttaacttcatctttgtcatcaattgacttaagcgacaatcaactatcgggcccgatacccaaatcatttttccagcttacaaatcttaattatctcaatcttggatcgaataaattcataggctcggttgaacttagctctgtctggaagctgaagaatcttgatttcttaagcctgtcaaacaatttgatatcactcatagatgatgaaggtgaaacagtgtccccttctcttccaaacattagatacttacacctggcatcttgcaaacttacaaaaattccaggcacactaagatatcttgatgcgatttcggaccttgacctttcaagtaaccaaattaccggggcaataccaaggtggatatgggagaatcgaacgtaccagctcaatagtctgaatctctcgcacaacatgtttactactgtggagcagtctccttctcttgttaatatcgcatatttaacttatcttgacctcagtttcaatagacttcaaggaatcataccaataccagtaaccacatccagtgagatcgcattggactactcaaacaaccacttctcttcaatagtaccgaactttggcatatatcttgaaaacgccagctatattaatttctccaataataaactaagtggcaatgtaccatcttcgatttgtaatgcaagcaaagccattatcacggacttatctggcaacaactacagtggatcagtaccagcatgtcttacaggaagtgtaaacttaagcgtattgaaattgagagacaaccaattccatggggtgttacctaacaatagtagagaggggtgcaatcttcagtcaatagatgtgaatggaaaccaaattgaaggtaaactacctagatcactatcatactgccaagatttggagctcctggatgctggaaataatcagattgttgattcttttccattttggttgggtaaacttccaaatctccgagtccttgtcttaagatccaacaaaataaatggtacaataaggggtcttaaaagtggttaccaaaatagtgattatttcacaaggttgcaaataattgatttggcctccaatcatttatctggcaacatacattcagaatggtttgaacatttgcaatcaatgatgaatgtaactgatgacgaccaaatattagagtatcgtacgaaagcaagtataaaatcgctctatcaggataatacggctgtcacttacaaagggaacactcttatgttcactaaaatcctgaccaccttcaaagcaattgatctctcagacaactcatttggtggtcctattccaaagtcaatgggggaagcttgcttcactacatggatttaacctgtcccacaatgccttcacaggacaaattccatcacagcttagttctttgactcagctggagtcattggatctctcttggaacaagctctcaggggaaatccctctacagttaacctctctaacctctcttgcttcgttgatctttcatacaacaacttgactggaagaataccgcagggcaaccagtttgggtcatttagcagcagctcgtttgaaggcaatgccaacctctgtggaaagccgttgtctaaacaatgtgatactccaggctcaacatctcgaaatgcatcagctacttcagaaaccagcagtttctggcaggacagacttggcgtgatccttttgttcttcttttctggcttggggttcacagtgggcttcatattggcggtctggttccaatcattcttccacatagaacgatggactcacaagcattgatgactgttagtatactgtatacactatgtatggtgtttatccacccaaggacatgatatgtgtgtatgtgtgtactcgtaattagtgacaggtgaagtccattctctgttgataataatgcataattttgtgtatgtgattaccaaaatagtggggtagtggcgacatctataactgtataagaaatgtgctctttgcactgacctatgcgctggcacatttcctcgaacacctggtgccctggtggtggtgatggaagaagagcgcgacgacgaggcaacgagcagaccgacggacagtcggacacgctgttcctgggacatccccatggcgaccccattgagagccgactgcaagatctcaatatctgcaaccctggataccatcatcctctctgcttcgtctccgcctcatcctcacccctgacccctaaccattccggcgaggtccaaccaagaggtggtggttatctcggattgggatgtacggcgtgtggggggagcgggattggcagagtactccgagtgggatgtggtggaggagaaggacgacgaggggtggaaatctctcggcagctggcggcggcggcgtaggcgcgtagttactctaggacggcgcgcgtgttgggcagggggtgtgtagcgggagagagatcgagagagtatgacgcccgcggcgcactaccttcggcttcaaagcagatgcggagatgcatgctagaccgggctcagagcccgtccgttttcagccgctactgccttcgatccgctgtctcacgtcttcaattcgtacgtgtcgccgtcgaattgggatgaagatatagacaaatttgataatgtaccacgtcttagagcaagtttaatagtatgagtctcgctccgatgctttttacttgagtagaaattaatccgtgccgttgatcgtatttaatcgtagggttaagatctaattctactcccactagattttattagagtagaaatgtggagggctatatttgttcagagataataatttgcgtaggggtattatcgtaatctgtcattatctaactgttcaccctctctctatcctatcctaatcgacaccattcctctccattcgccgtcgaagacgaaggcgagcgtgtttatcgtctgcgtgccagcgacgaaccgatcgatttggagacaatcgtcagatatgttgatgagaaaaatgtttactaatctctgaagattaatctgttcttacttatgatgaccatcgtatcggaacgtctttgtggatggtgctgatgacggcggcgtcgctggtgaaaacgccgccgccgaactacatgccagcggcgaggaaggccgtcagtccagcgccgaggacgatggcgagctacagcacgcgggcagtagtcaccgccaccttgtagtgatccgcaaacgcgctggcaagcaaggcctgaggttgattgatcaatttaagcaaagttaattaagcagccatgcatatatcatcggaatgtaggctaagctaggtaggtaggtaggtaggtagctcacctggccagcgacggcgaggccgtcggcgaggagcgatgtggcgagccagacctaggcgcagagctggaacgccgccatggccgtcacgccgtggcgcgtcgccagcgacgccgccagcgtcacgcagaacgtcacggccaccactctcgtccggatattaggagattacttacctgccctttaaaataaacggtctagattaattctattcggagtagaatacttcaagtatattgcaccagagcatctctctaatagtatagccaactactagctccaaatcatctatagtcaatttaatagccaattcatacaatagttacatactacactattaatatctggtcccacctgtcatacacacactgtgtcttggtgtccgtgctacagctggctacaaatctatagcccgctgctcttctctcttctcttttatctccttaaaatatatttatagctgatttatagcctgctactgtacctgctcttactgtcttttgtttttttaccactctaattctctaaaattactcctttgataatatcacccgccatcaggatcgcgattttttttttcaaattttgtgccactttctcgttgagtaggaaggggatgaacccgtcgctcccctttgcctgtcgcacagcacgcgaccaccaccgaggtccgtcgccggcaccagctttatctggccaaaatagtactccatccgtttcaaaatgtttgacacatttgactttttagcacatgtttgaccgtttgttttattaaaataattttgtgaaatatgtaaaactatatgtgtacatgaaagtatatttaacaatgaatcaaatgatataaaatgaataaataattacttaaattttttgaataagacgaatgatcaaacacgtactaaaaagtcaacggtgtcaaacattttgaaatggagggagtattagtaaggcctttacattggctgcggcttcactgttccgttgttgtgtttccatccgtgttccgtaccacgtggagggcatcggtttgtcgattctttttggtggtggggtcggcttctatctgccgtgcagaatatgacgccgtcactactccgtcaaaacaaaccgggtactagtacttttcactccgcgctgcacaacttggaaaaccactgcatccttatctcttgtccccaaatcagagagttcatctgaagttctgctcatctgctactctcctcatcttcctcttggccgcacgcaaccatggttgctctcgcgttgtcggcggccgggctcgccggcttggcgtggtctgcactccgcatactcgtcggcttggtgtagttcaatggtcagtaccaaatgtggaactcccttgctgctggcaactactgtttgctatggtgaagaagtgaagaattgaagatcgaaacttttttcaccatacagctgcattaaggtagttttatttggtaagttcatttttgcaaacacctcttgtgttttgatgcttctaaattattaggatttttttcacatgagccaaacaacatgtttggtgggaaccatatatttgatgctaatacaagagaaagtactagtatgatttgacagcttgaatcgacatgggaattcagattaagatccaaccttacaagttgtaatgtgattggaaattggtaaaggtgctaattaatatgaaaaaaaaggtggggattttaatttaaatgggcaaacatgctatagggatatgtatcaattgtctgtgcagtctcttcatgctgcatcccttgactttgttcagaagttctgaaataaccagatgactgaagtaatgaagcaccttcaacatgatagtagtctggcatttgcatgtgattgtagttagtgggaatctctgaacgaccctgaatctgtataaggcaaataataatcagtagcactaataagagagtctcttttgccaagtgtgtgtgtgtgtgtattttgaatctactgacctgcatcatggtgtatggcagtgatggtgttaccacctctgcttgtactggacactttgatgtgtttgaatcactctttttctttttactccgttgtgttgccttgtcaaaaccaccaattggtctcctcgacccacgaatggctttctccttaacctttatgcctcttgctttactcgggccaacattttcctctgtgcctatgataaaatatttttgagatagctgatttagattataacatagtagtcactagcataagtactattcaactcagagtagcatacaaaccagatttatccaaatctggatcatgccttatactcaagtatttctccacatcttctgctaacttttgtgcattgttggcagccattaagtatgtttcatcagattctgcagctcaagatgctattttaacaaacattctgcacaagtctctcctgcgcgttgataactttattttaggatcttcatgagtactacagttgctctttatatgtagagattttgcatcaatggtccatctttgtagtatgtattgcttatgaatttcttttatattgttaacatcaagtatcttcaatgcatggcaacataggattccgagaaattcaaacttcttgcagctgcacctgactttaccttctgttggagaaaattttacaacatgctcatggtgcttaccgtgaacttttaatttgtacaccatttcagcatcaatatcaccacagtagtataggtcacagttcaatgtttgcaacacttgttcctgaaacactttaaatattgttggagtataaattcttgttgcttgccttaatattgtcaaatctgctttcggccatggtgtactttatgttgtcttaaagtcatttttgacttcctcatatcttttgtctgacaacaacctgtcaaagtgttccaagaaggtaagtatgtcatatttcacactgatatagcccttcaattcattgttcatgctctcacttctctgtgttccactcatatcagtagaaaatgtgtttctcccatacactaatgcccattgctcttttttttttgaaatagcctctcaagccatttgttctcctgcagatcatacttttcaagcattctattccatgcatttataaattcatcttcctcctctttgtcataaatacaattctgaaaatcttcattgaatttcttgtactccttcacaactccagcaaggtgtttgcaggcattctggttcatatgccaaacacaaattctatgatgactttctggcatgactaacttgattgctttggccattgctgcgtcttcatcagtcaatatagtctgtggcttctttccagacatggcttttaaaaatgtcttgaaaagccaaacaaaactatcagcagtttcatcatacaaaagtgcagcaccaaaaacaacgcttttcttatgattatccacaccaacaagcaaaccaaatggacgaccatcatttagttttctatatgttgtgtcaaaacaaagaacatcaccaaaaacttcataatcagcaatcattttagaatcagtccagaaaatatttgttatcaagtcatcctcatcaactagaatggaatagaaaaaattaacatcttccgatgattttttctccatatattccaagactccccctgtgtcaccttcgtttaccttcaatgacctctttgaatataatctattcttcatgtcttcacgagtaaatccaagattctcatatccacccgcttcttttgccattaaatcaatagtagccttattagaaatgcctactgattttgcattttcagcacttgccatctgtgcttcagttattttcctttgagatcttaagtagagggcctgacttccagtagcaagaatgtggttatgctcgtgcaagaattcatatatgcaatacaatccatcatccctaagacttattttcatgcatgctcggcacatacatcgtgtttctggcctactaaaacactgaccgtaatttgaaatttggtcttctcttttatcatgaccacgagtacctattgttaaataaaactaactcagtatatgaattctatatgaacactaaacattgtaaatataagttggaactagtacctgcacgagaacaacaaaatgtccgattctttattatggtggaatctttcacataatggtaactgcttcttcgaatgctaaaacccatgtctcgagcataggcattatagaaatcatatgcctcttgttcactgttgaatttcataccgatgattggtgccttccctttggagggatctgcttgtggagtagcttcaattttactaggatcttgattaatatacccgttttttatctgagacaaattagaaaaaaagaaaaactttcatgaaacttacagaaaaaaaagggctaatagaaaagaagcaaaacttctatgagatttactgatatgatgtgcttgtagtgatcaagtctcaatgattactaataaaagaaagtgaaaacattatgaagtcttaccgtctctaattccccttctaggttaccatgaaagcttgtccctggatgatgcagtacaaacgttccagcagaggcagctggttccgtcggcatggttgtcacttgttcatgcagtgaatcggtgaccttgattgaccttggaagattagatagagaggccattgttgttgcgaagaagatgattgtgatccgataataatgtgccatatgtaaagcttaatctattttctgaaaaactgtctaatggtttggcgtcttaatttttatttggcgcctttgtttccctggagggccacgctaattaggattaatcgctaactgcgtaatctggtgattgacggagagaataatcctgtaatctccgtttatggtggggccacacaaaaagaatcgacaaacggatgccctccacgtggtacgaaacacggatagaaacacaacaacggaacagtgaagccgcagccctttacattggccaggatttccacgcacgtgccgaaagtgtccaaatggcatcgaccgagaccacagggaacaaagccaccggcgaacgactccacgccggagtttgactccctcgctggacacagtctggtcccgtgcagcacgcatgacagtatccagtatttcaacacaacaatctattcgaattatcgagctggaaaactgattagaaaaaaaagaagtacagaaaacgagaatgagacaggaggatagataggccaacgaggatagaagctgctgaactgaggcagtatgaggctggcagcaagtttcattgtcgcttgcatcactgtctatccgtttagagtatagacactctctccacaattccacattatcagggtttgatatttcggactgaaatttcgatcattttgcggacccctccgatacgatattatttgggccaaaattttgatttttttaattttttatgaatttcggtaatatttgttcaaatttgactaaattttgttctaaaatttggaaatttcagaaatttcgttatattggtactgcccgatacaaaggccgaaaacgagaaagtgaaccctgatcatgactcgtgagactaacctgagttgttctctgaattagtccaactgtccaagacaatgaaacttgctgcttctgtgatcactgatcagtcatcagtctgtgtacaatttcctgcgttcataatatataacagaataaggcaggtggaaaaatgctggccatatcaaggcaacaggctggcatggaccgacgaaaacaacactggtaacaggatatgaatgggcatgcaggaatggtgcaaatttatgtccgctcctggagcttttatatgtgtgccgagcaagcatatatacatctgcagtacaattggagcatcaacccaagacagcagcaaaatgatgatatccaccaagcaacgcctcctcactcccattctcattctcctcatttgttgttactccatagtcactgcagccaacaatgacacaaccgtcccttgtctcccagagcaagcttcttccctcctacagctcaaaaattccttcatcaataatgcaaacttatcgtcatggcgagctggatcggactgctgccactgggagggcatcacatgtggtatggcctccggcagggtcatttcccttgacctcagtgagttgaacttgatgagcaatcgtctcgatgctgcactctttaacctcacctctcttacaaaccttaaccttgcttccaattacttttggagagccgaactcccagtatctgggtttgagaggctcacagatatgatccacctcaacttctcacacagcaacttttatggtcagatccccattggacttgcttgcctcatgaaacttgtcactcttgacttttctagtaatgatgggttgtatttcgatgaaccaagtttccaaaccgtcatggcaaacatgagcaacctgagggagctccatcttgatgagatagaaattttcggatcaacttggtcagttgttttagcagacaacattcctcaactcgagattcttagcttgtttgcgtgccgtatatctggtcctattcactcttccttctcaaggcttcgttccttaaaggtgatcaaccttggatacaattttggactccccagcaaagttcctgagttctgtgctgaattatcttctttgagcattcttgaaattgcaggcaattcttttgaagggcagttcccaacaaaaatcttccacctaaaaagtttgagaacgcttgatttgtctcataaccccaatctttctattaacctaccagaattccctgatggaaataatctagaaacactaggtctagcagcaaccaatttatcttatcacataccgtcctcatttgccaatctcaagtccttgaagcgtttgggtatgagcacggcacgaacttccaaggagctgccctctttattagataagcttccttcattgacagaactggaattgcaaggatcggaatcaggcttggagaaggcggtattatcttgggtaggcaaccttaagcagctgactgctttggagcttgtatcgtacgatttctctgaatcggcaccctcctggataggcaatttgacgaatttgaagtttttgtggatctgggactgcaatttctctgggtcaataataccatatcagattggcaatcttgcaaaattggagaccttggactttagagggtgcgagttctttggacagcaaataccaccttggatcggtaattttacgaagttggcaaatttagagatgtatagttgtggcttctatgggtcgataccctcaacaatagggaatctcacccaactggaaagtctgcggatcacatctaatccccaactcaacggtaagtctttatacgacggctacttcttccttcattcatatgcattttattatatcatcatggaataattttattcaaaatgccaccaagagagtgctgtagaacactccaaagcttaagtagtaatatatatatttctgtattttgatttggatcgtgaaacancacatagtagatacatgnatagnctggtagtggtgagcaagtttccacgttctgtttgatanttgtggctcgcatctagatattacatcccacctacagtaaatcaatggcgtctattttcaaaaacttacnacattttcctatctacactanntctaggagcttaganatctattgctactanaatattataatagaatgctaaaaggagtaacatgtttgttttgagagcctagaagttaccatgttaattggtgaaaaaagagaataatgcacacggattaatcggaacgggtccatattatattataacaactagcatggtgcnccgcacaaattgcgcggctagcattcttatattatagtagcatatattttttttcttattttttattaaaatatcataaataacaagataatttaaaattgtactaacttgaataaactatcaatgtgcaatattcatattatgttgtatatatgtgataggtattaattatttttttaataccgaattttagttatttctaaattatattgctagatggactctagactcctcttccaacattctttaattttttttaattatgaatttctataatttataaattgtgttcctatatttttattttaaattcaaatttttagttatttctaaattatactcctatatgaactctagactcctcttccaatatttcatatttttcaattccgaatttccgttatttataaattgtgtttctatatggactgtagactataattataatattgcttttttaaaaaaaatgaacttttcattatttctaatttaatttctatatagactctaaactcatctttcgatattatttattttttaatttcaaatttcagttacttcggaattgtattcctatatggactctagactattgttccaaattttattttctaatttctaattttagttatttgtaaattgtatttccataattactctaaactctacttttaattttattatttttattctgaattttaattaattctaaattcctatatagactttatactcttcttccaatattccttattttaattcctaatttttattatttctaaattttatttctatatagactctaaacttatctttcaatatttcttttttttaattctgaattttaattatttttaaattatatttctatatggactctatattcttctttcaatattcctttttttaaatttcgatttttcgttatttctaaattttattttctatatgaactctaacctctatttttatttttcttattttttaattccgaatttccattaattctattgtatactggttgtatactggtacagaccctagtcttctcgtcctatattccttatttctaattctgaatttcagctatttttaaattgtatttctatatgaactctgtctatttctttctatcctattaatataagaatttttagaccatgagagtgaattttttttatttcaaattttcgttatttctaaattgtatttctatatgaactctaacctctacttttattttttttcttatttttttaattccgaacttccattagttctattgtataatggtatggactctagtcttctcttactacattccttctttttaattctgaatttcagctatttttaaattttatcttctctacttttatttttaaattttattcctgtatggactctttttttcctatttcttcgattaatatgagaatttctaggccataagagcgaatatggagccttcttttttatttatttaataagttaaagggaagatgcttattggtccatggttttattatataaaagggaaaagctaaacgtatgaacaatttgttaccaacttttttacaaacgttgatgtgacacatccactactgcaaaattgatttttggacgagaccccctccaagttgtaggtggaccataactactttcgcctgtaaaaattgctcctttgagtacggttcaagggtcgcatgcaaaaatatattttgcagatgacccttaagaggcctgcctgcaatgttgcaccttaaggggtctcttacgaaaatagattttcgcaagtgagcaacatggagagcaagtgggccacacgcgtcaccgcactacattttttcatatttttttctcctctccactcacgcacactacttattttctcttctctccttggctccacctcccatcactcctctcctactccctctcctcatctctttcccattccctcccttctcttcttcagcgactgagatggaggcgacagtaggctcactcaggtgcgatgttgacgcgcgtgacgacagtgccggcgacagcaaatacagcaacgacctcgagggcagctgatccggtggcgccgccctaggccccgggaggggcgacgacaatggcgggcggtggatccgacagcgccgtcctcgaggggcaacgacgagctcaaagaggatgggaagctagagttttggccgaaattgtttttgtggaacttttatttgttttctccaaaatcattttcgcagcggttggcataggtgaccacgtgaacatcatgtttttgcatgcggttactcaacatgcatgggaaaatgttgattttcgcatatacctaggttcaggcgggccgtctagctgcctgcgaaaattgattttgatcacatgcaaaaaatgattttgtagtagtgatcatggttaaatctttattagtgccttccaagtaactaaatcaaactttgttagtagaattttataaaaaatgttttagtatctctagcaaacaattatatatatagaaccaaaagcaatgcttctttttatcaaatacaatattttaaataaatgttaatgtaaccatgtgcaatattacggaaaatcagcttagtttggttaactcggacgaatgagttgtcttggttcaagtgcgtcctaaggtaccagactgtcagttcagtgaacattcatctttgaactttttgactagtatactgcacttgcatgcagggaaaattccacaatcgttgttcgctcttccgaggctggaaaatgtttaccttcaagaaaaccagctttctggttcactagaagacattccttaccctttaacttcatctctgttatgtattgacttagccaacaatcaactatcaggcccgatacccaactcactttttcatcttacaaatcttaattatctcattcttgaatcaaataaattcacaggcacagttgaacttagctctgtctggaagcagaagaatctatttatcctaagcctgtcaaacaatttgatatcactcatagatgatgaaggttaaacagtgcctccttatcttcctaacatcaagtacttatacctgtcatcttgcaaccttacaaaaattccaggcacattaaaatatcttgatgcggtttcccttcttgacctttcgagtaatcaaataacgggggctataccaaattggatatgggagaattggaagggccaccttaatattttgaacctctcgtgcaacatgttaactactttggaacaatctccttctcttgttaatatgtccaatttagcttatcttgatctcagtttcaatagacttcaaggaagcataccaataccagtaaccacatccagtgagatcgcattggactactcaaacaaccacttctcttcaatagtaccgaactttggcatatatcttgaaaacgccagctatattaatttctccaataataaactaagtggcaatgtaccatcttcgatttgtaatgcaagcaaagccattatcacggacttatctggcaacaactacagtggatcagtaccagcatgtcttacaggaagtgtaaacttaagcgtattgaaattgagagacaaccaattccatggggtgttacctaacaatagtagagaggggtgcaatcttcagtcaatagatgtgaatggaaaccaaattgaaggtaaactacctagatcactatcatactgccaatatttggagctcctggatgctggaaataatcagattgttgattcttttccattttggttgggtaaacttccaaatctccgagtccttgtcttaagatccaacaaactcaatggcacaataaggggtcttaaaggttgtcaccaaaattgtaatcacttcaaaaggttgcaaataattgatttggcctccaaccatttctctggcaacatacatccagaatggtttgagcattttcaatcaatgatggaaaatgacaacgatgagggacacatattagagcataccacaaacacaaaaataccattgctctatcaggatattacggttgtcaattacaaagggggcactcttatgttcactaaaatcctaaccaccttcaaagtaattgatctctcagataactcatttggtggtcctattccaaagtcattggggaagcttgtttcactacgtggacttaacctgtcacacaatgccttcacaggacacattccatcgcagcttaattctctgactcagctggagtcattggatctctcttggaacaaactctcaggggaaatccctcctgagttagcttctctaacttctcttgcttggttgaatctttcgtacaacaacttgaccagaagaataccgcagggtaaccagttcgggtcatttagcaacagctcctttgaaggtaatgtcaacctctgtggaaagccactctctaaacaatgtgatactccaggctcaacatctccaagtgcatcagctccttcaggtaccaacagtttctggcaggacagacttggcgtgatccttttgttcatcttttctggcctggggttcacagtgggcttcatattggcagtctggttcgaatcattgtgccacatagaacgatggaatcgcaaaaaacgatgattgttagtatacactatatgtatggtgtttatccacctacggacatgatatatgtgtatgtgtgtactcgtaattagtgagaatttaaattcattttctgttgataagaatgcagccttctgctttgcatagttttgtatatgtgattatcaggtctagtggcgccatctataagcaatgtgctctttgcgctaacctgtgcggtgggccggtggcgcattctcttgaacacctggtggccctcgtggtgtggtggtggaagaagagggcgatgacgaagcagacggacaggacgggacatcccagtagcgatccattgattgccgactgcaatatctgcttgaaaagtgcaacatctggaaccttggataccatctcaccttcctctccgcccccctcatcctcacccccttacaacctcatgccccattccggcgaggtccaagtggtggcggttatcacggattgggatgtgcgggaccgcctgaggtgggggagaaggacagcgaggggtggaagtctcgccgcagctggtggcggcgccgccgcaggccctccagggcggcatgcgcttcagccttcaggcagggcgtgcaccatgcaggagagggagatcgttccgagctcgccaggaggatggccgggagagatccccgcccttgtgcagacgctgccgcctctgacccgccgctgcacatcttcaatcgccggccgggtcgccgggaaagcagccggaggcgggacatggccgcggccccgtctggtgttcgccgcaacataacaggctttccgtgggcctccaaacatctcggcccgtacatgtcgaagtagttgacctagtaaacggcccactgcctagacagcacatggacacatggatgggccgacaacatcacggcctgttcagagaccgcaccatcggtctatcgcgctcacccgcccagtcacggtctcacggaggcgtagaagtgatcgaagtgttaaatcctagatttcacactgctaattgtatttcttttaatggtagatgtacacgttgacggcaaggcgcatgtaataattttattaatcttaagatataccgatccagtcttccggaggtgtttatagggataggatgagtatgtgcgcgttgtgagcgcttgtgtttgtgctgtgttttttaaaaatgaaaaatggttttgcgactaaactacatgttggtgacgtgacgctggcaaagtatgcacggcagctagctggccagctggtgctatcggatttgtatgtttcgtggtacttctgtgttcatcgtctgaccagggcacggccgcgacaacgacgcatgtacacttgttcacagccagttcaatctctaagtgcgattgacgtctcgcacgattacgatgccaagttgtcaatggcttcgtttcaacaaaaaaacatttgccttgacttgaataatctacctttctggccataggcagatagccagatatgtaggaagtttttaaaaatcgagcttacaaaagggcattttccctaagcataaagtccaatcgaagattgtaaatcttcttgtgctcaaacaaaggatctctgtctgagtcagacagtcataaaattagttgtttcaagcatacaacaatcaaaggcgccaaaatgtgtaccaggcaagctcgacgacggtactacgagacatcgttactcgtactgatgctcctcctcctcctacaagctaggctcgcgcaatcgcttcctccatgctcgccggaccaggccacggcgctgctccagctgaagcggtcgttcaccgtgaacaccgcgtcggccaccgccttccggtcatggcgcgctggcaccgactgctgccactgggcgggcgtccgctgcgacgacgacgacaacgacgccgccgcgagcgggagcaccggccgccgcgccacttccctcgatctcggcggccgcggcctgcagagcggcggccttgacgctgccgtcttcagcctcacgtcgctggggtatctcaacctcggcggcaacgacttcaacgcgtcacggctcccggccgtcgggttcgagcggctcaccgagctgacccatctcaacatctccccacccagcttcacaggccagataccggcaggtataggacgcctcaccaacttggtttctctcgatttatcaactcttttctatgtgatcaatcaagaagacgatcgtgccgatatcatggcaccttcgtttcccaactggggcttctggaaggtagattttctgaggttggttgcaaatcttgacaatctgagggagctctatcttggctttgtgtatatgtccaatggaggggaaggatggtgcaacgctctggttaattccactccaaaagatcaggttctgagcctaccattttgcaagatctcaggtcccatctgtcagtctctcttcagcttgccatatctctgttgttgacttgcaagaaaatgacttgtatgacctgagttcttcgccgatttgtcctcccttggtgttcttcaactctcaagaaacaagttggagggtttatttccagcaaggatcttccagaacagaaaattaacaaccgtagatattagctacaactacgaaatctatggcagttttcccaatttttcacccaatagtagtttgatcaatttgcatctcagtggtaccaagttctctggtcagataccaacctccatttctaatctcacaggtctgaaagagctgggtcttagtgccaatgatttccctacagagctaccatcttctctaggaatgcttaaatccttgaacttattagaggtttctgggcaaggcctagtaggatcaatgccagcttggataacaaatctaacatctctgacagagcttcagttttctaattgtggcttgtctggatcattaccatcttccataggcaatctcagaaatctcaggagactatctttattcaagtgcagtttttctggaaacataccattgcaaatatttaacttgacacaactgcggagcttggaacttccaatcaacaactttgtggggacagtggaacttacctcattctggagactaccatatttatcagaccttgctcttcaaataataaattatctgtggtggacggtttagtcaatgactcagtagtgcgttctcccaaagtagcagaattgagcctagcatcctgcaacatatcaaagtttcccaatgcagtaaagcatcaagatgagctacacgtaattgacctttcaaataaccaaatgcatgggccaatacctcgatgggcatgggaaacttggaaggaattgttcttcttggacctgtcaaataataagtttaccagtataggacacgactctttgctcccctgcttgtacacaagatacatcaatctcagttataacatgtttgaagggcccatacctatacctaaagagaattcagacttggagttagattactcaaataatcggttttcgtatatgccatttgatttaattccttatcttgccggtatactatctctaaaggcctctaggaacaatatctctggagaaatcccatcaacattctgcactgttaagagtcttcaaatccttgacctctcctacaatatcttaaatggttcaattccttcttgcttaatggagaattcttcaacaataaaagtactaaacttgaaggcgaaccaacttaacggagagttgccgcacaatatcaaggaagattgtgcatttgaggcattggatttcagctacaatcgatttgaagggcaactgcccacatcattagttgcttgcaaaaacttggtggtacttgatgttgggaacaatcaaattggaggctctttcccatgttggatgcatcttcttcctaaacttcaagtccttgtcctgaagtccaataagttctacggacagttggggcctactcttaccaaagatgatgactgtgaattacagcatctccgaattcttgatctagcttcaaacaatttctcgggcatattgcctgatgaatggtttaggaaattaaaagctatgatgtcagtctccagtaacgaaatattggtcatgaaagatggagatatgtatggcacatataaccatataacatatctttttactactacggttacatataaaggacttgacttgacatttactaagatcttaaagacctttgtactaattgatgtctcaaacaataggttccatggcagcattcctgaaactattgccacactaagcgtgctcagtggtctcaacatgtcacataatgctcttacaggaccaattcccaaccagcttgctagtctgcatcaacttgagtctttggacctctcttcaaataagctttctggggagatccctcaaaaattagcatccttggacttcctatcaacattgaacctatcaaataatatgctggagggaagaataccagagtcacctcatttcttgacactccacaatagttcatttataagaaatgctggtttgtgtgggcctccactgtcaaacgaatgcagcaacaaatcaacatcttctgaagagaaatctgtagacgttatgctatttctcttcgttggattgggttttggtgttgggttcgctattgcagttgtagtttcatggaaaccttgcattggcaaataatctttgaaggaatccaccctttttttatatttatctgttcaggagtctgccagtctgcttccccttgtaattttagctgtaattgtagctagcatgtatataatactatgtgcatggacaacacttttccatcatgcatgcatcctataagattagttgtttattaccttgaaaattttatacaagccaacaaacaattgttatgtctgaaacaagaaaggaattgaaatgcatgacctgtatgtggcattattagggtcagtttaacttgtagcatagatcagtgagctatatatcatgatcttgtgtttgaagtacatacttacgcagaacttactttgagtaccaaacaaccatactagaacaaaattttctgtgtgaagaactgaagtctgaagatcacataattacgcgttggaatgaaactttctgtgaaaagatcacttgcaatacaattgtaatcagagttatatgctgttattcttactagttgtgtaatactagcccgaatcttgtatgtggaccaaattaggtaaacatataggaactaaaactaaatgatgtcatccgagaacaatgcacaagcaaagcttaaaataaactgaaataagaaaacgaaattcattaataaaaactaaaactacacgattctttattaagtatcagctctacatctatatctaaaactaaaacggcgtcatatatcaggtcgcacattgaactgctagtctcctaataggccaataccacagcagagcaggaaaatcaacaccggaacactaagctgcattcgtaatttggtactagaatcgtagtaattccaaaatgggttcataatattcgagaaatcctagatttcacacactaacctgtgcaatgcagctgatggcaggaccattccatcaaacacctggcgtgcagagctcctgaggacatcgccatatggtgaccacattggttggtccaattggttgggatttcggtgtacgggctgcggtggtgggaatgggataggggagttcgccgagtactccaactccaaagtgggatgaagcggaggaggggacgacgaggggaagggctcgcaagtggtggccgctcctctctctctctctctctcgggtagttaactcatcatatcttcctatatagttgtacccactaaggagcatttacttgtataaagcaaagcatataagaaaccacatcatcaataattctaagccatcgagttgtattagtacatagttatcagccgttggataaagaagctactcatccatttaatttaatcattgattactcatccagtcacctccatttaactcataatcacgcgtgacattgttatccattttgcgcataatactatgttttcttctcccaagtcatccgagataatgcaaacttatctttttctaatataacttaaattattgtataagatgcgatttttgttttgttataaacaattggataacataaggtaattagacatcattaacataaacctatttttgaaacaagcttgatataaagcaaagaggtgcaggatactctaatagacgacatccagattgtgcatgaaaataactttcgtgcatcataagaaatcacaataacgtttaaaaaaataaaagatgaatggtattgtaatagcataggctatatattaagccacattatcatttattttgtatatatacagagttacatctaatcatttaaaatattgattttatttgacgataaaactagcaaatcccgcggcaagacgtggggtgccaactagttcatcatatgacaaaaccaatgaacatgcaaccaataagtactaaaatgatttcttgggttccgataaaaaaaattaatatagcacatagtgactacaaataaaatgacttcttgggtttcgatcaaaaatttaatatagcacagtgactacaaataggacttagacttttggaaaaaccaaataatgaaataggactttggcttttagaaggagggagtacatcgtaggcgtacagccgtacacggcgaccggctacatcctgtgcatatgtgggtactatgaagtgtcatgtagaacgaaactgctcccgaaataatggaaggagtcgattttcagtcctttttgtttcgggttaaaattattataatctagattattaagtcagataataagctggattataataagggactatcatatatctgttgacagaaaatcccatcttctatctttcgaattttggaccattggatatgctttcagattcgtgcagaacccttaaccataactcctctcctcctcccccgttcagatcgcgccgccaccactcctcatcccgtccctcgcgcgattccccgccaccaccccaccgcacctttgcccgcctcgccgactggccggaaagagtcaacggcgccggcgaggacccctggtgagccctctccccttcccctctcccctctcccctctcccccttctcccctctctttcttctcaacaccgcgacggcgaggatgtgaggtgcccccgcctcgctgtcttccccgtatctggtggctccccgccactagatccgcaaccatcgtccaccgcctcctaaccgcacgcttgcttttcccctgccaccaatgccagcccaccgtcatcctccatccccgcggctctggcactgccgccggcgcctcgccgcccgcccgatccgccacccaccgccaggctgccgcctcccacggccctccctctaaagccagtgagctccccctcttctccctccccctcccacccctcccacctccaccacgtcctaggaccctaacccgtagggtcctttgctggagtctagggtgtcgccagcgctggagaagaggaggaggtcaccagagtcagaggagaaggcctggagcacgaatcgcgcagctcatccgatggtccaaaatctgtaagatttggggatatattttttgtcgacagaaggttagcaattccgttataattaactaaagtagaataatctaaaagattgtgagggtatatctgattttgcaattaagtgagataaaataaacttaaattatggaaggagtcggtttccactagttttaaaaggagttttttttagaaatagtacaactttaatggaaaattagagtgaattgcactttgggccatgttttattaccaaagtttcactttggaccaccctgtacgtaatcttttcgctttggactaggtaactttgcctttgttgcacagtgaactaccctaactcttttcgcttgtgatgtctagcgtctctttagacaaaagtatgtcatgcatataggtatgaaagtttgctggcatgccgttaacaatttgctcgaagttatcgaagaaatgaaaatgtgttttggggtggtccattgtgcactagtccaaagtgaaaagattagataaagggtggtacaaagtgaaactttggcaataaaatatggcccaaagtgaaattatctcggaaaattataaaagtaaatgctggttgataaaattacaaatttagcatcttgtcaaacaagcattgttcaataagcatacctgtcaaacaacagcttgggccgttcgacaggttagttagcttgatttacccccctaaactcgaaaatcggacatttgacaccctaaactcttaagaccggacaaattaccaccctaacatggttcgaagcggttttcagcctacgtggcacacacgtggcgatacagtcagcaaagataaataaaaaacaagtgggacccacttgtcagcgtttttttcccttcccttctctgcctctctctctcgattcgcagagaagagagcacacggctacggcgaacgtgacgcgctctgcctccgcctccaccaccgaccgcccgaactcgccgcctccatcgccggttgcccgagcttgctctgtgttcgccggcggatgtggttggacggccacgatgccaacgaccaggacgacggaccgttcgccgcctccacctcgtgaacaagagaagcagagaagggaaggggaaaaattgccggcttccccgacgacctctgcctcgccggcccgcatggcgtgttttgtgacgacgacgacgatgatggcaacgcgtcccatgttgtcagcatctcgctcggctacgtctctgacttctctgccaacccgagctgcgcgggcgccctccgcctccgtcaccgccacactcctcacgtccggcctcctcgccgcctccttcccgcgcctatgcagcctcttcgtctacgactgcttcgttggcgacgataacacgcgaccgctcccgccgctcaagtggcagctccctcccacgcttcagtccaggacctcgtgctcgtcaataaccccacgctctccggccgcctcgccatctccaccgctagcctcccgctcctccgccgaacgcggaggcggagggcggagctgggaggcgagtggcggtgcgcatggctaggtcgctccggccggcggcgagcagctgaagcatctaggcccccgttgtgaattttggtaattaatgacaagcgctaattgtggactaaccgttatctttgagatattcattgtgagttaggttcacttattatgtacgcatggatgatcaccgaaggattaaaattgacggcgcaaagcgaaggaaaagaagacggtaaaactagtgctttagttttaaattgatcgaggtgtaaggcgatcaaatttgctagtttatctttagcttcgccgtactattaagaggggtaatgacctagcaaagagatgattttaattgccacattaggtcatttgcatgtagacttgtgctcacattttatcacacacacacacacatatgtattcactgtgtctcggcctgaccaggggcggtcagaccggccacatagtggcggtctgaccagagtgccctggccggtctgaccggccccaagtgcgcggtctgaccggtgcataaggccagtctgaccggaggcacttgtgcggtcagaccggccccctggaggccgggatggtgttgctcggggtggccgatacaaagccgacggagtggtattcggtcagaccgagctaacggcggtctgaccgagccgaggccggtctgaccggccactcaacgtcggtctaaccggccaggccgatggggccctctgatagggctacaacagctagttttctagccgttgcagagtagcacggtctgaccggccacatacctccggtcagaccggcggcacacagagttgggggatttcgcccccaacggttagttttggttggtgggagtataaatactccccctccagcatcaagggggctttcttggcacccaattcaattgcatacaccccttgcatctctcatacacccacttgagctttgtgttcttccatctaagtgtttgagggttgttctagccaagagtcaagtgcatttgcttccattgtagagctagtgtggcacttgatcatctccgagccgcgtcattgcttgttactcttggaggttgccgcctcctagacggcttgtgaaggagttgcccggtgacctctccgagaagattgtggaggaggcccggcgccggtttgtgagtggtttggagttcaccaccttcggagtgaaggaagaactaccccgagtgatcgaggcttgggtagtcctctccgtgggccggctcccgccttacccaccccttgacgaagggggcgtgcggtggctttgtggttgagcggtggagttgggctcgcctcaacggggagtaggaaactggcgagtttccgaacctcggtgaaaaatctcttgtctccttgtgtcatttgattgtcgtatttacatttgtgcaattacattcctagagacatacttgagatcatatcaccctaggattgcaaaacattgacataggagtgtaatttactttcctagagaattaattgagccactatcaccataggtttgcaaaacataacctagttgcttagttagacttaaccctcaccgagcctagaaacttaggttagttttgattaagtgtcatttaggtttttaaatcgcctattcacccccccctctagtcgacatctcgatcctacagcagcggcgggcgcgacggccggggagaggaaatcgttggcgcggctgtgtggctccggttgacggcgacgacggttgatggggatgacatggatggacggcgaactcgtcgccgtagcgcaccgcctccgatgccctcctcggcgcctcccaccatgccctccacgctacgcgcgccactcgccgcgccaccccgaggatgattcatcgccggccgcctgcctgagcagagagagagagagagagagagagagtgggagggagggagggaggccgtgcatcccgctgactccccgtcggaaccgagaagaggctccgcacctctctccgccgcctccaacaccctcctggcctcctcggcatcgcccgttgcctgccacgtcctccctgcgttctgccgccagcccgcgcgcgccgaccacccgtccgccccagcacgccgccgcccgccgctcatcaccggcccccgcgcaccgactacccgtccgcctccacgcgcctccactcaccgtgctgcacgctctgagcccgagagaggggaaaaggatgaggaagaggggaagataaggtatgataggcgggtcccactattttttaaaaaataaaatgctgactggattgccacgtgtacgccacgtaggacaaaaccgctctagattcggtcgaagggggtaatttgtccggtattgaaagttcagggtgagcaatgtctggttttcgagtttaggggggtaaatcatacaaccgcgatagttcagggaggtaattcgtactttttactttttaaaaaagaaaatagtacatgtgcatgtgcagcctaccgaactccacaacccactcgatgcatgtgcatgcatacacatcccaaattcccaatattttaagcccaatcgaacaatctgttcttcgacagtgtgctaaatttgtaattttagacaaccaatatctaattttacaattttcgttaaatttgtattatttctaaaaaagttcttttaaaagattgtgagggcacatccaattttgcgattaagggagataaaacagacttattccttctcaaataacagtatttccaacggtaaatctaattggagaggcctctccaattagtcttaaccagagacacccacgtgctagtactttaggagttttggttgctattagtatatccaatagtgcatatcttgttttcttcttatagaattttctcttaaactaattatccaatctacaatctgattacaccattactttcgttgcaattaaatatttacaacaagatcttacatgattatattacgatgaaaaatatttatatttataaattacttttattatatacgtaagttacttttatcatatatatataagttacttttatatttgactaaattacttctatacattcataatactctaagttgattatttttattattgtttttagttaattctatattttgtggactttataaatcttctctactttactcgtgaatttactctacatagtttcttatttcagttcactcacaatataattatttctactatagagagttacttcctccgtttcataatgtaagtcattttagcattgcccatattcatatagatgttaatgaatctagacatagttctaaattaaagttactttcttttttgttataaattacttctataatatatgtaaattacttttaagctttactaaatttacttttatatgtctaagaagtaacttagtgaaatctaaaagtaatttagacatatcataaaagtaatttatgatttttcatcaaaatataatcatgtgagatcttgttgtaaagatttaattgttacgaacacaacgatgtaatcggattataaatcgtttgagtaatttaagagaaacttctttaagaagaaaaaatatatagatattgagtgtattagtagctttttttgaaaagaagggtgtctctgtttagtactatccagctagcactctcggtctcagtgtagttgtgtactatttccaaacgtagcacgattagtgtccgaggtgaattggcggatctacggctacgcgacgtgtcacgtgtgcggcactacagccatctgcaaggagcggatatgctctcggattaatctgttttcgtccgtaagtgctacagtttgtgatttgtctgatcatgacaaaggtctacacgcatgtacacctgttcacataatgacacgatcaaaacatgttaagtacgtcccatgtacgatacgactacgatgccaacggcatctttgattgatttgatattagtatatatcaccatcacactatcacaattcacagtcacacaagtcaggcttggagtattgaacaggctctctctagctctacatgtatacaatagtcattcactcattctcactcagccgccacccgccaagatgtcccctcgggtagcccaacgagagaacgagccattgttacttgtactcgtcctcctcatacaaaccttgatcgcgagctcgcttccatgcttgccggaccaggcctacctgaccatcttgcaccgtcttcatctcattttagatctggtctacttcctaactttttcttcaaactttcaactttttcatcatatcaaaactttcatacacacataaactttcaacttttctgtcatatcgtttcaattttaatcaaacttctaattttagcgtgagctaaatacaccctaaagcttagcgtacatggcaggacacgtcctcgaatcttttctgcatcttcgtcaggccaacaaacaagagccacagagaagatgctcctttttccttgacccggagagcaagtttaatagtatagctaactactagctccaattcacctatagtcaatctaatagcttatttatacaatatttatatattacactattaataattggtcccacctgttatgcaaacaccgcgttttgaagtccgtgctacagctggctataaatctgtagcgtgctactcttctctcttcttatttatcttcttaaaatatgtttaaagctaactttgatcctgcaattgtacctgctcggataaattgataatgcggtttaaactttctatgccattgcactctctctgccctaaaatgatcgaccaatgaatttcaacagagacatatccagattcgttgatataggatgaatcatatctcatctaagttaagttattttagggcagagggagtacatctcaagtctaaataatctaagtatagaaaactcatggctacacttattttacgatgaagataactcatggctatacttattttacgatggaggtagtaggtccgtttcgttccagatattcaaacagtctgtacgcaaaaagccattcaacggccgcgacagtacatgggttgaacgttaagcttacgctaccacaccgcgacacgggctcatatttcattttctaaagactagccatgcagtcatcgacaacgacaggactaaaacagaggcgtcatttcacaacagaaaaattcacatgtaaggatcaacggttcaacaccatcttcagaagaaaagaatatgataaaaattaagtttttttatgtaaaataagatgatattaacgtataattaatttaagttttaattattataaacttaaaagatcaactttcatactgaaagttttcgcacaaaacacaccgtttagtagtttaaaaaacgtgccataaaaatcttaatcttcatctaacttttattggagaaaaatgaaggggttccaacactgcatgaacagtgtcattggtttttcttcttgactttaaatgaatgagcttaccttgacttcgcccgccattcccacggagacggagtgaactccacgtccattgatgggttgctttaccagatcgtaggaagcaagatgttatgtaatctcactagccaacatagggtgcgtttagttcacgttaaaattagaagtttgattaaaattgaaatgatgtgacgaaaaagttaaaagtttgtatgtgtaggaaagttttaatatgatagaaaagttaaaagtttgaagaaaaaattgggaactaaatcaggccataggccatagattgtacagaaacaggcctggatgacacgggatgtcaagttttcacacggagaggaatgaaattcgcgatatatatgcatggtcaggagccaggatgtcaagttttcacatgattcagtaagcaagcaccaagtgaactcgcaagatgaactacacgcatagatgcctccacagccacaaactccctcttctcatcctcctcattgccatcgtcgtcatactcatacagccatactccatccatgctgctgccaacagcagcaacaccaccatcagatgcctgacatctcagtcatccgccctcctccagctgaagagctccttccacgacgcgagccgcctctcgtcctggcaaccggacaccgactgctgccgatgggagggcgtcacctgccgcatggcttctgggcatgtcgttgtgctggacctcagtgatggttatcttcagagcaatgggctgcaccctgcactgttcaacctcaccttgctcacaaacctcgccctcagtggcaatgacttcatgggagcacaactcccagattctgggtttgagcggctttcgaaacttgtcagccttgacctctctgcgaccaactttgctggccagatccccattggcattggaaatctgagcaacatgcttgctcttgacttgtctcataaccccaatttgtacctcacggagccaagttttcagaccttcatagcaaacctgagcaatctgagagagctctaccttgatgagatggacctctctagcagcggggcaacttggtcaagcgatgtagcagcttctgctccacagattcagatacttagcttcatgtcatgtggcttgtctggtttcattgatccctccttctcacgactccgttcactgacaatgatcaacgtcagactcaatgtcatcagtggcatggttcctgagttctttgccaacttctctttcttaacaattctggagctatctggcaatgcttttgagggtcagttccccacaaagatcttccaactaaaaaggctgcagtttattgatttatactggaacaataagctttgtgtgcagttgccagaattcctacctggtagtcgtctggaagtgttggatctcatattgaccaaccgttctaacgccataccagcatcagtggtcaatctcaagtatctaaagcatttgggccttacaacagtagaggcttcaatgaattctgatatccttttgatcagagaactccactggctggaagttctccggctctatggaggatcaggacaagggaagctggtgtcgttctcttggataggcagccttaaacatttgacatacctggagcttggcaattacaacttctctggattgatgccctcttcgattatcaatcttacaaatctgacaagtttaacgctctacaattgcagcatgtctgggcccataccttcttggattgggaacttgatccaactcaataatttgaacttcagaaacaacaacctcaatggtgagatccctacaagaatttgaaatctcaatcatagctcaacagtttctaatggtacagtagtacagtacaggtggtaatactgaatagaacctactccttactttaaaaggttattgatgttttagtattttgccgcattgactaggaaatgccctagatcacaagtaacttaaaaattagcttctactccagtgagtccagtccatttgcactgctacttttatttatatttataagagagcctacaaattatagcttgttgactataactagatgtgtatgcaggaacaattccaaagtccatcttcgcacttcctgcgttgcaatcactatatctagattctaatcaactttctggtcatttagaagacatccctgttccattatcttcatctgtgtatgacattgatttaagcaacaattggcttcatggccccattcccaaatcatttttctgtcttccaaatcttgagtatctcaatcttgagtcaaatcacttgaccggcatagtggaacttaggcctttctggagactaagaagcctttattttctgggtttctctaacaataagctgtcggtgattgatggagaagattctccatctcaatatctccctaagattcagcacctaggactagcatgttgcaacctcacaaaacttccaagaattctgagacatctatatgacattcttgagctagacctttcaagtaataagattggtggagttataccaggatggatatgggagatttggaaggacacccttggatcattggacctctcgaacaatgcatttactagcctggagaactctccctctcttgttacatttacacatctaagccatctaaatctcagtttcaatagacttcaaggagaaatacccataccagccatatcattgccttatggtgtagttgtattggattactcaaacaatgggttctcttccatactacgtacatttggtaggtatcttaacaaagtagcctatattaacttgtccaaaaacaaactaaaaggctatgtacccatttccatttgtagtatgaagaaactccaattcctgtacttatctgataacaactttagtggtttcgttccatcttgtctggtagaaggcagaagcttaagggtactgaatttgagggggaataaattcaacgggatgttgcctaagggcattaaagaaggatgtaagcttgagactatagatttgaacagcaaccaaattgaagggaggctgcccagaacactatcaaactgcaaaagtctggaactcctcgatgttagtaacaatcacatcctcgatctgttccctttgtggctggggaatcttcccaagcttcgagttcttgtactgagatcaaaccaattatatggcacaattaagggtctccataatagtgatctaacaagggatcacttctcaagcttgcaaatacttgatttagccaataacactctatctggtcagttgcccccaaaatggtttgagaaactgaaatcaatgatggcaaatgtcgatgatggacaagttttggagcaccaaacaaacttttcacaaggatttatctatcgagacatcatcactatcacatacaaagggtttgatatgacattcaatagaatgctaactacctttaaagcaattgatttctcaaataactcatttgttggagttattcctggaacgatagggagtcttgtttcacttcatggacttaacatgtcacataataatttcactggagcaatcccgcaacagcttggtaacttggctcagctagagtccttggatctctcttggaaccagctctcaggggtaataccacatgagttaacatttctaacttctctttcttggctgaatctttcgaataacaacttgactggaagaataccacagagcaaccagttcttgtcgttttccaacagttcatttgaaggtaatttgggcctctgtggaaggccactatccaaagattgtgatagttctggttcaataactccaaatacagaagcttcttcagaagacagcagtttgtggcaagataaagtaggggtcatcctaatgtttgtctttgctggcttggggtttgtggttggctttatgctgacaatcatatttcaactggtttgccaggtcaaagggggaacctactgtatttgttagaaatatcactgaatctactttgctttggctttggaaaatagtgtagttattacttaaaagcagtttgccccgtcactgtgtgtccttacctaaaataatagcgtgaacttagaaatgaccttatttcccaggtatcacttatgagtgctatataaaatgcttgttgaaattaaggtctgggtttcttgtagatgttacttattaaaagaatgttatggttttcttaattggtaaatgagtccaacaaagaattagaacttatgaaaacagtaaactgttactgggtaccaatcagagcagccagttaaattttgtaatgtccaaactacaacaatttttttaagaaatagcacaatctccaagtgagctctcatacaccttgcatactgtttttctacagagcaaactagtcagctaaacttttatagttttatctcacatccacagaagctattagtttccagtttcttattttccctttttatggcttcatagaagaaattaacaggcattctaaatatgatccagtgttatgaattccatttaataaaaacagaagccaaaagtccaagctgggctcgtctaagaacaatgcaaaatcaaggccgaaaataggctgaaaaacaaaaggatctaccaagcaccaagtactccctttgtccaaagaaaaggtgtatcttgccttgtacatgacaattgagacattgaaaatgactagaatagctacaattattatctctagtgactatatctattgcattcatgaatggaaaaggtaaagctggatggttactaggggaataattggaatatgaaatacatcctatatctttgtgcatggtcattggaaagtatgcctgatattttggaggaatggtataactctaaaaatattgattttattgtatgatcaataaaagagctatatgtcatatttgtccgtgaagttccttatgatttctcagaaagattgacaatgacctaatagaagacaacattttcagtattagagataaactattttcttataggccaaatgcagtgagaattgaaatagacatgtgcgtgttagcatgtaggcgatgataccaacagaaagtgacccaagagttcgtcattgtaggtgctgaacaatcacatatgcaagtaaactgccattcctaataccacggcatcaaacatccagtaagagctcgttttcgatagatgctaagcacaatcaacaatggaagagtattctaggaatcctaaacccaaatactgcaccgcatacaccaaatttggaaaatgaaacgcttcaggtgctctcacctgtacattgcagccgctgagaggcgcatttcctcgaacacgtggtggtaggagaggacgacgagaccgatggcaataggatgaactgcgcgcatttccttggacatgtccatggccatggagaccccgttaattgccgactgcgacgatctggaaccttggataccatctctctccctcgtcgcctcctcaatctcacccctctaccaccacacgcccccattccgccgagtacttcgagtgggatgaggtggagtagaaggatgacgaggagtggaagtactccagggcgcggcatgcgcttcagccacggcgtacaggagagggagatcgccccgagctcgccacgaggatggccgggagagaccccgcccgcctgcagccaataccgcctccaaccgccgctgcacatcttcactttctctcaattcggaggcgtcgcagagaggcaaagcaaccggaggcgtacatggccgcctcgcgtctggtcatctggtgttgtaaacggcggcgccggccatcctcgtcgtcgccgggcaacatcctgccctacgcctccccgtcgaagtagttttttttttcaagggcttttgaggccccaatttccattgacagagatgagatagtatcatagtaaagctagtactcccttcgtaaaaaaaaaaaaaaaaagaaaaatcctgggtttctgtgtgcaacgtttgaccgtccgtttcattttaaaaaattatgaaaaaaattaaaaagataagtcaagcataaagtattaatcatgttttatcatctaacaataatgaaaatactagttataaaaaaaattcatatgagacggacagtcaaacgttggacacaaaaatctaagatttgtctttttttaagacggagggagtacaagattcttaaaggaaacaaaaggactaagcgcctgttcaccattttcaaccatactaattttttttaattaagttgtcaaaaaaatatctacgtttaattgttaccatatttggtaaatacataagaaatcatgtcaaaattttggcaatattaccatcttgcctttggtaaggtttactttggctacaatctaaacaggctctaaagaaaacaaaagatccagaatttcaacgcagcaacctcaagaaaaaaggggaactcggtctaagggcaacctcaagaataaaggagaactcggtctaagggcatctacaatcagaacactctaagactaccctcactaactgagagtactctctgggaaaccccccctcacaatgaaagataccctagtagcctaacgagtgcccctagcccaaaaagcccacgtaggtattttactatactacccctctgttctccccccccccctctctcttctcatttaccggcgcgcctcctcccctccgccgctcacctctctctccttctccctctcgttgccgccgctcgccggagactcgaggcgtgctcggcgatggcgcggtccttggccgcggcggcctcgtcggaccgggagcggcgtcatggtgcgtcacaggagcagcgggagcgacggcgaggacgacgaggagggccgcctctcctgttgccggcgtccaccaccgcccctctctcttcctctctctcccgtcggcgtcctccccggcatcctccgcctcgcgtcgtggtcagtcgggagcgccagatccggcgccgtagtgggtggatctaggccccccgtggcgccggcggtggcgggcaaggcaccggcggaggaggccgggcaaggcgcgcgaggcggcgagcacaggcgcctcaagccatctccgcccgtcgctagctggtggtcgatggctaccgcggcgcgcggtggccggatccggtcgtcgccgatccatcgtcatcaccgtcgcctctctcttctctctctctctaaggccgacggtggcggtcccggcggtggtaggcgcggcgccagcggtgtcgggcgcggcgcgacgagaccaaggggagagcgagagagacaagggtgtaaggggaaatttggggggacgacgccgtgcccacgagctccacacgcgcacaacgcggcgcctggctgcgtcttcccacgaaaagctagtgaggcacagagagagccgcatcccccagcagagggacgcgttccatcgcaggggacgacaccgatgaaaaaggggatgtccgtcgctaggggcacgggctgaagcaccgcattggtgatggcctaaggcaacacaaaaaatctgcagactttcgacaaaactatgttgccatcggaactaaggctgtgttcgggaaccctcattccccgtcatgcaaaacgaagcagcatttagcatgattaattaagttttagctaattttttttcaaaactgaattaatatgatttttaagcaactttcgtatggaaactttttgcaaaaaacacaccatttagtagtttgaaaaacgtgcacgcggaaaacgaggaggagaagttgggaacatgtcccaccgaacgcagcctctacatcccaccctaaaatttttcaccctgtcacatcgaacgtttaaacacctgcatgaagtattaaatataggctaaaaaataactaattgcacagattatgactaatttgcaagatgaatcttttaagcctaattgctctgtgatttgacaatatagtgctacagtaaacatttgctaataacggattaattaggcttaataaattcgtctcgcggtttactaacggattttgtaattagtttttttttattgcccgaataccccatgcgacaccctatataacacctgatgtgacatgccaaaactttacacctcttaatctaaacaccccctaacttgcaacaaaagcctaaaaccaaaaggatccagtcatccagaacatcagcaaccgtcgtctttaagcaaagaaccaaggagcatttacaatgcagtgcaaaagtagtttataagcaataaaacattacatttagccacctacaaccattgtgcaactggtccatataaaaaaaataacaaaagatacttgtatgcatatggactacccatatggaataaataatattatctatctcgacttctctctcttctcttaatgatatcttgtatttatacattatgaggattgctatatgtaaagtttatttatatagatctcagctatacagatattggttgataaaaatcacaaatttagcattatatcaaacaaccattgtttgacagacataaatttatacctgacgaacaacagccattcgacaggttaggtggcttgattataaaaaaagagagcaagcaagtactatgctgcaggtctatattgatggaaaacacgaggcctaggagatctgcttaactccagtgcaggtctaaaactcgccttcgggtatgctagcgtgccagttgatttgatcctgcaatcaacaagaaatagaaacaaagaagccgtggttaaacccataaatgatagccgatcggctaagtgccgatgacatatcatttatctttgagccgatgtcatataagcattgatcggcagtcattgataagtaaaaaagaactaaatctacccgatcggctgtagatattaacaatatataatccttatgtcgatatatacttaaatcaagtgattgggatagatcggtcgccatgccgatacagtataaatcacttaaatcgaaatatatattaacaacaaaattatatatgttcatagcatagccgatcagatagatctagcatgcatcggctaatactccaataccgctcaatattaagatattaaagcaagtagaacataccaagcagaagcctaatatacttaaaagcaacaagatcttaacataaagggcagatttaacatgtcgatcaagcatatagaataactatagttaaatcaggtaagatcggctgaaaccccgatgctatcctaatcggcaaccggaagacaggctagagattgaaattctaagcacgatttaatagatcaaactcaactgttgcaacattaagtatgaaaaaaagaacaatatctagacaatcaagtcgttggatgtttcatagagtggtggatatcttatataatccaagctaacgtcgctatttaacctaatcggccgccttctattaacagatgttagccgattgtaggttagatgacgatattaccgaagattatgtaagatatatgataactcgataaattacataaacaagattagagtgtcataaagatggaagcactaatcccgagaacgcaagccgtcataacaagttttacctcttgttgaagatcgaaaccgatacagctcaacccgaaagcaagaactcgtcgaaataaaacgaaagcaaaaagagtggcgatgtgccgagattgtattgaacgtatgttgtttgattacatggggttcgggtctatttatacccgagaattacaaaatatgtccataccggacacgactcttatctctaacaaactctaagatatcataagtctttgcggcagacttttgcccaaatatatctctaaggaaattacataaaatatcctaattaatagatacaattgccttctcaggactctatccatgcgtggcaatcatcttgaagcatatcaacccaacctgatgttgtacaccaagtcgtattatcgaaatcggctgcattacctaaccaagtctgactcgaacttagccgatccaatcgtagccgatccggactccagccaattcttgctctgttcccgcgacaatcctcatcttagattccgcttcgatctaatctccctttccgatgctgatattatcaaatttggtcgttaacaatctcacaacccactcacatgtatgcacacacatcccaaattcccaattttttaagcttggtcgaacaacctggtgttctataaggtgctaaatttgtgatttcagacaaccacttacaattttcattaaatttgtattatttctaaaaaaagttcttttaaaagattgtgagggcacatccattttgcgattaagggagataaaagtagactattccttctcaaataacagtatttccaaacgtagcacgattagtgtccgaggtgaattgacgaatctacggatacgcgacgtgtcacgtgtgcggcactacagccatctgcaaggagcggatatgctctcggattaatctgttttcgtccataagtgctacagtttgtgatttgtctgatcatgacaaaggtctacacgcatgtacacctgttcacataatgacacgatcaaaatctgttaagtacgtcccacgtacgatacgactacgatgccaacggcatctttgattatttgcatttgcattgacttgatatagtatgtcaccatcacactatcacaattcagtcatacaagtcaggcttggagtactgaacaggctctctctagctctacatgtataaaaaaaaatcagtttcaagcatcatacaatatagtcattcattcagctgccacccgccaagatgtcacctcgggtagcccaacgagagtacgagccgttgttacttgtactcctcctcctactacaaaccttgatcgcgagctcgcttccatgcttgccggaccaggcggcggcgctgctccagctgaagcgatcgttctcggcgaccaccgcgtccgccaccgcgttccggtcatggcgcgccggcaccgactgctgccgctgggcgggcgtccgctgcgacggcggccgcgtcactttcctcgatctaggcggccgacgcctgcagagcggcggccttgacgccgccgtcttcagcctcacgtcgctgaggtatctcaacctcggcggcaacgacttcaacgcgtcacagctcccggccaccggattcgagaggctcactgagctcacccatctcaacatctccccacccagcttcgcaggccagataccagcaggtattggaagcctcaccaacttggtttctcttgatctgtcatctagcatctacatcgtcaatcaaggagatgacgatgtcagtatcatgtcaaatttgttacccccctggggcttctcgagggtaaacttcgagaagttgattgcaaatcttggtaatctgagggagctctatcttggattggtgtacatgtccaacggaggcgaagggtggtgcaatgctctggctaattccactcctaagattcaggttctgagcctaccattatgccagatctctggtcccatttgccaatctctgtttagtttgcgatccctttctgttgttgacttgcaaggaaatgacctgtctggtgccatacctgaattcttcgctgatttgtcatcccttagtgttcttcagctttcaagaaataagtttgagggtttgtttccacaaaggatcttccagaacagaaaactgacagctattgatattagctacaactatgaagtttatggtgatttgcccaattttccacctaatagcagtttgatcaaattgcatgtcagtggcaccaagttctcaggttacataccaagctctatttctaatctcacggatctgaaggagctgagtctgagtgcaaataatttccctacagaactgccgtcttctctaggaatgcttaaatccttgaacttatttgaggtttcggggctcggcctagtaggatcaatgccagcttggataacaaatctaacatctttgacagatctccaaatttctcattgtggtttgtctggatctttaccatcttccataggcaatctcaagaatctcagaagaatgtctttattcaagagcaacttcactggaaacataccattgcaaatctttaacttgacacaactgcatagcttgcatcttccactaaacaacttcgtggggacagtggaacttacctcattctggagactaccatacttatcacaccttgatctttcaaataataaattatctgtggtggacgggttagtcaatgattcagcagtgtcctctcccaaagtaaaattcttgagcctagcttcctgcaacatatcaaagtttcccaatgcattaagacatcaagataagataatcttccttgacctttcaaataaccaaatgaatggggcaatacctccatgggcatgggaaacttggaaagaatcgttcttcttggacctatcaaataacaaatttaccagtcttggacatgacacgttgctccccctgtacacaagatatatcaatctcagttataatatgtttgaaggacccatacctatacctaaagagagtacagactctcagttggattactcgaataatcggttttcttctatgccgtttgatctaattccatatcttgctggtacactatctctaaaggtctctatgaacaatgtctctggagaagtcccatcaacattttgtactgttaagagtctccaaatccttgacctttcctacaatatcttaaatggctcaattccttcctgtctgatggagaattcatcaacactaaaaatattaaatttgaggggaaatgaacttcgcggagagttgccacataatatgaaggaagactgtgcatttgaggcattggatgtcagctataattggattgaagggacactacctaaatcattagtaacttgcaaaaacttggtggtacttaatgttgcgaacaatcaaattggaggctcttttccatgttggatgcatcttcttcctaaactccaagtccttgtcctgaagtccaataagttctacgggccgttggggcctactcttgctaaagatgatgaatgtgaactacagtatctccgaattcttgatctagcttcaaacaacttctcgggagtattgccttatgaatggtttaggaaactaaaatccatgatgtcagtctccattaacgaaacattggtcatgaaagatggagatatgtacagcacatttaaccatataacatatctttttactgctagatttacatataaaggactggacatgatgtttcctaagatcttaaagacctttgtactaattgatgtctcaaataatagattccatggcagcattcctgaaactattgccacactaagcatgctcaatggtctcaacatgtcacataatgctcttacaggaccaattcccaaccagcttgctagtctgcatcaacttgagtctttggacctctcatcaaataagctttctggggagatccctcaaaaattagcatccttggacttcctatcaacattgaacctatccgataatatgctggagggaagaataccggagtcacctcatttcttgacactccccaatagttcatttatacgaaatgctggtttgtgtgggcctccattgtcgaaagaatgcagcaacaaatcaacatcaaatgtgatgccacacctttccgaagagaaatctgcagacattatactatttctctttgttggattgggttttggtgttgggtttgctattgcaattgtagtgaggaaaccttgcattggcaaataatcttcatcaaatccacccatttttatatttatatgttcaggagtttgccagtctgcttccccttgtaaatttagctgtcattatagttagcctgtatgatttatagtactatgtgcacgtacaacatttttttccatcatcatgcatcctataagattagtattgaaaattttatacaagccaacagaaaattgttatgtctgaaccaagaaaggaatagaaatgcatgaccacaaatgtggcattattagggtcagtttaacttgtagcatagatcagtgagctatatgccgtgattttgtgtttgaaatgtatacttacacagaacttacttaagtaccaaacaaccatactggaacacaaaatttctgtgtgaagaactgaagatcacttaattatgtgttggaataaaactttctgtgaaaagatcacttgcaatacaattgtaatcagcgttatactgataatgttactagtagtagtcacactaatactaacctgaatcttgtatatgcaccaaattaggtagtaagaaatatatatatgaactaactaaatgaggtcatccaagaacaatgcacaagcaaggcttaaaataaatggaaacaagaaagcaatgttaaatttacccgactgtttattaagtatcacctctacatctatacctaaaattaaaacggtgtcatatatcaggtcgcacattgaactgctagattcctaataggctaataccacagcagcagcagcagcagcagcaataagctgcatacgtaattccgtagaatcgtagtaattccaaaatcggttcataatattcgagaaatactggatttcacacacaaacctgtgcaattcagccgatgaacacggaaggaccattccatcaaacacctggcggacgacaagagcccgccgatgcaaacctcctgggagtgggacatggacatccccattgtgaccgcattggttgtcagctggtcacccaccccacttgggctcccaaatcccatgacggccaccttgtgctcaacgcctcaacccggtgcccgtgcccccattccggtggcggtggttggggattccggtgtacagcctgcggtggggatgggattgggagttcgccgagtcctccgagtgggatgcacgcggaggagaggacgacgtgaggaggggctcgcaagtggcggcggcggcggcgcaacccctccacgacggcgtgcgggcgcctgcgccgcatatggacatatggtgtacatcgaaattacagattttgtatgggcctcagacatctggcccaacaagggtccgactcattcgctaatttctgaaatacgtactccgtcggaccaataatacctgtcgtttgggcaatggtaaggttaaactttagaatctttaattatgtatcatttttaaaatatttgtctcttaaatatgatgactacattatagattcgtcttaaaaagtattttaataagatcatatatttgttaacacctttttacatattataatagaaaataatgatcaaagttgtttttttataccgtgtccttattcaaaacgacaagtattatcaatcgtagggagtaacctctattatctgaacaagcaaattgttacgtacgtattcaaaatttaaaatttaatgcatggttaaatttatcatggtgttctaaactagttagtggtttttaatttctcgtatatattacgatgcttgtaacaacaaatccataattatagaaaattacattcaaatgatcagttcaacggtattacttttatcaaacaaaatttaaattatattagatttatggtttgtcagatattactagggttgaattaatatgtgtgcacacattgtattttttttttgggaaagatggtacaaatgattgactgagaaaccacaacaagttttcttaatcgaaaattacatcaagtttcatttgcggcaaactaataaaatcataagaaatatgaaaaactatcacacgagcaacagcaattaaaacagaaacacaaaagaaccacgtatacactgtccaagtagaattccatgcctcccgaattgatgaaacgcgcaagctcgcaagtgtaagtgtcacaaatgcacgcacatttatcgggtgcctagtgcttaggagggcacatcaccggccggaaagcgagcgggccagtggcatacatgacattatagtagtcatggtcggaccaccgcttgccctcgtcacggagtggcgcaccctcaatgctagagtagttgatgtttgtggggttgttgcattcgaaatccggcgaggcatgaagacgcacatagcacgccttacgcggatcacccatgtagaagtcggagactttagtctcatcgagctccgcgcggaagtagccattatcgtcggcgacggcctgatggcacctcaccattgcgcgattcttggcgtcgtggcatatgacagacacctccgccttagacagcggcttcgcgtcttcgaggctgtgtgtttctttgcacgcagctctggcagtacaccataccctccaacctcaccaacagcttgtcgctgtgggccggaggggtgtactgctgcggcggcggtggcggcgatggtgatggtgtggtgtaaccataatttgcggtggcgccggcggccaggagggacacgaacacgaggatcgcgagaggatgcagggcagccattgctctgagctagcttgctgtgctccgtgctcgactgatgagatgttttgttttgaagctttggctatgtcgaaacgaagaggcgtgtgggttatatactgcatgccatgtactaacgtgcggacatgtagatggaaattaactgtcttgattttggatgaagatcacattttattttttgttattcgattctgacaatatataatgattagcccgcgaaagaaatgctagcatgtaatcattgatctgtaaggcaatttgaatagaagaaatcgcatgctcatgatctgcctggtgattagttaagagttcgtagtattcaggaggaagatacgcaggtttgtcggaacgtgcagcccttaacggcactgaaataccaggttctccaccctggcagatgatttttgccgatagagctacaatatttatgtcagtactctgaaaaggagtagggcatgtcatttcctactcctaccgtcccataaaaaacgaatttaggacgggatgttacatattctattatgatgaatctggacatatatatatatatatatatatatatatatatatatatatatatatatatatataagattcatagtactagaaagtgtcatatccggtactagattggttttttatgggatggagggagtatgtaaaatatatgcaaattttgctacaggacattgcgactttgtggttttagctataggacaccacgtaaagtgacttttgggagaagacactatgtaaatatggttatttaccacgagacaccgtatccattaaattagtatttttgtgctgacgaggctagaaggggcccactttgttaaacatcatgaccgaattgcccctcttcatcttcctcttcctctcctctcttcccctctctctccctcctttctctcttctctcttctccggcgaggcattcaacccgcaagcggcggcgcgaccaccagagctgcagcggcgcggggaaccactcctcacggcgccacccaaacgtgaactgcaggtacgccgcgagcagcagccatgccacagcgcgcaccgccccgacaacggcctctagtggtatgttcccggtggcgaggaacaccgcgatgtcgctgagctcaacatggaggtacgagaatgagccaccggcggatgggatctccgtggtgagcggaggaccgagggcaccagatccaacgcccccgttgagctcagaccatggagagaggggcatgcgacgatggtgggggagggggagcagcggagagaaggcaacagaggaggagcggcatcgccagtcatgagagtggaggggagggggagaggcgccgccgggagggagggggaggtggagctcgtggtggggggtgggaggggaaagtgtgattagggttagggttataggcagcaacggttttgatggatttagaatcgatccgagtcatccatcaaaacgagtggcttagatcgatcctgtgtcgggccggcctccatctcgggccacaacactgttgggccacgcgctcttcatgggccggacgcgcaatagcaggccgatagggtccaatgggttttttttttccttttttagaacctttttatttgtaagcaatatattttttatgggctcgtaatatgaaaaactaaaacctaattaatcatctaatattttatatttgctataattttagtttactcgtagcaacgcactggcatcttttctaacaaaatttaatttatattagatttatggttcgtcagatattactaggattgaattaatatgtatgcacaccttgtattttttttttggaaagagggtacaaatgattgattgaaaaccacaacaagtttatttaatcgaaaattacatcaaatttgatttgcagcaaactaataaaatcataaaaaatttaaaaaattatcacaccagcaacaacaattaaaacagaaacacaaaagaaccacgtatccaccgtccaattataattccttgcctcccgaattgatgaaacgcgcaagcgtgcaagtgtaagtgtcacaaatgcagacacatttatagggtgcctagtgcttaggagggcagattgccggccgaaaagcgagcgggccggcagcgtacataatattataatattatagtagtcatggtcggcccactgcttgccctcgtcacgtagcggtgctccctcgatgctagagtagttgatgtttgtggggttgttgcattcggagtctggtgaggcccgaagccgcacatagcacgccttgcgtggatcacccatgtagaagtcggagacattggtttcatcgagctccgcacggaagtagccgttatcgtcggcgacggcccgacgacacctcacgatggcgcgattcttggcgtcgtggcagatgacggacacctccgccttaggcagcgatttcgcgccttcgaggctgtgtgtgttcctttgcgcgcagctctggcagtacaccataccctccaccttcaccagcagcttgtcgctgtgggccggcggggtgtactgctgccgcggcggtggtggcggcgatggtgatggtgtggtgtagccatagtttgccgtggcgccggtggccatgagggacacgaacacgaggatcgcgagaggaaggaagtcagccattgctctgagctagcttgctgtgctccgtactcgactgatgagatgttttgttttgaagctttggctgtgtcgaaacgtagagaggcgtgtgggttatatactgcatgccatggactaaatgtgaggacatgtagatggaaattaaacttgattttggattaagatcacattttattttttgttattcgattctgacaatatataatgattagcccggcgaaagaaatgatagcatgtaacgattgatctgcatggcacttttaagagaagaaatcacatgctcatgatccgcttggtgattagttaagaatttgtagactataaagtatattcaggatgaagatatatatgcagatttgccagaacgtgctgcccgtgtctgtacctaacggcactgcaataccatgttgggcagatgatttttttgccgatagggctacccctactacgaaagtgatttttgcacacggcccaaaagagattttcgtgtgcagtagggtagcccgctcgcactaaaagatctacgaaaatagctatttttgcgtgcaggagtttgagagaaagtgagagagtagtatgtggagaagaggaggtgagagagaggagagatgataaggatgacttagaaaaaaaattaagtgctaggagggaaaagagaaggtaactcgaacttccgggcggacctttaagatggccgtctgcgaaaatatattttcccgtgcagccccttaagaggtccatatggaaaaataatcttattttcctgtgcagctacttaatagggtcgtctgcgaaaatgttagtcgatttttgtagacacggatacttatggtccgtctgcaatatattgaggagctcatccagaaaaatcattttttatggtgattatttatatcagtagctacattattctccatacagataggttttgctattttacatgtgatagatttttgggcttctatttttcgatatgttgttcataggattttgcatcaagattcgtgtttatgtagttataacttgcaattacacttatttatgtagtacgtttcatgtagtattaaagtaccatgacgtcttttttcttagcgcctgaaactaacggaaagaaaacgagtgtatttttctcattgttttgtagaaaggagttacataggcgctatgccagctaaaattggaaacaataccaccaagaaatttcgtttgcacttgttttggaagttggaggatgtgttctatctggttttcggtcaagggacgattttgtaattcggtgataagacgagggatctccactgtactttttccacattgaaattacagattttgtatgggcctcaaacttttggcccaacaagggtccgactcattcgccaatttttgaaatacgtaacctctggtatctattttttagataatggattttcattaatccggcctctatatccacgatggatatagacagctaaaatgatataagagcacttaaactcaaatctcaataaagaggagaacacacaaccaaaaaacaaaaaacctacaacctcgacacatccctgcatcccgacattctctcctgaaatagtcaaaatcgatgagtggaagtcgtttagtcacaaccgcccctagtacgttgtcgctgcgaatctccactggtgccttcttcatctgcttcaagtgaaccgatgccacgcaccaccgagtagtccaccttcatccatcgtcgtctagtcagaactagccaactagacacgggctgaaaggatctgcttcaccggattcctaagcctctgccgcccatagggccgctgccaacgtcggaatccttctccgcctctccgattcccagcccactaccacctctgccaacgtcctttgccgtggtcagagaggacatcatcttccgcccggactccaaggcctccgccgccccaagggctgccatcgccgattggatccaccttcacctgaaccatctgcatcggtgattacgccgccactgcctctagggctgcagctgccgcaaccgaggaggtcattgcttggactcgcacaccgccgctgcccctagggtcgcccgctagctacgaaaccaccttcgccggaaccgccttctccttgccgaggaccggacatcaacgcttacgtcgccgttctccacagcatccaccgtcgcccaaagaatcgtgtcgccgacgtcttgccgacccgccgccgcactgcctcccgacccctccactgctgcgcgcaaggtgcggttcggccaacgccgctcgccaactcgcgcgcctccgtacctccggaccacctccgcagccgcgctcggcccggccggccaccgccgcccacggccccgtcaccttccacgccaccagattttgggggccggaaccccagactcggtacagccctcagccgcgtcgtggtctccgccgaaaggccccgctgtcgccttcctcactgccgctcggcacgccggcggcctgctcgggcggcggcaaggcgaggagacaaggaagcgagaaggagacgaggaaacgctgtgaggcgagataatctaactaagcaaattacctacgtactcaaaattcaaaatttaaggtatagttaaatttagcatggttttccaaaatatttagtgattttaatttgtcctatatattacgatgcttgtaacaacaaagccataattatagaaaattacattcaaatatcagttcaacagtattatttttatcacataaaatttaatttatattagatttatggttcgtgagttattactagggttgaattaatatgtatgcacaccttgtattttttcgaaagagggtacaaatgattaactgaaaatcacatcaagttttcttaataaaaaattacatcaagtttgatttgcagcaaactaataaaatcataaaaaattacaacacaatcacacaagagcaacaacaattaaaacataacacaaaagaatcacgtatccaccgtccaattagaactccatgcctcctaaattgatgaaacgcgcaagtgtgcaagtgtaagtgtcataaatgcagacacattcatagtgagcctagtgcttaggagggcagatcgctggccgcaaagcaagcgggccggtggcgtacatgaagttatagtagccatggtcggcccaccgcttgccctcgtcacggagcggcgcaccgtcacggagcggcgcaccctcaatgctagagtagttgatgtttgtggggttattgcattcgaagtccggcaacaaccgaagccgcacatagcacgccttgcgcggatcgcccatgtagaagtcggagactttggtctcatcgagctccacgaggaagtagccattatcgttggcgacggcccgacggcacctcaccatgacgcgattgttggcgtcgtggcaaatgacggacacttccgccttaggcagcggcttcacgccttcgaggctgtgtgttcctttgcgcgcagctctggcagtacaccataccctccaccttcaccagcagcttgtcgctgtgggccggcggggtttactgctgctgcggcggcggtggcggtgatggtgatggtgtggtgtagccatagtttgcagtggcgccggcggccaggagggacacgaacatgaggatcgcgagaggatggaaggcagccattgctctgagctagctcgctgtgctcgactgatgagatgttttgttttgaagctttggctgtgtcgaaacgtagagacgtgtgggttatatactgcatgccatggactaaacatgcggacatgtagatggaaattaagcttgattttgattaagatcacagtttattttttgttattcgattctgacaatatataatgattagcccggcgaaagaaatgataacatgtaacgattgatctgtaaggcacttttaagagaagaaatcacatactcatgatctgcttggtgattagttaagaatttgtagactataaagaatattcaggatgaagatatatatgcagatttgtcagaacgtgctgcccgtatatgtccctaacggcactgcaatatggtagggcagcctgctcgcgctaaaaaatctacgaaaatagctatttttgcgtgcaggagtttgagagaaagtgagagagtagtatgtggaggagaggaggtgaaagataggagagatgataaggatgacttgaaaaaaaaaattaagtgctaagagagaaagatgaggtaactcaaacttctgggcgggcctttaatatggccgtctgcgaaaatatattttcccgtgcagccccttaagaaattcgtatagaaaaataatcttattttcctgtgcagcagattaatagggtcgtctgcgaaaatacaagtcaattttcacagacacggatacttatggtccgtctgcaatatattgaggtgctcatccatgaaaatcatttttatagtgattatttatgtcagtagctacattattctccatagagaggcgtgtgggttatatagtgcatgccatggactaacgtgcagacatgtaaatggaaattaagcttgattttggattaagatcacattttatttcttgttattcgattctgacaatgtatgatgattagcccagcgaaagaaatgataacatgtaacgattgatctgtaaggcacttttaagagaagaaatcacatgctcatgatctgcttggtgattagttaagaatttgtagactataattctataaagaatattcaggatgaagatatatatgcagatttgtcagaacgtgctgctcgtgtctgtccctaacggcgcttcaatatcttgttgggcagatgatttccctaatggcctagccgcatgtgaaaataattgctggccgtatgtaaaaacctattatgtagtagtggcagtatgtggagaagaagaggtgagagagaggagagaaggtgaggatggcttgaaaaaaaattgaaatgctaggagggaaaagaggagataacttaaactactggacggacctttaagatgatcgtctgcgaaaatatatttttactactggacggacctttaagatggccgtctgtgaaaatatatttttcctgtgcggcctcttaagatgtccatctataaaaataaccttattttttcgtgcggctgcttaatagaatcatctataaagatatgagtcgatttttgcaaacacggatacttagtccacctgctatctattcaggtggtcatccatgaaaatcatttttaagtagtgattatttatgttggtagctacattactctccatacagataggttttgctattttactcgtgacagatttttgggcttctgtttttttatattttgtttataggattttgcatcaagattcgtgtttatgtaattctaacttccaattacactcatttatttagtacgtttcatgtagtattaaagtaccacgacgtattttttctttgggcctgaaactgacgaaaagaaaacgggtatatttttctcattgtttgcagaaaggagccatataggcgctatgtcggctaaaattgggaacaataccaccgaggaactttgtttgcacttattttgaaagttggaagatgcattgtggatgtgtttagttgaaagttggaagttggcctgtctctggttttttatcgagggatgattttctaattcggtgataaaatgagggatctccgctgtactttttccacatcaaaattacaaattttctatgggcctcagacatctggcccaacaagggtccgactcattcttcaattttcgaaaatacgtaacctctggtatcggactaagcaaattacgtacgtactcaaaattaaaatttaaggtatagttaaatttagcaaggttttccaaatagcaagtgatttttaatttgtcctatatattacgatgcttgtaacaacaaagcctaattatagaaaattacattcaaatctcagttcaacggtattatttttatcaaataaaatttaatttatattagatttattggtcgtgagatataccagggttgaattaatatttatgcataccttgtatttttttggaaagagggtacaaatggttgactgaaaaccacaacaagttttcttaatcgaaaattacatcaactttgatttgcagcaaactaatataatcataaaaaaaattacaacacaatcacacaagggcaacagcaattaaaaaatagaaacacagaagaaccatgtatccaccgtccaattagaactccatgcctcccaaattgatgaagcttcataggaagcctagtgcttaggcgggcagatcgccggccggaaagcgagcgggccggtggcgtacatgacgttatagtagtcatggtcggcccaccgcttgccctcgtcacggagcggcgcaccctcaatgctagagtagttgatgtttgtggggttgttacattcgaagtcctgcgaggcccgaagccgcacatagcacgccttgcgcggatcgcccatgtagaagtcggagactttggtctcatcgagctccgcgagaaagtagccgttatcgttggcgactgcccgatgacacctcaccatgacacgattcttggcgtcgtggcagatgacagacacatccgccttaggcagtggcttcgcgccttcgaggctgtgtgtgtttctttgagcgcagctctggcagtacaccataccctccaccttcaccagcagctttttgctgtgggccggcggggtgtactgctgcggcggcggtggtgatggtgtggtgtagccatagtttgcggtggcgccggcggccaggagggacacaaacacgataaccgcgagaggatggaaggcagccattgctgtgagctagcttgctgtgttccgtactcgactgagatgttctgttttgtagctttggctgtgtccaaacgtagagatgcgtgtggattatatactgtatgccatggactaaacgtgggtacatgtagatggaaattaactgtcttgattttggatgaagatcacattttatttttttttgttatcgattctaagaaatatataatgattagcccgcgtagaaatgctaacatgtaatcattgatctgtaaggcactttgaatagaagaaatcgtatgctcatgatctgccaggtgattagttaaaaattcgtaggcgataaagaatattcaggaggaagatatgcagatttgtcggaacgtgcagcccttaacggcactgaaataccaggttctccacccaggcagatgatttttgccgatagagctacagtatttatgtcagtactctgaaaaggagtatggcatgtcatttcctactcccaccgtcccatctagaacgggacgtgacatattatagacaatgaatgtggatatatgcatgtccagattcgtagtacatactaggatatgtcatatctaatactaagttggttttttatgggatggagggactatgtaaaatataggcaaattttgctacaggacattgcgactttatggttttagctgtaggacaccgcgcaaagtaacttttgagagaagacactatgtaaatgtagttatttgccaccaaacaccacatccattaaattagtatttttgtgctgacgagcctagaaggggcctactttgttaaacatcgtgaccgaattgcccctcttcctcttcctcctcctcctctcctctttcttccttacctctcttcatctctctccctactttctctcttctctcttctccggcgaagcatacgacccacaagcggcggcgtgaccaccagagccgcagcggcacagggaaccactcctcacggcgccacccaagcgtgaactgcaggtacgccgcgagcagcagccatgccattgcgcgcaccaccctgacgacggcctccaacggtatgttcccggcggcgaggaacaccgcgatgtcgctgagctcaacgtggaggtatgagaatgagccaccggcagaggggatctccgtggcgagcagaggactgggggcaccagatccagcgcccccgctgagctcggaccaaggagagagggggcatgcaacgacggtgggggagggggagcagcggagagggggcaacggaggacgagcggtgccgccagtcgtgagagtggatgggagggggaggaggagctcgtggtggggggtgggagaggaaagtgtgattagggttagggttttaggcaccaacggttttgatggatttagaatcgatccgagccgtccatcaaaatgagtggcttagatcgatcctgtgtcgggccggcctccatctcgggccatagcactgttgggccacacgctctttatgggccggacgcgcaatagcaggccgatagggtccaatggggcctttttttctttttttagaacctttttatttgtaagcaacatattttttttatgggctcatatcacgaaaaactaaaccctaatcatctaatatttttatatttgctataattttagtttacccgttggccgttgcaacgcacgggcatcttttctaataaaatttaatttatattagatttatggttcatcagatattactagggttgaattaatatgtatgcacaccttgtttttttttggaaagagggtacaaatgattgactgaaaaccacaacaagttttcttaatcgaaaattatatcaaatttgatttgcagcaagctaataaaaacataaaaaatttacaacacaatcacacaagagcaacagcaattaaaacagaaacacaaaagaaccacgtatccaccgtccaattataattccatgcctcctgaattgatgaaatgcgcaactgtgcaagtgtaagtgttacaaatgcaggcatttttatagggtgcctagtgcttaggagggcagattgccggccggaaagcgagcaggccggcagcgtacatgacgttatagtagtcatggtcggcccaccgcttgccctcgtcacgtagcggtgctccctggatgctagagttgttgatgtttgtggggttattgcattcgaagtccagtgaggtccgaagccgcacatagcacgccttgcgtggatcgcccatgtagaagtcggagactttggtctcatcgagctccgcgcggaagtagccgttttcgtcggtgactgtccgacggcacctcaccatgacgcgattcttggcatcgtggcagatgacggacacctccgccttaggcagcggcttcgcgccttcgaagctgtgtgttcctttgcacgcagctctagtagtacaccatactctccaccctcaccagcagcttgtcgctgtgggccggcggggtatacctgtggcggcagcgggggcggcgatggcgatggtgtggtgtaaccatagtttgcggtggcgccggcggccaggagggacacgaacacgaggatcgcgagaggatggaaggcagccattgctctgagctagcttgctgtgctccgtactcgactgagatgttctgttttgaagcttttgctgtgtccaaacgaattaaattttaaaatatactgtttatccaatttttttcaggaatattcgggataaatttttttttttacaaatataccatcaatctcgcgcaatcgttttacgaaaatgacgtggacatgacgtcaccagcggtatcgcgtgacgaaagcgcgagaccgtgcggtatcacgcggcagtggcgcgagaccgcgcggtctcgcggaagcaaagagcgagtccgctcggtatcgcttgttcaagcagcaacaccggcatggcagtcccggccgtcaatggttaattacctaattaactattaactaataataattagtaattaattatcctgattagtgattaattaattgctaatcaggataattaatcaacaggcatgtcagtgcggtatcgctatttcaatcagcgagaccctttggttccacgagaccgtgcggtctcgcgcagttgttgcgcgagactgtgcgctctcgcgctttcatcgcgcgataccgtccgtgatattacgtccgtgtcattttcgcgtaacgattacgcgagatcgacggtatatttctgtaaaaaagtttgcatctcaactattctttaaaaaaaatgaggaacaatatatttttaaatttaattcatgtccaaacgtagagaggcgtgtgggttatatactgcatggcatggactaaacgtgcggacatgttaaattaagcttgattttggattaagatcacagtttatttttgttattcgattctgacaatatataatataatgattagcccggcggaagaaatgataacatgtaacgattgatctgtaaggcacttttaagagaagaaatcacatgctcatgatctgcttggtgattaattaagaatttgtagactataaagaatattcaggatgaagatatatatatctatatatatctatatatatatatatatatgcagatttgtcagaacgtgctgcccgtgtatgtccctaacggcactgcaataccatgttgagcagatgatttttttgcctatagggctaccactactaagaaagagatttttgcacatgggccaaaagagattttcgcgtacggttggacagcccgctcgcactaaaagatctacgaaaatagctatttttttgtctgggagtttgagagaaagtgagagagtagtatatggaggagaggaggtgagagagagatgataaggatgacatgaaaaaaaaattgaagtgctaggagggaaaagaggaggtaactcaaacttctgggcgaacatttaagatggctgcctgcgaaaatatattttcctgtgcacctgcttaatagggtcgtctgcgaaaatgtaagtcgattttcgtagacatggatacttattgtccgtctgcaatatattgaggtgctcatccagaaaaattatttttatagtgattatttatgtcagtagctacattattctccatacatataggttttgctatttttcgatatgttgttcatatgattttgcatcaagattcgtgtttacgtagttctaacttgcaattacacttatttatgcagtacgtttcatgtagttttaaagtaccatgacgtcttttttcttagggcctggaactaacagaaagaaaacgagtgtatttttctcattgtttgtagaaaggagttgcataggcgctatgtcagctaaaattggaaacaacaccaccgagaaacttcgtttgcacttgttttgaaagttggaggatgcgtgggacgattttgtaattcggtgataagatgagggacctccactgtactttttccacatcgaaattacagattttgtatgggcctcagacatctggcccaacaagggtccgactctttcgccaattttcgaaattacgtacgtactcaaaattcaaattacgactcattcgctaagggtatctgactaagcaaattacgtaagtactcaaaattcaaaatttaaggtatagttaaaattggttttccaaaatatttagtgctttttactttgtcctatatattacgatgcttgtaccacaaaagccataattataaaaaaattacatccaaatctcagttcaacggtattatttttatcacgtaaaatttaatttatattagatttatggttcgtgagttattactagggttgaatcaaaatgtatgcacaccttgtatttttttcgaaagagggtacaaatgattaactgaaaatcacatcaagttttcttaatcaaaaattacatcaagtttgagttgcagaaaactaataaaatcataaaaaaattacaacacaatcacacaagagcaacagcaattaaaacagaaacacaaaagaaccacgtatccaccatcaaactagtttctcccaaattgatgaaacacgcaagtgtgcaagtgcaagtgtcataaatgtaggcacattcatagggagcctagtgcttaggagggcagatcgccggccggaaagcgagcgggccggtggcgtacataatgttatagtagccatggtcggcccaccgcttgccctcgtcacggagcggcgcaccctcgatgctagagtagttgatgtttgtggggttattgcattcgatgtccggcgacgcccgaagccgcacatagcacgccttgcgtggatcgcccatgtagaagtcggtgactttggtctcatcgagctccgcaaggaagtagccgttatcgttggagacggcctgacgacacctcaccatggcacgattcttggcgtcgtggcagatgatagacacttccgccttaggcagcggcttcgcgccttcgaggctgtgtgtgttcctttgcgcgcagctctggcagtacaccataccctccaccttcaccagcagcttgtcgctgtgggccggcggggtgtactgctgtggcggaggtggtggcggcgatggtgatggtgtggtgtagccatagtttgctgtggcgccggcggccatgagggacgcgaacaggatcgcgagaggaaggaagtcagccattgctctgagcacagctccgtactcgactgatgagatgttttgttttgaagctttggctgtgtcgaaacgtagagaagcgtgtgggttatatactgcatgccatagactaaatgtgcggacatgtagatggaaattaaacttgattttggattaagatcacagtttattttttgttattcgattctgacaatatatgatgatttgcccggcgaaagaaatgataacatgtaacgattgatctgtaaggcacttttaagagaagaaatgacatgctcatgatctgcttggtgattagttttgaatttgtagactataattctataaagaatattcaggatgaagatatatatgcagatttgtcagaacgtgctgctcgtgtctgtccctaacgacactgcaataccatgttgggcagatgattttttgccaatagggctaccactaggacaaaagtgatttttctcatggctcaagagaaattttcgcgtacggtaggacaacccacacgtactaaaatgtctacgaaaatagctatttttgtgtacgggagtttgagagagtgagagagtagtatgtggagaagaggaggtgagagagagaagagaagatgaggatggcttgaaaaaaaatagaagtgctatgagggaaaagaggagataatttaaactactgggcggacgtttaagatggccgtctgcgaaaatatatttttcccgtttggcctcttaagatgtccatctagaaaaataaccttatttttttttgcggctgcttaacaggatcgtctgtaaaaatgtgagtcgatttttacagacacagatacttggtccacctgcaatctattgatgtggtcgtccaggaaaattatttttaagtagtgattatttatgttggtagctatattattctccatacagataggttttgctattttacttgtgacaggttttggggcttctttttttatattttgtttataggattttgcattaagattcgtgtttatgtaattctaacttgcaattacactcatttatttaatacgtttcatgtagtattaaagtaccatgacgtcttttttctttgggcctgaaactgaacgaaagaaaatggatgtatttttctcattctttgtagaaaggagccatataaacgctatgtcagctaaaattgggaagctgaggaattttgtttgcacttgttttgaatgttggaagatgcattgtggctgtgcttagttcccttcaaacttccaaatattccgtcacatcaaatatttggacacatggataaaaaaaataccaattgtacagtttccatgtaaattgtgagacgaatcttttgagcctaattacgccatgatttgataatatggtgctacaataaacatttgataatgacggattaattagatttaataaattcgtttcgtagcttacaggcggaatctgtaatttgttttgttattagtctacgtttaatacttcaaatatatgtgtccgtatactttaaaaaagttttggctgtggaactaaacatggcctgtctctggttttcgatcgagggatgattttctaattcggtgataagatgagggatcttcgcagtactttttccacatcaaaattacagattttgtatgggcctcagacatctggcccaacaagggtccgactcattcttcaattttcgaaaatacgtaacctctggtatctgactaagcaaattatgtacgtactcaaaattctaaacttacagtatagttaaatttagcacggttttccaaatagtaagtgatttttaatttgtcctatatatttcgatgtttgtaacaacaaagactaattatagaaaattacattcaaatctcagttcaacggtattaattttatcaaataaaatttaatttatattagatttattggtcgtgagatattaccagggttgaattaatatttatgcataccttgtattttttttggaaaagagggtacaaatggttgactgaaaaccacaacaagttttcttaatcgaaaattacatcaagtttgatttgcagcaaactaataaaatcataaaaaaattacaacacaagcacacaagggcaacaacaattaaaaaatagaaacacaaaagaaccacgtatccaccgtccaattagaactccatgccttccaaattgatgaaactgtaagtgtcgcaaatgcaggcacattcatagggagcctagcccttaggagggcagatcgccggccggaaagcgagtgggccggtggcgtacatgacgttatagtagtcatggtcagcccaccgcttgccctcgtcatggagcggcgcaccctcaatgctagagtagttgatgtttgtggggttgttgcattcgaagtccggcgaggcccgaagccgcacatagcacgccttgcgcggatcgcccatgtagaagtcggagactttggtctcatcgagctccgcgcggaagtagccgttatcatcggtgacggcccgacggcacctcaccatgacacgattcttggcgtcatggcagatgacggacacctccgccttaggcagcggcttcgcgccttcgaggctgtgtgtgttcctttgcgcgcagctctggcagtacaccataccctccacccttaccagcagcttgtcgctgtgggccggcggggtgtactgctgctgtggcggcggcgggggcggcgatggcgatggtgtggtgtagccatagtttgcggttgcaccggcggccaggagggacacgaacacgatgatcgcgagaggatggaaggcagccattgctctgagcctctgagctagcttgctgtgctccgtggtcgactgagatattctgttttgaagctttggctgtgccgaaacgtagagaggcatgtgggttatatactgcataccatggactaaatgtgcggacatgtagatggaaattaattgtgctgattttggattaacagatcaaactttatttattgttagtcgattttgacaatatatataatgattagcctggcgaaataaatgatctgtaacgattgatctgtaaggcacttttaagagaagaaatcacatgctcatgatctgcttggtgattagttaagaatttgtagactaccgaaaatattcaggatgaagatatatattgagatttgtcagaacgtgctgcccgtgtctgtccttaacggcactgcaataccaggttgtctacacaagcagatgatatatatggagattatttagtagctacattattctccataaagacaggtttgctattttacttgcgatagatttttgggcttctatctttttatactttgtccataagattttgcgtcaagatttgattttgcgtcaagatttgtgtttatgtagttctaacttgcagttagactcatttatatagtatgtttcatgtagtattcaagtaccatggcgtcttttttctttgggtctgaaactgacagaaagaaaacaggtgcatttttctcactgtttgtagaaacaagagctttacagccaaattactggatccaaagcaagtctgctttttacatgcagcggatcgatctagccaacaccacatgatgcacggcgctatcacccttgtcaccgtgaggctgatgcatctactagcaaggagcccaaggccaccggatctagtgacctcggcctctgcgcgcaacagatccgagtagctggaggtgaagatacaagccactcctgctaccgtcctctttgatcatcttcgtcttgttgagttgtttcgcggaggcccatcgtcgggaggcttgggccggagcgtggcggagactgaagctgacccattgggccgtgcacctggggacgcctggaggtgcgggggcggagcccccgcgaaacggatcgtcatccattttagggttccaccatatatatacctcatgtaagccgccgtgcggcgttgtaacctctccccagatatagtgaagatattttgctggctagcgtccgtggttttttctctcctactttggaagggttttccacgttaaaatctcgtgtcttctgtgattgatctattgttctttatcgtttgtttgcctatcgtttcctaatacgtctcactctacaccgccctatcgatgtttggttaagggtgggcaaaatcgaactaaccaagatagaaataaaaaagatatgatcactgaatctgactaactaaatttagtctatcgattcggtaagtaggctcagttaaccaaaattccaaaaacagcccaataacaaccatcaagaaaaaaacaaaccatactcacttttctctctattccctaactacccttctccgccccaacatcccaatcatcactcgtcacgataccacatcgacggcatcaacaacacctacatcgtcttgccacttcgttgtgtcgttccccacgtagtcccgctgcgctgtaccaccattctttcgtccatggccgagctaggaattttagaaagggaaaagtccaaattacccccctgaactattgagtgagtacgaattatcctctggacccgaaaatcagacatcattcacccttgactattaataacagacaaagatcaccctgagcactattttggagcggttttgacctaaaattgtacatgtgcatcaacgtgacaatccagtcagtaaaaaaatagaaaaaaaatccttggacccacatgtcatctctctccctcccctgccctctctctctccacagcacccaacatcacttgttacaaaaaccacttcactcctccattaatcagaagcagaagacaacgacgaaggatcgtgcgttgcaggcatcgggagagggagaggaaggcaaggtggacggggatgtgcctcgcatatatgtgtttcacaccgtcgcatggctagtgttgctcacgctcgcgtcgtgccccacttttgcctctgtccccacccccgcccgccgctaccgtgcttggctccccatccgccagctgagagagacggaggtgaggggagggacaagagagaggattggggaaagagggagatagagaggtgaggggaaagaaatacagaggatgagactgacaggtggggcccatccatttaaaaaagaagaattgctgactggactgccatgtaggaccaaaaccactccggttcgagttagtggtaattcgtctgatattaataattgagggtgaaacatgtatggttttcgagtctgagggggtaattcatacttaggggtgtaattcggacttttccctttagaaaatttaggtgatggacaaagcctaactaaaaccactacatatttcgctcaaattgttcttagattagaaaaaatacctgtgcgttgcaacgggtaaaggcgtttttcagtgatacaacggctattaagagccaaggaataaattgaaacattagtatcgctatacattataattgaaaaggcgttgcctcctacctccttttaaattccagaaaacaagttccccatcaaatcaaactgaatctttctcgatctcccaaaattgattaaggattttttatccacttgatctcttcttttagttttttccaaaatcggaacgaatccacgaaactcgggataaaaacagttgggggaagatcactggcagaccatcattcacaaccgttaaacaaatattaaatctagttaattaaatccgaattgaaaggggaaattatggggaaaggatgagggacgagtagagaatcgatttttgcaattaattagagaagaaaacgcacaggaaggtatagatcgatgtggcggcggcgttagggttcggcctgggcagcgcggcggcggtggctggaggcacgtggcaacggatcggacttatacggacgacgtacaaaatcaaatacacgggatgcttgcttattttttttattagatgtacagatagatttgcgataaagagaaatattagtaaaccaactccaacacggatgacatactaaaattttggcagaaacatctttaatttttataatagtagagatttaaatcagagtaattttgttataaaattgcgatctaacacttatataaatgtggaagattttctcttaataaaatataattggtcccttgttatgtctttcctggactatggtgtagtatacatgagttgatagtcagcaatatcaacatgattaagtatttaagcatacacaattaggcaaggtgattagcctggcattggttcaggtttcaagttgctcagtggaaattgcatgggcagccctaatgggcgattgatcgcccgccaatgggggtagcgatcatattcgctacccccctcccctctccctccctccacctggtttcctttttggcaccgtattactttcttattttagtaaatttatacacctaaagtttacacatctaaagtttagagacccaaagtttataagtcaaaagtttatatatccgattcaaatttgaatttgaattcaaatattttttatatatagtatttctatacatctaaagtttatacacctaaagttagtttatagacctaaagtttatacacctcaagtttacacatctaaagtttagatacatgtttcaaatttatatttgaattatatctgattcaaatttacttgtttcatatttgaatttgaattatatccgattcaaatttgaatttgaattcaaatattttctatatatagtatttctatgcatctaaagtttatacacctaaagtttatagaaccaaagtttataaacccaaagtttataagtcaaaagtttacatacccgattcaaatttgaatttgaattatatctgattcaaatttgaatttgaattcaaattttttctatatatagtatttctatacatctaaagtttatacacctaaaatttatagacccaaagtttataagtcaaaaagtttacatacccgattcaaatttgaatttaaatttaaattttttatatatatagtatttctatacataaatttttctaactttttgttttttaaaaaaaatttgtgtggtgtactgtagtaggggaggagggaggagtgtatctagtagtatagggagggggcgggcgggtgatcgctgggcgggcgggggagcgatcacccgcccattagcatttccgagattgcatgcattagcaaacattgatgtgtgggtcctgttgacagaaaacacgaggcctgggagatctgcttaacttcagtgcaggtccaaaactcgccttcgggtgtatgagcgtggtcgttaacaggtctgtacccataaatcagccactgctactgaatcagcagtactgtagaggatctgcattcaggctggtgccttcatgcagtaggacacaaccgcacacatttgttgccatgcgcccgcaactaacttgcatggtaatacatcgattggagtcaacccttacatggcgtgaagcccgagcagccgcccgatctgcccgataggtgaatcggctactgcttccgtgctccatattgtgccgccttcttctccatagcggcaccccctcagtggagatctagtggcacccgcaagatgaaggtctagcggcagcagtcttaatagagaagggcatggccgcgggcaaaaggcagaggagagaaacacgcggacgccggcgataggtagatgatatttttttctgatttctttgattattgtgatcttcttgtctgaaatatttcgtgatttttgtgactcttttgtatatctaaaaatattgattactttcagtcatgatagagaccaaggccgcattgcttagcgttggccatttttcgattgcatgttggttttcatttttagattgtaggaatattagcaaaccaccaatattttcatcacaaaatataaatcaacttcttgattttacatagatgaccaaaatttcttaaaagaccggaaatcgagaccgaccttactgccacccccgcgtaaggtagccaatatattagggaagttggtgttcggcagcagggttatccaaatgtgatcactctaatctcacttattcacgtagagatttacccaggtttgggcctcctgaaaaatagctacgacatcttggcctaataaggaggaaagtgcaagtgaggtgatttgtgtaagtgggcatgcctgttggatggattggactgcacggttttggagcgcgggtttttacaatagcagacctacacctgctttgatgtgttttgcaagtatgacaatggtgctacaatggagcggtagagggtgagtgtgtgaatggtcggtggtccagagatcccttctctacagagatatcaaagttttcttgatcaaaaatcacatcaagtttgatttatagcaaattaataaaatcataatagatttacaacaaatgtcacacaagagcaccaataattaagatagaaacacaaaagaaatacatatccaccatccaaattgaattccacacatcccaaatttatgaaaagcacgcgcatgtaaacgtcgcaaatatagacaccacatttacatggggtgcctagttttagtgcttgggagggcatatcgccggccggaaggcgagaggaccggcggcataaacaacgttatcgtagccctgaccagtccatcgcttaccctcgtcacggagtggcgcacccttgatgtcagagtagttgatgtttgtggggttgttgcacttgaaatccggcgacgcctgaagtcgtacgtggcacgccttgctcggatcacccatgaagaagtcagagactttggtcacgccgagctctgtctggaagtagccgctctcatcggcgatggcccgcttgcactccatgacacgattcttggtgtcgtggcaggtaacggacacctccgccttgggcagcggcatcgcgccattgaggctatgcgtgttccggtacgcgcagctctggcagtacaccatgccctccaccctcaccagcaacttgtcactgtgggccggcggcggcggcggcgatggtgtggtgtagccgttgttggcagtggcgccggcggccaggagggacacgaggatcgcgagaggaaggaaggcaaccattgctcggagtcggagctagcttggtgctcaacttaagatggtttatcttaacctgaagttttggtgtgagaaaatggagagaagcatggggtttatatactgccatggactaattaaacgtgcagacatgtaggaaatcactaactgtcttgattttggattaagattgcattttatttttgtgaagataacatgtcatgattgatttgcaaggcacttctaagagaagagatcgcgtgttcatgatctgctgtgattagttaagatcagtctgtagacgataaagaatgttcggtgtgaagatatgcagatttgtcagagaacgtgctgcccgtgtgtgttcccatctgcactgaaataccacaggttctcggcacaggcaaatgatttttggcgatatagagctacattatttccgttagtactctgaaaattaaggaacagcatatcatcttctgtgtaaaatatacggttcatgtagtatctatttcctttgggtctgaaactaactgaaagaaaacggggtgcagttttctgattgattgtacgcagagcaagtctgtttttttttacatgcggcagatcaatcgtgcgaagttttgtcatggtaaggctgcaacatctgttcgcgaggaggcccgggccaccggatctgacaacctcgacctccccgcacaacacggaaccgggtagcttaaggacacaagccactcccgccgccacctttttctatcactcttcgtctcgccatgcactactcctatcaacgttaagttaggagtgggcaaaatagaccagaatcgaaccaaactaaccaaaacaataatgaaaaaaattatggtcattagatctgactagccaaatttaattgatcaattcgataagtaggctcggtaaaccgaaataccctaaaaacaaaaatttaagaaaaagcacaacataagccgatcaaaccaacaaaagcaaaaccctatccacttttttctttgttccgtaactaccctttcccacccccaccaccctcggcatcgacaacaccacaacgcatcatcctaccgcatcaccgtgccgctccccacgctatcctgtcgcgcatcctaccactcttctgtactgctacgttgtgtcgtgccgccctgcttctccgcaacgatgcctcctcaagtggagatctagcggcactcatgatatggagatctagcggcaataatcgtgatagaggaaagcgcaggtgtaggaaaaaggtgaaggagagaaacatgcggacgccggcgaaaagcaaatgttttttttgttttacagtactgcgattttttggtttgaaattattgatgactattgttattcttttgcttctcaaaatttgttgattatcttcagtcatgacagatacggaggccgcattgctcggtgttggccactttttgaatgcatgtagaccaaggaaactttgatgtggttttcttgatctactcatttgacaatggctagaaagtatgtgattttcattgtacttgtgtaactcagtaaattatttattatataaacacatacaatgtaggagactctccttaaaaaagttttctagatcgaaaatcacaccaagtttattttgcagcaaactaataaaatcagaacaaatttaccacaaatatcacacaagagcaacaataattaaaacagaaacacaaaagaaacattatccacaatccaaattgagaattcagtgcctcccatattaacgaaaagcgcacgtgtaaacgccacagacgtaggcacatgcacggggcgcctcttaatgcttgggagggcagatcgctggccggaaggcgagcgggccagcggcatacatgacgttatcgtagccctcgccagtccaccgtttgccctcatcacggagcgacgcgccctcgatgctggagtaattgatgtttgtggggttgttgcacttgaactccggcgacgcctgaagtcgcacgtggcatgccttgctcggatcgcccatgaagaagtcagagactttggtcacgccgagctccgtctggaagtagccgctctcgtcggcgatggcccgcttgcactccatgacatgattcttgacgtcgtggcaggtaacggacacctccgccttgggcagcggcatcgcgccgttgaggctatgcgtgttccggtacgcgcagctctggcagtacaccatgccctccaccctcaccagcaacttgtcactgtgggccggcggcggcggggtgtactgctgctgcggcggcggcggtgatggtgttgtgtagccgttgttggcagtggcgccgacggccaggagggacacgaggatcgcgagaggaagctggaaggcagccattgcttggagctagcttggtgctcgattacctgaagttttggtgtgagaaaatggagagaagcgtggggtttatatactgccatggactaattaaacatgcagacatgtagatggaaatcactaactgtcttgattttttattaagattgcgttttattgtgtgggctatttaattctgacaaaatataatgattggcctggaggagaaaaaaaagaagataacatgtaatgattgatctgcaaggcagttttaagagaagaaaacacatgttcatgatctgcttggtgattagttaagatcagtctgtagacgataaagaacgttcggtatatgaagatatgcagatttgtcagagaacgtgctgcccgtgtgtgtcctcaactccactgcaataccaggttctccagagagacaaatgatttttgccgatagcgctacattatttccgttagtactctgaatagtactctgaaaaggaacaagcatctcatcttctgtgtaaaatatacagttcatgcagtattgtcgtaccatgctgttccttttcttttggtctgaaactacctgaaagaaaacggagtgcagtttcctgattgtttatacaaacaagagatgtaaagccaaattactggacgcaaagcaactatgtttttttacatgcggcggatcgatcaagagctaacactgcatgattcatggcgctatcgccattgccagtttgtcacggtgaggttgccagatctgctggcaaggaggcctaagccaatacaaccccgacctccctgcacaacggatccgggtagctagaagtaagaacacaagccactcccaccgccaacctcttctaccactctccattttaccatgcaccgtccctatcgacgttcggtttgggtggtagtggtacaaatagaccgaaatcgaaccgaactaagcaagacacaaacaaaaaaaaaaaggtcacttgaatctgtctagccaaatttaatcgattaattcggtaagtaggctcaataaactgaaataacttaaaaaccaaaattccagaaaaaaaacccaagaacagaaaaccaaactaacaaaaacaagccctacgtactcacttttctctctattacatttccctaaacccaacagcagtccaccaaatcaacaaaagcaagccctactcacttttctctcttttccatttccctaactaatctttcccaccccacgctagttggaaaccgccacactagcatcacggcattgagaacaacacaacgcatcgtcctgccgtgtcaccatgccattccccatgctatcccgtcacgtatcccaccacccttttgtgctaccactccgtgtcgtgccaccctgcttctccgcggcgataccttctcaagtggagatctagcggcggtagtcctgacagaggagggcacgggcataggtaaagggtagaggatagtaacatgcggacatcggtgatagaaagttgatttctttgtgattactatgatattattttgtatgaaattgttgatgactatattgtgattcttttgcatctcaaaaattgttgattcttttcggaccgaggccacattgttcggtgttggccaaatggccacttttcggatgcatgtagattaagaaaactttgatgatctacttatttcacagtggctaaaaaatttgtaattttcattgtacatacataactcaataaattatttattacataaatatatacacggtaggagactctccttaaaaagcgttttcttgatggaaaatcacatcaagtttgatgtgtatagtaaattaataaaatcataatagatttacaacaaatatcacacaagagcaacagtatttaagatagaaacaaataaaatgcatatccaacatccaaattgaattccacgcctcccaaatttatgaaaagcgtgcgtgtaaacgtcacaaatatagacaccgcacttgtgtggggtacctagttttagtgcttgagagggcagattgccggccggaaggcgagagggccggcggcgtaaacaacgttatcgtagccctgatcagtccatcgcttgtcctcgtcacggagcggcgcgccctcaatatcggaggagttgatgtttgtggggttgttgcacttgaagtccggcgacgcctgaagtcgcacgtggcatgccttgcgtggatcacccataaagaagtcagagactttggtcacgccgagctccgtcaggaagtagccgctctcatcggcgatggcccgcttgcactccatgacgcgattcttggtgtcgtggcaggtaatggacacctccgccttgggcagcggcaccgcgccgtcgaggctatgcgtgttccggtacgcgcagctctggcagtacaccatgccctccaccctcaccagcaacttgtcactgtgggccggcggggtgtactgctgcggcggcggcggcgacggtgttggtgtggtgtagccattgttggcggtggcgccaactgccaggagggacacgaggatcgcaataggaaggaaggtagccattgctgggagcttgcttgctgtgcttgaccgagatgttcttttctaaaactttggctgtgtcgaaacgtagagaggtgtgtggcttatatacttgcaatgcatggaccaaacgtgcggacatgtagatggaaattaactgtcttgattgattttggagtaagatcacattttattatgtgttattcgattctgacaatatatgtaatgatcgattcatctgtgatatgcagttttaagataagaaatcgcatgttcatgatctgcttggtgattagtcaagagtctgtagaccataaagaatgttcagtatcaagatattcagatttgttagaacgtgctgcccgtatctgtcgttaactggactgcagtttcaggttctccagacagaccgaaatagactgaaaccgagagaccgaaccaaactactggagtagtaaccaatactggccgaaaaaaaaaacatttctgtatctgacgaaccaaaatttaactctgtcagtaggcgcggttatctgcaatttcaaaaatgaccaacaacaacctgccaacccaacaagagcaaatcccactcccttccccagtacccccaccacctctctcatcacccgttagtccgtcacacttgcatcggcggcatcgatcccattcctcgcgttgtcctactgcgctgtgccatcctgcttctctgcggtggcacctccgcgtctcctccactagagattgagaatttggtggagcggtctctcctatgttttttttaaaaattttgagattgtttattgttttggtatgaccgaaactaaatcagtatcgactatttttatatacatgtcggtcccaaaatttctctaaagatcgaaggttgagatcgaattgtttgtttttacataatggccacccctacatccggtaaccaatgtggggaacccgatgtacggtagcaagtttttacagttaaaatcactctaatcttaggggcggacacccattagataagatgggtcaaccagctccgctatggtacactccacccctcacccccagacctccctcctagtcgtggatctaacacattagccactattccaccatcaacccatcaaataaatcaagtatttcaaaaagggatgaaaatgatatggaaattcccgaccaactaagtattgttttctataagtggttctattttttatcatatccgattggccatatataaatcatttcctaaatagttaaattggtaaaataaaaatttgcaacagaccataaatcatttctgaataaatgatcgttttcagtcatttttatccctagctaactctaggcattaggcatccattgtcgtgtcattttcatgactatgctcaccgtctcaattctaatatctatctgaccatgttcatcttcgttgttaactgttcatcttcgttgttaacttgtgtaatgtttgtgtggtgtgtcgccataccggtgcgttgagccggtgactataatttatgtgcacagtaccacacgcccctagccagcagctagctaggactagctccttgttagaggccgctctatcctaccactgatctcactaattcacataagggtttacggtttaccatccttaagaaattattgggagtttttcttgtgtaaattaagcttggtatctccatgtatcttgactcttgaggtaccaaaatatatttttatttaggtacttgaggtactttttcatggatcataaaatttcacttcacgtagagagttactcagctcgtgtgggccgtcaaaatcacgacctagtgccccgcagcattatccacaaggcccattagcctgatatctgaagcaaattatcggcatcattttttcgcttatgcttatacttatcagtcaaattttaaattttaaaccttaaatttataattgattttaggatattttttttcgtcgaagtttattttccagcctttgcttttagatcgctaagaacacatatgtaaaaattttattcatattcttttttgttgtaaatatgacctttcgcttataagcgaaacgatggagccgaaaattatatactcgcggggttatctttttttcccaacaaaaatgacatcaagtttgattaatttgccgtaaaactggtagaaccacaacaatatcaacttacaaaagaatcacataataacaccaccaattcaattagaacagaatcacaaaataaaccaggatatattctccgtccaaattaaatttcgcacacccaacgacgacctctcccaattcaaaagcacgagagtgcgcgcgcgccacacgcatgggggcggccgcggcgggcgcatctagtagtgcttgggcgggcagttcgccggccggaaggcgagcgggccggcggcgtagacgacgttgtcgtagccctgccccggccaccgcttgccctcgtcgcggagcggcgcgcccaccatgccggcgttgatgttggtgaggccgtcgcacttgcggtccggcgacgacagcagccgcgcgtagcacgccccccgcgggtcggcgccgaggaagtcggacgccctggtgacgccgaactccgcgaggaagtagccgctctcgtcggcgacggccagcctccaccacgccgcccggttcttggcgtcgcggcaggtgaccgacacctccgccccgcgcagcggcctcgcgccgtcgaggctccacgagttgcggtgctcgcagctctggcagtacaccttcccctccaccctcactagcaccttgtcgctgctttggtgcgccgctggcgccggtggcggtggcgatggcggcggcgtgtgctgcggtggtggcggtggcgatggtgtggtgtagccgttgttggcggtggcgccggcggccaggagggagacgaggatggcgaggtggaggaaggcagccattgatgcggagcttggtgtaagctcgactgagatggtttgtgtgaagcttttttttggctgtgtcgagatggagagaggcttggggttttatatactgccatggatcaaacgtgcggacatgtagatggccgaagcccgaagtggtggccatgtttgtcctggaaaatgtcttggttttgattaagattacgttttattatacattattgtaaaattgtgacaatattatacgtacaatgattgacctgtcgaaatgaaaagaaagacaatatgtaatgattggtcaccatgggcatttttaagagaagaaatcgcatgcttgtaatctgtttggcgattggtcagtctgacatagataacgaatgttcagaaggatgatatgcagatttgtcagagaacgtgctgcccgcgtgtgtcctcaagacttcaactgcaatatctggttctccgtgtaggcagagagatgttccccaacgcaatgccgcgcaaaataatcaattttgccggcagagcgacaacttgttttataatctgaaaacgaactgacatcttattttatctgtaaaatgtgcagttcatgtaggagcatgatgtgcgtccatgttttgtctgaaaccgactgaaagataaacagagagcactggagtaagagaattttctgattgtttctacataggagtaggagagtttaaggcgaaagttactggatggaaaggaagtctgactaatcgagcttacccaaaaattcacaaaacgtagcatctccatcccatcaagagcaatatgtgctctagttcttgtttttcatcttgagggagaaattatccgattaagtttacatgtctgaagagcctaatcatttttgtatatcacttatatgtgctgtcctaaagatttgatttatggaagagtagaagacaattctcacttcacattccaaacaggtcataaatcgacaatatcgcttgttattgtgcggtttccgcggtaaccggacttacctttggatacactaatagtaacttatcccgtcaaattcaaataaatttacataataatatgaacttctaatagcatcgtctagtttttcatggtttaccgtgtgattaccgtgcttacgattgggtgcggtaactcaacccctgatggtaaggttagccctgctctaactaggaaaaaacaataacaaacagatatataagacacaggtttaacatcagtactcttaactattccctccgctcaaaaatatactacctccattctagaatattcgtcgttttgagttttttatttgtaatgtttgaccattcgtcttatttaaaagattatgttattattatttattttgtttgtgacttgttttattatcaaaataccttaagtatgacttatcctttttaggtttgcattattttttaaataagacgaatggtcgaatattgcaagcaaaaagtcaaaacgatatctaatttgggatggaggtagtaataaattttgacactttcatttgtccacaaaaggctagtgaatattattaatgggctgggccaaacacccaccaaagaaaattcccaatgggccttgagtgatccccaatatacagcccattacatgtacaccccagcaatccaggcccacacgcagcgagagaattcgactcccgtttaattccggcccaaatccatctctttcgactgcttacttctgccctaatccacacacgtatcagaaattcggaatactctgttcgcacttgcccttccggaacgctcccaaaccctaggcgcgtgaccatgtcggggtcgtacggatccgacgactaccgcggcggctacggcggccgaggtcgcgtcgggatcctgcgggttgtgtgcgtgcttgcttctggatctgctcctgactggcttgtggttttttttgtaggtggcggcggaggcggccgtgggaggggaggtggcggaggaggagggggaggatatggtggtggtggtgtgggaggtggatatggtggtggtggcggaggatatggcggcggtggcggagggtacggcggcggtggtagaggtggcggtggaggaggaggatacggcggcggtggcggcggcggcagaggtggtggtgggggtggcggtggccgaggtggcggcgggaggggtggaggacgtgacggtgactgggtttgcccagacccgaggtttgtttcgtttactcatttgacgttgtctcgtttgattcgactgtgactgatgaaatcgtggttgtcccgattgtcttgtaaattatgctacttggccatgaaatctagggtttttaggttgttaaattataaattattgggttatttgataatttggtttaggattttgcatggggcatgtgtgaagtgtcctactaaatttttgtttcatcgtagtattgtgagcatcagaactgccaacaaatagttaactgcataattcattctctatgagagctccctataatcttaggtcacaagtgctaaatttatgttgaacctctagatacataaatattatgttatacttgtctcccatgatttcttcccctcccctatgttctattttccttggtatagcagagtggcagagaagaaatttcatatatgtttttgaaatgagttcatggtgttattggaagcattacaaaatacagtaaataagcactacaaaatacagtaaatactttcttttatgaatatgtttctttcaatatggcattagttgtcttgctgagttggttatattttgcagaatattcggttgcaatttcattggttctcttccaatattcctaatatatttgtttatcattcttgttccagttgtggcaatgtgaactttgcaaggaggactgaatgcaacaagtgtggagcaccttctcctgctggaggtggaggtggaggtggaggtggagggtataataaatctggtggagggggtggaggctacaatcgtggtggtggcgattttagttctggaggtggcggtggctacaacagaggtggaggagattacaactctggtggccgtggtggtggcactggagggggaggaagaggaggaggttacaatagaggtggtggcgatgatcgtggatttgatgaccaccgtggtggcaggggtggttatgggggaagagaccaagggaacaaccaaaggggagacgaaagtggttatgacgctggtagctatggacaagttcctcctcaaggtcctccttcctatggtgggcctggtggtgactatgcagcacctccaagctcctatggaggcaataatgcatacaattcagattctgcagtgccacctcctagtagctatggtggtggtccaggttcatatccaccaagttatggtgcaccacctccgaacccgccatatagcggtggtgctccaggtggccaaggtagcctacctccttcatatgatggtgggtatggtggtcggcctatgcctgggggtggaggccctggtgcacctccaccctatcatggtggtggtggtggtggtggtggcggcggcggtggcggcggatacactggcagtgctgctccagagccagctgcaaaggttaagcagtgtgatgcaaactgtgatgagacttgtgataatgcaagaatttacatctccaacttacctcctgatgtgactgttgaggaactgcaagaactatttggaggaatcggccaggtatactttgacctcctcttgagctcccacatatttagtgtttatgaactgtgcatttcacgattcgctcactgaaatattttgtgcattttatgtcttttttctaacctcatgtttttcattttatgtgtttcgccataatatctttttccagtgttactgatattacttgttggaatttaagtaaatttacaaatcagtattcagatgatgtttataatctgtagttgggcttgttaacatttttttccccttttgctttcactactgctagcacattgcaagtcatagttttgcacaaaatctgctccatctgttgtatacagcgcagttagagcgagcttattacatattgtttttttccttgctagtggagaagtacacccttgtgtttcaatgtgcataattaaatttggatatttgttttgatgtaacataatcatcttgcagtaatgatgctctttttttttgtagaagtagtagtactgtaattttagttataaccaagccattcaatgattttgtagtaattttgctttactcccatattggtattttatgccaaataattcgtggcatatcaccccatgatgttaatgtaaaatctttgataataaagtaaagttggttttacagattacttagtgttcctagctaaatttattgcaagaaattaatttctttagttttgggggtggtaactgcttgtgtttcatggctgtgttttgagtttttgcaactgcttttttcttaaggttggaaggatcaagcagaaacgtggctacaaagaccagtggccctggaacataaagatctatactgatgactctggaaagaataaaggagatgcctgccttgcctatgaagatccttctgctgctcattcagctggtggattctataacagtaagttcagcatcgagattatattatgtgtgtataaatacagtgttctgcaatttttaatgcatgttttctattgatattccagattatgaaatgagaggctataaaattagtgttgcgatggctgagaaatcagctcctagagctcctgcatatggtcatgggtaagtacttttcagttctgtagatgctaaatgcagattgtggaatgctgtgtgcctatgtccaagcaagacagcttctattatgggcaaagcatgccccttttagttgcaatttgatagcctagatgtttgaatctattcttcaaagtgctcgtaggttgcccccttaagaaactgtgatattaggagtatatgacacgtaccatctgtttatgttattttggtgtagcttttttttcttcaactacaaaaactgtgtaaaaccaagcacttaagctagaaatgtgatgtaagccacaattacattgattggattctggtggaacataatctggggacttttcttatcatatttttttgtatagcgtgtaaggtagttttacctgatacttcaattatgtgttcttaatttgcatatgcattctgtcacaaagggcttataataacacattcatggtgtagaaataagttgaatgtgggagcagtagaatgccaagtatgtatcagtcaatgtacacttgtactacttccgggttaagatcttaaacattgttcactgaacctctttgtgtaatttttagcctagctagaaaagaatgtcactaacatgccacgattcgaagttgtttggtattattttagaaactggataattgtaaatatctatttattctcacttgacaaggtgggtcctaaccacttgtcttaagtcaatgtgtagtgtatgactgtgtaagggacaatgtgttggttgaaatctttagcatacctcgatttaacacaatatttgtgaacactacttgttattttatgtatgtgcttgggcatatacatcatggtgtaaaacaagtaatatatggcaactgaatgatttttgtttaatttttatcagttgtgccttttaggtatttaatatctgtccacaccacttttagctcatatataacttaagttattactcatgtcgagttgtatatgtataatcaactgcattacatggcatgcagaggtggacgtggtggctatggtggaggtcgcagggataacttcagagatggaggaggccatgggcctaacaggcatcaaggtggtggttcgcgttcaaggccatactgaaagcaactaatatagttactaagattgtcatctgtgagaaaccatttctattcctgttcatcggacttgtactcaaaacaagagcgtaaggtaggttgcctgcttttctcggaattatattccattgtcatactccaatgttggtcggatgtttgtttgtctcatccaaaaagtgattgatccatgttatgtgaatttttccatagaggcagatggataagctccaaatgctggtagttttgagatgttatttcaggtgagtgccgatctgttatgattctgcaatgctttgctatcccgtgattgcttacctttttatttctgcgattgcaaattttgctataacgcttacattccacatggtaactcagccggtggatcactagcttggattttggcgaggagaaacaggtagggcatttttgttcttcgataggtttactagatctagaatccattagttacggatatctctgtggatattagatgtatatgaaccaccttttctggtacacattcattgacttattcatgtggtttgcgtcaaataaagcatggatatgttactatttagatactatttccagacgaaaacatctgcgcatttgttggcttattcatgtggtttgtgactcaaatgtagcatgcttagaaactacaatttccaaaaggaaaaatattctaacatagtagaaaaaatcttgtgggagactcctaaaatcaccccccttagcattagtagtagcactcttgtatgaggtttcctactgttgaggttacgcttgcaggcttgctgctgtacaatgtgtgcagccaacaccgtctgctgcacatcgatgctgcctgctcttctatcactgcagcgtattgtgaaacctcgaagccatccttgtatctgccctccggatccagttccttgtgctgattggcaaattgacctgttggctggatacctccagttcatctggtttctttgtatggtttgtcacagttgcggtggatacctccagttcatctggtttctttgtatggtttctatcacagttgcggaagatagacgtcaggcttctttccgttgattgctttttccgactctttcatttctttctgaagtttctcctcgctgttccatatgggtttggtatttggatctgttttaggaggcttgatctggagccctggacttgcagatgggcgaagctccaagccgttcacgtcgtttttgtttgacatttacgtgccgtatgtatcttgcaatagtttggttgtatgacatttgctgaatacttaaatttttcacttcatttgggattgtaataatgcactgagaaacgtacctgtggcttcgcattaaggataaaaaaatgatcggtgttgcttcactacttgcggggtgtgctgagcggaaacgagcgaacgtgttataagtgaattgtgcaacgtttagataaacgatgtattacttcaaagttcaaacgatgtccggcatctttgccacgtagtagaacataaaccgtaggttgtgtagtcgcatttagctagaccctagaggtagctctatactaccagcattcttggttaaaaggtgaactagggcattgttacagtgattcagctggctttaactgacgaaaaatagagatggcactatcttctatgaatgatgctcatgctcattcaccgtccttgtcacaaatcacaaaatcgaacatacaatagccagggcaaaacttgcaacctacactggttaaagaaaaaaaaaagcaaaattgctaagaacaagatatacttttcatcttctcctagtcttctgtttgctcctcccttcaaatctcctagacccttttgccttccctttctgcttgattttcttgagcaccttgttgcccctctcctttctctcgtccaggtcagaatcgccgccatccgaggaatcgtcatcgtcagattccccgaatccggtgagcttctcgtactcgtcctcgtcgatcaccccccgcttcagcttcttcaggagccggtactcattcgcgagctcatccatgtcctccttggtttggactgcttgacgctgtttacctgtcttcttccgctttggcttttcaggcttctccggggctttcctcctcttctctatctctggccttagagctagttcttctgctttccttttcaatgtcttctgccgttgtttttctcgagctttatccctgcagttaaccatgatggagtgttgatccctttctcatagttgcatttgaagcaaaaaatacggatagctctcaagtgaaaaattgctgaataattgttcgattagtttagacatagctctttagccctacaagggtcttacacaacaagattatggtttgtgtcatctacgttttgaatatgggctttccttttaatataaaatataccaatataaatttgtcaaattagtagtgcgttgatgcaatagtacaattggcaacagagtgaaatgttaggtttgcaggcttacttgtacttgatttttgtaacatcgacatctttaacaggagtaaacccttccaatgaaagagaatggtgcttaacttctggcatagatggaatttggagtaagccgtactccatacccaaccttccaatttcaaggtctttccaactgaaaatgtaagaacagtggtgctccttgtatgcccgaacaaacgaaacaaaagctgtaagccctttctccatgacatttcggtcttccaatgcagcacttctgatctgtgacagacaagtgggtaattggttattttaaacactaaatttttctctcaagaaaaaaaatcatttctggattcagatgccttcacaggcagacaacctaagatgatctataacaataagaaactcacctgtggtacaatatctacagcatttgtggaacactccctttcagtgaggggtacacctctcctcttcaagaactcaacataagtatcttcctacagaacaattatagcgctaagcattttactaacaaggcaatccattgtatcaaatcactactgcatgtgcatggtatgcatagccaaatatgtctttgaaattcaactactgacttccacttagataatgtcaaagcagagcaagtaccttcggtaagaggaatacaatagcatctccttcttgatcataacgtgcagtacggccagctctatgtatgaacacattgggatcttgaggtggatcatactggggaagaaacaaatgttttatatcaactaatgacaagcacaaggaaacaatttagggagttatgttcaaagcattacctgcacaatcagatcaacatgtggtatgtcaagaccccttgctgcaacatcagtgcaaactagaataccacttgagagagctgaaaatgatgccaaagctttctcacgagggccctacataccaggaaaatagcgcggtagcaatcagtatgaaggaaagcttttggaagcgccatgtacaacaaatcatgcatgtattagctctgtaacctgcttcatcttcccatgataaggaattattggagaacctttaagtgagtccaacagcgggagaacaatagcccagtaatctacacaagcacatgttgcgaagtacctgcattcaagtaagatcagaaagcccacaagctaacacaatgctacacaactaggcacttaaggtaagtgtgtgaaaacaaattttagttcgctgtctacttacaccattattttctttccattgttctgcacaaggaaatcaacaagttgcgatgacttatttgatgcttcacatatcatatactgcaaagaacaaagaaattttgtggtttacattaaattgacaagtacataaggcaatcaacaggcatagtcactagtaaaacaaaataagtatatgttacaaccagcccatgtaatcattggcagccacgaataactatccaaatgcttgtacaaaagttcctcaccatacctccaatcgaagacccaacggtgttttggatggaccaagctcttgttgagcaccatctttacctgtgggcttcacctctgtcttaacttcaaccctcacaggattcctcaaccctgctttcgccagctccttaacagcctccgtctgagttgccgaaaaaagccctgttctcctcagctttggcaacttcgaaataatcgacgtaatctgcttctggaatcctaaatccaacagcctatcagcttcatccaggatcaaaatctgcttcgaaaacacatacacaacaacaatttatgtcagatttgcatttcaagcacaaaagaacaacacatgaattttcaattgcttccaaaaccacctcaagattcttgtagttcagagtgtctaagcgctccattacgtcgaacagcttccccggggtgccgaccagtatgtttgcaccctcttcttccagtttctttagctccgccttgatgtcgaacccaccaaccagtagcatggatgagacgcccttcagcgtcgcgaagaagggctgagccacattgtatatctgcgaagacagctctctcgtcggggagatgatgattccaagaaccttgcaaaattccatacatttttctgatcagaagtgaacaagagatgcaatgcaatccagcaactttgcaagcaacgcatgaacagaacaagagaggatggggtggagccgtgagcactgagcagacctcgtggggcttgggaggcgaggggcggcggcggaggatctcgacgacggggacgacgaaggcgagcgtcttgccggagccggtggcggcgtcgacggccacgtccttgtgcgaaagcagcagcgggatggccgccgcctgcaccggcgtgcaccgccggaacccgccgcccttcagggccttcaccacctccggggacagcgcgggcgacagctccgagaacctctgctccgtcagcgcgcgcttccgcgccgccgccgccgccaacgaggaggaggaagacgacatggcgtcgcgccgccgcgtctgctactcgcgtcgcgccgcttgagcaggagagacttcctcttgctgttggtttagggattccggggggttcatcgattgggccgtgatggtgggccgcgtagtcttctccagggttgcatttaccgcggtaaaccgcgcggttaccgcggttatcgcgcttaccgcgggggtacggtaaggggtaaaccgcggtaaccgcgtcaaattcaaataaatttaaaaaataatttgaatttttgataaattttgtacggtttgtcgcggtttgtcacggttaccgcggttaccgtgcggtaaccgtgcttaccgccggggcgcggtaaccgcggccccggcggtaaatgaaaccctggtcttctcccgaaggccactgcccaacagcctgttcaattaattttttttttaccgattccatccaattcacttctactctgcacaagttctctcaagtagggatggcaatttaaaccgtttgcccgtttacccgtgggtaaaaaccctaataaagttgggtttgttctccatttagtaccagtgggttttttattgggtcaaaacctatacccaatgggcatacgggcactggcccgcttcgcccatttacccgcaaaaaccaactgatatgtggtccctcggtcaaattagtataaatgccaccatctagtattgatgaacttgtaatgcttgtattgttgaacttgatacaactgtaccctttctttaaattgcgataatgtctctctgcttgtggagatttgtggttgaaatgttgaactgtgagtttgtgacgggtaaacgggcatacccgcgggcacatagcacccgcgggtaacgggcatgagtagtgttccttgctcatcatgtagtaacgggtatgcccgcgagcataaattacctcgtgggcatgggtatgggtagtcactactcgtgcccgtcgtgcccgactgccattctcaacaataatacagacaatttctcaaaaaataaaagacaaaggagggaaaaaaagagatagaatgcatatgtaaatgggtgacttgtataaaaggaaagtcacaattttcagcaataaatgaaagagaggtgtattcgtagcgactcaattctgcagggaattcggctgtacatgagtattttgattgagttgtattccctccagtagaaacttacaaatgtacatccttagagaaaagataaggaggaagacataaaatagaaaatggcggcgcacgaagaacgtcgctttgaagaatcagtagttacattgtgattgcggtatcattgattttactgtttatgtggtaattgagtcttccttctgttcagaggatgcaacggcaacagcactgccttgctcatccccttgacccttttcttcatcaacaccctgtaaatttcactcaacagtaagaatcccaaggtgaaactgccttatctgcatatcaagattggaagattttgtaggttcacctcatcatctgggatcatcactgccttcacctgtgcaacaataaccgtaatgtcatccatcttaccacctgcatagatgaaatttaggcatcatgagattactttgcgttctgcatagagtagagcatgatagtatgtgtatgagttcatgcgtacctattagtttccctccaatgaactttttccacgaggggacatcaaaaccctgcattcaagtgatcagaatgaagaaatttctgtcatccctttttggctgtaacaatctgaacagaaaagattgttgaggggtatatgtttcgcacccgactccgagcctccattgagtagggtgaatcaaaggtgacatccactgaatgcttccttgcaagctctgctagtgcttttgctgtggaaaaaacatcaaactttcagaaggattggaatttgggaggactggaacatgtgtttggtggcccccaattcaaaactgagatatttaccacttaccagcttcatctacccctggagactcggaaatgacagaaacgatctcttgatcgaatatattgtcaaaaaatccatctgagccactgacaatcatatcaccctccataagatttactgtgcaaacctggtagacaactggatcaaaatcagaaggttctacaaataatgcttaaatcttgtacgactatcttgattactgtagtgaagcacttggtattatgtttccactgcattagtggtatcttttatggatagatttgcgcatgcatgcgtgtcccttgtaagatcttccccataattttgatttgtccacacatgcaaaatatctgcatgacttgagatcatatagagttttcaaattaagaaataattaatgtgcatgtcttggactcgttgtaacatatgggcaaccacctagaactgagtatgctaataaaacaatcgtcacacacacagctctattattctgacctacaataaggcacataccagtgcatccagatacgtttgaccaattgcttcagagcttaactggtatgggcagtcaaagtaatgttcttgaggacatgtagagaacattacttggcctaggaagaagagaacagataagtatgctaataaactttaagaaatctataaatttgttcatgctaaccttttctaattactttcaaaccacaatctcccacacttgcaatttttagaatccctgtcttctcaagcattgcaatgattctgttagcgttccaaagaagtcattaggttttgacctgtaaagttgtactaacataacaatgtagatatatgcttacacagttgcagatccaacagaagttgttgcagcatgagccttcattagaagaagctgaggatcatgattgacctgtgatggatagaaactcctatttgatatgcaaattgacgtatagtgtacgtgactttatatcagtactgatgtcaattaagaaatacctcctcatccttgagaaaagtagaagtgtgtgccatgagctctcgagaaaacagagccggattgacatccttttctgcccatctgtcagtagacaagagaatgactagcaggataaaaaccttgtgttaatgcgaattgctgaaaacaccatgtatttttttgagaagtgctgaaatcaacccaaaattaaaaggaaggaaacaaaagcacaatctacaatttattgaagcagttcttttcagggacaaaagtacaaaacaattcattgcagcgaagatggtgtaccctgaaactccatctgcgacggcaaacactccaccatcatcgccgttcacaaagaaagcatcttctccgccagtctcagccttcagaatttgaagaacattcaaatatcaaacaatggttgcttctgttgtataattgagtatgaaggggaaaaaaacactaccagaagagtaatatattaatatgtttatctaaaaaatgactaacctttcttgggtgtggtattagatgagttccaatagttaacacagcttccaacctacaattacaggctcacattaccaaacactgacagatgaagcacactagaaataactaaagactgaaattatcagtgagactgaaatatatattagcagctgtgtttgtttgtagtctaaatcgctgagacgattttctgtagcctaagccattcctggcttagggtgttcttgttgtaaaactctctctccttcttaatacaaaacttggccggttcttttgccggcccggtgaaaaaataaactatcagtgagaacattgctccattacaacttaagatttgcaccttgacccaagtactactgataatcaaacgcatgtcttaggaacccgagaattcgataaaaccgaacatttcgtggactgaaacttatcgtaagggcaaagataagaggatcgaacaggtgtaagcagggaggcatacttggcggcgcgaagaggggagaagcgcgagcggcgaagcgggagatggggagaaggggtagtgggtgcgtggaggcgaggcggcgagaggcgggtagcagtggaggaggccgccatggctggcttgctgctgctctatctcctcctcgcctcgcctccgtcgcccgcggccaccgtgaatcgctcgctcgctcgctagtggtggaggcaggcaagacacgtcactagcacggcactttttcaaatacaccccttacgtattatctattctcgtaaggaccaaagtgaaaaagtttactacataaggactaatcgcagaataagtggatttccaagggggttcgagtaagaatccgggtcagaaacgggggaactgctttaagattcgcgcgagcacgatcgacgcgcacccagccacccacccgcgccccaaatcacgaggaggcgaagccgcccatctcatcgccggagctcgcgaattcgccgccgcgattccgaccaccgccgcgccggcgcccgcgcccgctacggtactccgccgccgtgctgagatcgccgggggagccatgtcgcggtccctgagcatgaggtcgtcgatgagcatgaggtcgcgccgcgacctgcctcctccccagcaggtgagggatccctcctctccccgtgccttgggtattgcgagtgtaacatttgcgcgaggtgcgcgggattcgctgttgcgtgcgcgatgcgctagtttgatctcggtgtttttcgaccttggggcgtagaggggcgagggggtcgattacccgactcttcgtggcgaatttgaggaaactagggttctagtaccgaatcatgtccaattgcgaatctcgccattttattgtgtggaactactagctggaaaaatcaatcgtaatatttctaagaaaaattaagattacttattgtggtttgatgatgataaaaaaaggcatcaatgatttactctccgcagtccgcaccacctggttgtgcgcataatcactagggccttgtccggttaggcccggattgaatccagacgtaaccgaacaaggcctagctgtgggtatacctggtttggatcctctttgaagtgttcccagtcccagcatggttcctcatacccatctttgacaacattgagtatatttccctttggattgatgtttgtaaccgtgaggtgtttgttttcagacaatcgaaaagcttgagaatatggtggctgaaggaaattattatgaagcccaacaaatgtacaagtcaaccggtgcaaggtactctgtgaataatttaactgaagccacaatgattgattcccctttaacttgcatttgaccatcttgcttatggttgtctatttcagaactgcttagcatatgatagaaatcaaccattcactttttataacttaaattggatctgctaaataatatgagttgattgaatttagaatctttgttatacaatcttccgtctattatcatagttatttggctaatgcagcatcttaaaaatagttaatgtcaggattgttaggacattaaacaaattcaaagtaaaacaatgaccagaatgtttacatttgcatagaagcagtattactggatcctacaagtatgtttcatatgatcacaatgaaaaatgttattcatgcacaaaatggctattttctttgactagatttattgatttcttaataaaggaaaggggcatgagctttgtctgaaagatattgtagacaaaaagtgccaattcaggaatacaattttgattaattgtgtctcatatcttgcaggtatattgctgctcagaagtatttggaagccttggacatccttcagtcaggagctttagttcaactgaagcatgggcaggttctatcaaagctaaatttcatagatctaagtaaaaaaaaaatattcgctacatttgatggcaaagtaacacccctcccaaaagaaaagagaagagagagccaaccaaaagctcattgctcccttcgtaacgatttgttgcaaccagccaatggaccttgacgtgttcatttgaagttgtttttttaatgtgtgtattgtcgatgtggtggtagtgattcacatcttattatgggatgtttttattgggtgctatgctgtagttacatacatgtgttatcctagattggtgttttatatcattttaaaccttcacatttttgccttattggttaaaaattcctgatttcaggtaacttgtggtggtgaacttgctataatgtttgtggacacccttgtcaaggcagcgcttccttataatgaagaaacctttggtcagtcttctctcatagtgaaaagctactatttctttatatcattaacatgctaataaattgcatatttatcctgtaagtaaatacacatctagatttcatttttggaacatatttacaatattttatttgtagcatactcctaatgtccatcacttgtaaagttttgaagaatcaaagttgtttaaaatgttagtggaagcagtgtttactagtcctaattgtggctctagctttactttgtcttctctttgtttgtttaccttcagaagatcacttttcccttagattttaattgaattgaataagatacttactttattatgaatgagaacatgtttctagtttgatttgttagtatcacattttgtgattgtaactatatgtaaaccttagatcgtatcagaaagatgtacgacgccttccccaggatatctgttccacacttccttggagatgattatgatgacgacgggcagaaattatccgaagctatttctgcagcaaaagtgcgttctgagagttgttcatcattcctgagagctgctatcaggtaaggttgtactaattttcattaatccaagtaaattgagtagaaaaactaaatatccttcatgcaagcatcaaacatcttcatctaaacatggcagtttgtttaagtggatcttaaggcaaatacatcaaactgttgaatagcatctatactatgaccaggacttgttaactgtagtgcttgaccagtagttcattactgacaaaagtagaacagacaattgagcttatcatgatggtaaaaacaaatgatctgttctcgttgctcacttgcatataaaaatccagatgttgattgtgtaagtttgtttattacaataatgctctcagaaaaaaatgaaaaaggagatggtcacgaatttgtgattttaagatgaactcaaggtgtgcaacatataagaatcatttccatgggatctttgaatctttatgtttaactctgttaatggacaatgtggtcatctagttgactcttctcaattttctgcctgctatatttatatgccactaatagcatatcaatcctttattaaggtggtctgctgaggttggggcatcaagaagtggatctcctgagctgcatgttatgttggcggaatacatatattctgaatctccagaaacggtactgtttataaattatagaactatttttctgacatgaatatattgtgtttgttttagagctgaaattttatgtcttttcaactgttactctttaatgcctttgtggtttgctaaggttcgtgttgactgccgttggatgcaggacatgactaaagtgtcaagtcattttgtgaggggaaatgatcctaaaaagtttgcctctatgctggcgaactttatgggaaaggtaatggtttttagaaaataattgataatagacttgcagctgatgattgtctaatgccaaattctattgaactgttacattcttctgttctctgagcaatgattaaaatgtcttatctgaatatgatcagtaggttcacattctttacaacaattttcattttacaacgggtctcttgcttatagtttttatttgagttggaggtcatccttctccgaaaatagaaacacggtgccagcaagtgattgttcaatcagttatctatatccatttttgggttggattatttcaagaccaacataatcttcgtgtaaagcagtattcatagatgttttttctcaatcaaaaaaatatttttattaatatttttcttactgcacagtgctaccctggtgaagatgatactgcaatagcacgtggtgtcctaatgtaagatataatttctttcttttttttttcctttcaaagagtgcattgttttgacactggcaaaatttctaaaagccatggaagatgtttgcatcttgcaatgcagaaaccgaatttcatagggagttctctatttcatgttctgtttacaatgagtaaacaatatacatatttaggaatgtgctagcaaatcatgcattaggatatatttcctcaatatgcatcaatacaatatcctgctaagttatatacaaatctcctttggatacttaagcacatacaggagcacactataaagtgctccatccaaggtaaaatattagaatttgatcgaacttcggaaatagttacataatatattattttattatgtttatagtactatagtatgttaaaaggaagtgtcaaaattcttgcactggggaccagaaaaatcaaagctaacttcagaaaaatcaaagttaagaaagtgtttcgttataggatgaataaataagaaatttttggggaaaaagacgtgctcagatgcttgtttttctgatatactgcatttttatttaaggtatctatcacaagggaatcttagggatgcaaatttgctcatggacgagctgaaggatcaactaaaatctgctgacttggaaatccccaaaacagatttaattcagttcatcaagtatctcttaccgacgtaagtctttcctgtctttcagtttgcattatttttatgtttcttttccacatttttgttctgcaatgttctcatgtatttgtgtgcattcatgctgcaatttgccatgataacttagaggacacctgcagagtagtttcatccttacatgtttctactaaaaaatactgatcgcaggaacaattcttttttttttgaaagaaccaccagttatgggaaaatctttcatggcctaggtacattacctgggtattagactattttccacctttgagatatgttcatagtttatgtaggatttgttttcagtacagatcatgaatgcatataaaaatattaaatatttctttgatggttattgaaaaattctgataaccttatataacttagccatgtttaagttctcactgatggttaaagttcaaactgttagatttggttgatgctttgctgttagattgcatgctatgcaggataatgattatatttgactgtattgatgatgtgataattttaacactgtaaatctaggatctattgtgtgcttgttgtgtatcactgcgcaatatgttgatctaggttgcctaggtagctttctgttcactgtaaacaaactgatcctacagtttcaattatccaagtttccatgcatctttcgaataattgatgagatagttttgcattttgttacttgtacgtgtataccaagcccagacgttattttatacaagcaacaagtttttttttttctcattgtttcctctggtcgtggttatattactgactgcatgctatgtttacaggctcgaaagagatgcttaccctcttttcaggacactgcggcagaagtacaagacaagtacagatcgcgaccctgtatttgaggaggtagctatttcatcaaatatagtgttagcttgctaaacagctgtaaaacatgcaccaaaacatcttattctttcaaagattaacttaacaagaactgggaaaaattatatttttcatgttccctgcatagttgtcataaaacaatgtgttcacaagagttatattagatcatgtaggaaactctacaatttaatccaccaacaaccttgttatcatgtgctgtccatagggaaatgtaaacagtgttgataaaggaccatctgcacttataatgtgcttaatatttaactctactagcagagtaatatgtggatagaacttccattacattaactagcagagtaacttgaagaaggtagttaatgctttctatcatatatgaaaaacaagctgaaacagagctcacgtgatattatggttgggtttcagttattagatgaaatagccgcaaaattttatggaatacggagccagagcgctttggaaggactttttggtgatatgttcagggtaagatttacatctttcatctatcattcattcatgccgattgctagtacattgcattgattacttttgaagttgagtacacaccagttgcttttcacaataactaccgtcgtatgcctttagttccatatcagtcatgccgaaattacgtttcatgaagtgcatatcatgtttagaggaaagaatatatatttctataatttgaaattgcagttgatctaagcattcaggaattgaagtgcaaattttatgtagcttatgaagtcacggatgtccacctgttacgtggtaaacaaacaagaaaaaaaatttgagttctttctttcagttataaatattgccatcttcattttgttttgttcaattcaccttttctgtacgttcatgtaatttcacgtatagtttcccaagtacaatgaagcaaacagataatcaatactaaaccattagtgtagccaatattagtacaatgactagaagtcggcaacctagttccgatacaagccattattgatcttgttctttgtattctgcaggtataatgatgagaaaaggatttcgtcataaatattccagcacaaagctcccgacgcgcatttcgttcgctaatacaaattgctgctggaagatgaacacccggcccggcccgaaaagagcataagaaaaagttctgttgctgccttcctcagccttgattatcctgaggccatacatttagctccaaactgcatatgatgatatatgctccagttaccactgatctcttgtaaaaccattcaactgttttgctcgtatcatggtcgtgttctaatgatattactattctttaacattttttgtagttccagttttgcagttttaaaacggcatttatcctgactggtctcacgttcccttcatcttcgcgtacacgattgtttggttagacagtgcggcccgtcaaaatatgtgggctgaaagttagggcaatggcctaacgttaaggtccatatataacagcttgaaacgggccgtgaattcaggccattactgggtaatgaccgagagatttggcccatgccactggccaaatgaggatggaagagttgcagacagtaggctaaaaaagctgtaatatactccaattgcacattaaacatatctgggaagtctaaaatatcatagaaatttaaacaacagacattttccccaattggatattggagtgagaaatacaaccatataattgcgtcagggctgttctccaatttgagaattgagtatcaataacttagctatagcacgtattactattttttttccctaaacgcatgtaaaatggctgtagaaatatcaaaatgatcaaactaagcctccatacacaactttatacaccggataattacaagtcaggataggcagcagacaccagatgctcgtaatctataattcataggctcatagcgaacgacgagcagatgtgcgtgttcaatgggattgggagggcagcatgacgctccatgttgaaacttgggacgctcaaacgccagcaggatgatgtcgtggtgggagtctaaccatttcctcgccagcaggatatctcgtgtccaaatccgctgatctgtccctccacgtgccaatcacgtcctgctcgcacaaaatcacataaaccatgcattgctttattaataaacatatgatgcagcgtgcgaattgccacctatggtctatgctatctactggtaaacactggcacaggtgactattatgcttcctctgtttcaggttataaaacattttgactttagtcaaaatcaaactgcttaaaatttgattaagtttgtaaaaaaagtagtaatattttaaacacaagacaaatttattatgaaaatatattcaattattgatttgatgaaattaatttagtattatagctattatactacatttgtctataaacttataaacttagtcaaacttgaaacagttgactttaaccaaagtcaaaacatcttgtaacctgaaatgtaaggagcagtcagcaattcacgaatttgagcatagaaagtacaatatactccctctgtcccaaactatatggcctatatttttttacacggttttcaataacatactttgatcattattttatttcattctataatcccaacaaatatgaaattagcatcacataaatgtacttcaaaatatgaatctagtgatataacatgcataatacatagtatagatatagttagtatgattattggtcaaaagctaccgaatatgttttttcttaaaaagggacgccctatcatttgggacggagggagtagtggtattatgcagtgcgcaacatgtttcattatacataatcttctgatgttacatgttaaatatgcagataatgttcaataagatggttgtgaagctaattcatcatgaagtgtacccgtgtttcttaacgtgcctcgccctaatgaacacacatgctatttattacagtccaagttttgtttaagaaagatgattgtaggcttatagttatagcccagttatttacaataaaaaatcaagatatttagttatgactagaaaaccatatgacaaagtgagtatcataccgtcgtatccatccatcattcgtatgccatgcagcatttatcaagactgtcagttgtctagtcgacatcgagcatccactgccataggcttcattctggtcgagtcctgaaacaaactacttccaatcaacgttatctcaagtgaagcactggaacgacaaagaaaaacatgtccgaaaaaataatatagttgtgcttgatagaactccgagagattccttacactgttctacgagcagcaccattcagagtacttcagccaccactgtcaccaactatttgcagaactctttccttcagatgctgaatcatctgcaagagatcaacagaaagtgacaataagactgtccatcttatcagaacaggatctctgtggtgtgaagaaacttacaggatgagaatttgaagcccatttttcagcagaagtggcagcctctttgagatgtgattttttaggtatctcgtgggagagactataggtggagctctctgtcgcctcagctacccacacgtgcctcatctggtctttatctcgcttgaccagattactaaaaccaacctgagaaacaaacgtaacagtgagttaaagttgcacttgcactacaaaggggtaaagctgaagaattatgtgaagggcctgcagaaaagaaactgggatatagctcgtctacacagaaaattacacgaggcactgtttaattcataactactcgcatttcatatgggactcatgaatttcggacttcaaagattagtcaacttgagatatagtcagtgcaatggaagatcacatactatatgtccagaaagggcataattgaagaatgcagaatcctcgccagtggttttggaagaaaagctaactgccagaagacagtcatcttgctcttcatacttttctccagagataaatttagatccatctgtcaaaaagagccactgcctattctggttgttcaataaataaacattcccaacatacaaaataacacctgcaatgtcaaattcgctgaaacaaaaaggaacggctcattataaaaggttcataatacaacaggagattcagcaagtcagcttgagacagggctgaccttgtaagtggcacttcaccaaaatgtgacaattcaactgctttacgaggggtgaaaaatggtctgcatcatgaaaaagggacatggttaagttttctaaatgcagtgcaaccatcatgtccaatgaggtctcttactcaaaatttgtagtctgtgcggttgctaaaggcgtccatgctgtagatgatcctctaccactcaagtaggatacttctgtaaagtagcttgaagccaacagtcctgtgacagaataaatttgtccctccaccaggtcggatttctgccagtggcaatacagaaatgaaaattgttttaggtatatttgctcattagcacataactatgggaatattgcaaagaaaataggcatgtgcatcttgttgtcctaaagacatatagcaggtaacgctacacacaaaaatatatgacaatcactggcttgttttcttgatgacataacaccaaatcttttgttctttttttctgttcataagaaagaataaagatgatttctgacacttatatgctgtagaattattgtaccgtacttgcttctcggtagggttccaaattgttattaacccttccctgcagccagattttgtggcggagtgtttgctgataaggcccgtcaccctcactttcaaaaatggtgtaacatctcttgaactaagcccagcaactttaagagcattttcaaccttcttagctacttcattttgcctgacaatctgcaacataatggtgtagtttaaaaaacataaaatattagcagacagatgagatgctatagttatgcgtccagaccttttgcttttcttgataatatgagaaagacagcagctgctctgaattcatgctggacataagaatttcaggctcagctgccctctctagcattttgcatatttttgccccttcatcgttatcatcagtgttgtcgcagtgttctccatgttctgactgaatgtcttctgcaatcttagacactctgcataaggtaattattattattataattataatttataatggcataaaaagggaagtattggtgcaaatacacagtttgtgctactcatgaatattactacgtccacatttaaatatatgacgctattaactttattcggtctttgatgtgcaattttgaccactgtttttttctattataatattgtaaaagtacttataaattaaaaaatctacccatatgacatattttcaaactaaatattttgagagctattgacaaagtttcaaaaatttgagcaaataaagtcaaaagtgtcacatcacatttcagtgaactagactgatgatgaaccccaaaacatattgagaaagttttggacagaaaaaaaaaaggcaaacaggaagtatgcttcaagaaactggatgtatccatgcatgattgcttgtcttctattggaggtgtgataagcatccattgcacttaattgtgttaagtttactccaataggagaaataaatacctctggtgatacagctgtagtgcttttctttccatcctttcagacctcaccacaaaacgaccgtcagaaaacctgaaacaaacaattcagtgtgtgcaactgagagagagtttagtaatggatttatgtccagtagtacacctctccctgtacataacaggataaatccttgtaactccaaccagtgtcctaggaactctgccacctgaagcttttatgcacttgaatgccagtgggactccagcatgcttgcctgagatgcgcacaataggttataaaagacaacccagctgtataaaaataatagaacagaagtgtccagttttgtgctcaaattacatacataaccccaaagtctcatcccatcttgcacgataggtgccatttatgtggatcattaatttgacggtacccgatgcctgtaaagtgagatcaacaaaaaattgattatatggttcaatggtagtcaatgttcacagctaatgaggttaaaagacttagaagattagtcaaacctcatgaaatgacacaggcccagcccacccacatagtgaagctccccatatctgccaagatgaaatacatattaggtgctatgagtaaattatagtcatgtctcatgactagttgaaatagcacagtacccgaagcttctgtcctataaaaagttttcttttctctagttgctccaaaagtgccagatctaatgacgcatctagagaatacctgcgaaaaggaaaaggttctaacatctttcagcttcaactcgtgcaatacagagaaagcaaccacataccatccatcagttagttcaatctttgtaggcatgttccttttagcaggtctcaagcttttattctcactgttgtcgtcgtctgtatgtgccctatcatcctctggcttactgttgtttaggtcaggacaagagtaaatagcagaaatgcacagcaccatcatcaaagatggtgaagcattcccttccaaaattttctttatggctgagcggtggccattgttcacttctctgtcatacctaacatgcttgaaattttcattaatcaatcatatgcgtccatacagtaggaatggcagaaaaggcatgtcaactatctcacctgtacttcagctcttccaaaacattaccaacttttaagaatttgccagcagctctagttggatagcatctctccaatgaagcaagcttccaaacaatccatttgtagtggttgctgacccatctaaaaaggaaattttcgagtgttgatgttcaggatttaattgccatggagtctctcaaagaatccagcctaaatactatgatatgcccccaaggaatgcattatcacacttataaatcgcatgccataggaagaacatgtaaatccatttgttaatcctaacaatgttttgctatggaacagagacagaaaaaagaatggcaccgaggagacatgaaaaagatattcacaaattatgccttcactagaaaaaagtgaaacagtaaagtaataacaaacatgtaccagcatctgaaggccaaccttgtatagtgatattatcagtatgacaatgaaaaacgacgatcagaattaagaatgatgcttactctttagttgtgtatgtcaatgaagcaccacaggcaagaagcatcttctgaaattcttctgcaccagtatctgttttaaacttgtacttctcagccttttttgcatccatgagcttcacttcatctgttacatcttctgtctggtcacaagagttataagttaacaatgtgaagaatatagtgcacctacagaaattaactgcaacacaataaataccaaatatttgaagcatgggggaccaccaaaatactcttcacacgattttctttgatgttgaaaaggatagcatgaagatagctttgttcgacagggattaatctgaataggtagtttggatactcctgtgaaaattagttcaactaatcaagtaggaaggaattttcagaatgttctgacatgtctaggccatcagcttaccagaaggggatggattattgatgttgataggtgcgatgaacctaaccagtttcatcaaggatgtcagaagcaaggtagcaaggactttccaatttgctaacaatgatgcaaatcaaatcacctggaagaacgaggacgtttaaagggagatatggagtttcttcccccaaatcttctcttctcaccggccaggtagtcagtattaacagaatgtgtaccgatgtaattagtgatgtcaatcaatggtccagatggcatttggagtcttcgagccttatctttagtgtcacttgcattttcagttccaaatgaacatctggaagaaggcttggatatctttggaatttcattgataggatgaaaatctcttggcgcatgaa

SEQ ID NO: 7314 - DNA, 1874 bp, Oryza sativa
ctggagcgaaggagagagcggacgcgggagctggagctggagctgcaggaactgcgggcggaacttgaggtgctgcgggagctactgatggaggtgggttcctgggcgcaagctggatgcgcacgggtgcagtcgtcgtcttgcggggcgtggtgcggatccggactcctcctggcgcgggaagcccctttaactgagcgttctccctcttcaggcgcgctatctcgtccttcagagcgacgatcctcatgagcttcccatcattcaaggccttggtcgccttgtgcaggtccgagtgcatcctatccaatcccctcatcacagcacacatgtgaccaaaggtggtgtcgttctcgccggctgtcggacggaaagtactgacatcatcactgctggctcgacgagggtgaaaccggtacgccgtgtcgtggaagatgtagttgtggcgctcccgtagtctggccatcatcaggtatgctgcctcctgacaggcgtgatctgctgtgcctccagatgcctcaaccaccatgttagctaggcaggtacccacgtagccgtggacctccaggcgaacacggtgaggaagctcgccactgagcggtggaatcgtcgtgtactctggcgcgttggggtagcccaccaccagcgtcatgcgtgccaactctgccacaaagtcgatcatgccttctccacggtggttgggtgggtgaccggccatctagagaagacaaaggggtaggatcaatgcatgctcaaatccaaacttaaataaagcaataaaagactcaaataaaggaatcgaataagagcgaaatttttatgcatagatcgttttgcatgagagcgaataaataagacagactcacataacgataaaataatggggaaattagctacatactaataataacaataagagcataaataccttgcaacccatgttcctgagctaggacctaatgcatttcacccatcaaatcccaactgactgacgaataaatctcaatagttttactaaaaccctagactgactcgttttgacaaatctcacttaaacgagcgaccaagatttttcccttgaaccacaagaacagatcccaattttcccggaacaaatccaattgcaaagaacatatgcaatgaaaaggattcagaaggctcttaggtttttccatttggcttgtcctacggtcaaggtcggctctgatactaacttgtcacgcccagaaattcccgaatagaatttcaagcagaatgtgcattaaaatccccgtccaggaccggccggggtacacaaacgacaatgttgacattcagatccacgtcttacaaacatcataaaagtcttacataaatgcagcggaagaaaagaaagacaacaggagctaagccttgactaaaactgcagcgggaacaccactccacaggcatcctcgacggcacggacaaagcctactcctcggagaaaccttcatctgacccgaactcgaactctggggttgggaaaagtagagcaagactgagtactacccactgtactcaacaagtcataccggaataggggtatggtgcagggaatcatcaaagaagagctaaagtggttcatttgcataaagcgagcatttataaacagaaattgaaagatttaaacagttgtaataattaattaatattaatcatccgctgtccaacgctatcccacgttgcgacaggcccagccatccacctaaactatccaaattcaaaagattacactaaggtgagactaatcacggtgaatctggttgaccgcccataaccgcgggcacggctattcgaatagttttactctgatcagaggtgtacaactgtacccacaagacacagccccacaa

SEQ ID NO: 7315 - DNA, 8537 bp, Oryza sativa
cttcggagaggcagaagactctgttttagaattctccagttatgaactactgagagttttggatcttgaagaatgtgaaaatttgaaagatgaacatctcaggaagatatgcaagctgttgctgccaggtatttaagccttgggggcactgttacaatgctcccaaaggagatcacaaaactgaaatttttggagacactcgatgtacgaagaacaaagataaaagttctgcccatacaagtcatcaagctgccatgcttgacacatctatttggaaatttcaaacttcaagatgtaggccagaaaattagcaagctacagaagtatctgtctgagaaaagtaagctggagacactagcgggattttttgccaataatgaccaaggatttcctcaactcattgatcatatgaaaaacttggccaaggttaaaatatggtgcgagagcgagaccccttccaattctagcagcaacactattcacctttcaaaggccattcaagttttcatccagaggggcaccaatatgaacgatgtccgctcgctttctctgaattttggggggtgcttccaagaccaagagaatatgctgaagttttccctggaagattcctgctacttaagctctctgaagctaaaaggcaaaataaacatattacctccatttgtaaccttgctgaaaggtcttactgagctgtgtctatcatcctctgataagctcaacagggatgttcttgctgctctaagcaatgttcgctgtttgcattacctcaaactgattacacctaatctggaaaagtttgtcataggacagggtccactcaaaagcctacgacgcttgtgcatcatggtgcaaaccatgaccgagccagaaatccaacagggggctctgccaaatctggagtcattccggctgctctgtaaggatctaaatgggctatgtggcatcaacatccagtacatcggccccgaatgcctcaaggaggttgctcttgacaaaagaattagcgaagaaacaaaaaagaagtggaaggaaacagtgaagaaccatcctagatggcccaaggtctcatttgttaatacaggagaggttggtcagatgcagaatatggaggttgctcagcctacagaggatgctgcagcactggctttggctgccggctccctaaggccggttccggtttttagacgtccaaaggcagatcaagaaaggaccttagatctctgttccatgggccaaacctctagggaatcttgcagcaatactgagccatacttcaaaactaatgggacttcaccaggcaagctgaaccctgtgaatgatgaatgtcaccatttctgctagatagcgagaacatcctctgggctggctctgctcactgtcgtcatcagttactctctttctatctcgctcttcaccacaagctgcatcatggtgacaccactctttccaagttacagcaaaagagtggtgtacagatatacaagaatctgtagttgattacaaatttgactgcacttctgtttcaacattattatctgctcatatcttgctacactgtgcactagctgcatattataatcagtagagcaagcatgtgtatttcagtgttatcacaattacatattcaaatggcagtattgatccataaatttgtcgatttcctagcggttgttaaaattgtttctataaagagtgaaaccctacttgggaggacaattgtgattattgatttccacgagcctttgccgttacgaatatgttacatatacaaaggtatgatgcatatatcataaagaaggaatatgcagcgggtagtgggaatcgaacccgcaaccccacggttatgagctaggagggatagatgataagggattactagtaacctacactacaaaagaacccttctttcgtaacgggtggcaacatacatccgatgacttatctttgtcgagtggtaagttaccactcatcacggatgagtcatccatgacgattcgtagctcatctttgtcgggtggtaagttacaacccgtcatccatgacgattcataattacgaacattcacacatgagaatttacgatttttgaattttaatgcacaaaaaacgctaaaaatattctatacattactaggacattccaatatctatctatttatttatttatttattttagagaagggtatttttttacccggcctctacatccaaccggatatatgtagcctttttaaattagtaagttagcctatcaaacagggaacttagccctcaaataacccaatctgaaattcgctcctatgtgctactcaagtcactgtaaccactaggccacatgccctttcactcgaggacattccatctatggtcacacaacactagctagaaattcatgatttttcaagtgacatttacatgcacgccacagttggattcgaacctaggacctctcagcacatgcaaactaattgtaccatctcatttatagaccacatcttgatgagtcttcagatattaattattcttttgattattttgtccaaatatgaaacaaaaatttgaaactctagatgacttcaaatgagaacgctttcaactacaaagttgcaaatctcatcgagttctacaacttcagcgtagggcatgtctccatccaaggtgatttgaaaaatcaaaaaatattttagaaatagatcacatcacttatagagcatattcaaggatgtaaacaatctcaaaagaaaatattatcaatcacaaagttgtagatctcatcgaatccttgcactttgatatagggcatgtctccatccgagatcatttgaaaaattcaaaagtacgttttccaaaatttatctcaccacttataatccttattcggtcaaatgcaaatgtcgtcaattttaaagttataaatctcatcaagatctacaactttcatataaggtatgtctctatccgaggttctttaaaaaattcaaaatttttgaatttccctcatccgtgacgggtcgtaaatacccttcacggataacgttatccgtgaaaggtggtagttacaacctgtcctggatgactgttctcatcttaaacaggttatcccattaaacccatcacggatgacatgttatccgtgacgacggggcatttttgtgacccgttatagccttacaggtcatccgtgacttgttacaactacgtcccaaaaaagatgacctcatattggtgatggttcatccctgatagtcatatcttaaacgggatacttttcaacttgttagggatgagtcatcccaaatgagtcacattagcccgacacgaatggctcgtcacagatgctcggatctgtagtagtggaagtaaatactcactctgttaaaaaatataaggtgcattttattttgttaggataaggctttgaccatcaattgcttaactaatgtacgatttatgtgatagaaagcataggtataagtaagtagtccattgtgcaatattataaaggaaaaaggatgtagggctactatcctcaagaaggccagctaaatgtgcactaaattatggattaacctcttgaatgtcccatatagatccaatgattgtacccaaattatgttgttattgagcccgcagctacccacggttgggcgtctaattactacagccggggggtgaaattccgtatcctgggttagttcgtttcgaattccccccccccccctccatttggtttctaaacactgtgaacgaaattactggcagaatcgaacggaacaaagagacatcagtttgtttattttttacgaattttcccgggatagaagtttaccggaggagtagacgagacgacgaagctgagcgagctttgccagtcttccgccgccgcgtcgcccgtacggcttgccgctgtgctgcgccgccctacgcctcctttccgccgctcccgtgcgcgatccggcgggacacagacacggccccctccgcctctcgcctgcgccgccaatttgctccgctctctctccggtggacacgaggataatcgacggagaggaggacagcgaggaggcttgtgggtttgagtgggctcgatgggagcacgagatgggccggcctggtcggcccataaagtttttcacaagagtaacaaataataaaacaacaaaattaaattaaaagaaccggacaatctacctaccagtaaaaatgtaaaaaccgaagaaagggattaaaagtaatttattccacacctattatgacgtggaatttattctaactcaattctctctaatccccatcaattctctccaaaccaaactaaggccctgttatttgtttcagtttaagattattgtaatccagattattaaatcatattactctaagctggattataatagaaagaatcccttatatgccactagaatttgaccagttcccttatatgccactcaaaattagcttctcccttatatgccactagttcaagtttttccaccattttatgccactcccaccactatagtgttagttgactgttagtcaaaggttagttttttttcgtaaatgaccaatataccctctcaactaaaaaatgtgtaaacttcaaaaaattataactaatttattttaaatcctttttgagtcaacaaaatttggttagaaccagtgaaaaatgctctttatattaaaaatattgttagaaaactgcatgtttcatgcttatattgaaaatttatttctgatggtaatggctaaaattgcatgtgatgcagagaacatcaattttcatatgttgtatccaatagctatattagtactaaaatacttattattgattgtatactaattcttaagggcaaatgcgtctttttacaatgaagttaacggtcaactgacggtggactgacggcaatggcataaaagggaggagaaacttgaaccggtggcataaaagggagaagccaatttgaagtggcatataaagtagccagttaatttagagttgcatataagagattctctcattataataagctgacatagaataagctgcgagctgtttgtttttctagattattggagacatataagggtagtgggtctttagccacccaataatctaaaaaagctcctccagagaagattattagattatagtaatttggattaatctacttgtttgtttcagtttacttctaataatttagattataataattctaaactgaatcaaacagggtctaaggcctaaagtggatttggggaaaatttatccccccgtgtccgccgcgctcgagtccggccggcgcagcagttcgttcaccggcggcgcagccgccgcagtgttattggccgtctccggctctccgcgcggtcgtcatccgctgtgctgagttccgagggcttcgtctgtgatatgctctaataggcatctatctaagccattggccatcaggtcgcctggtcctccctgctgcttcgttcagtattggattatttcgctttggttttggttaatgctcgtgattcttgtggatgaggtagtgattcatgagaaaatggacgatttgtcactttgttagttgggtttcgacaacatgaaccctaaatcgtatagggtggcattttgtcaaaaacccaacgaacaaagttgtatttagtccattttctcggtgatttattggggtctcttggtaaacaaattagggttcagatggttcagatgaactgggtgttgttactgttattcaagctgtatttccttatcattaactacctggggatttatccatgatatcttctagcataagcattagagcaaatatcaatttaaaatataaatgtgcgactgctgagaaaaatccaattgctgagaaaagaacgtctgctgaatgaaattcttcaccatgtatgcaactttcccctgtcacaatttggaggaaatttggagaatgaacctttgcattgagttagccctgaagagcaatatattgtgtacaagaagaaagcgaaatgactaaaatacccttcaacgtagtctaaaacacttactctaacacccctaatcaaatgcaatgtgtatgtaataatattgcatttgaaaggtataactaaatactaaactaaatccaaagtctatgcgtgatgatgttgtcaaagcataaaaatcataaataatgatgaggaagaaaaaatccatcccctcatcaatgaagtggacttcagtgccttcacaacctgttcttcagcccttagtgcgaaaagccttcacaaactattcttcaactcttcactaattcagagacgatgatgatgacgagatgaatgaccttcacaaactattcttcggcccttcaatgattgacgatgatgtcaactccgattaggagctggtgatatgacaaagatcagctccgacgtggagctactgatgatgacagaaggctaactccgacatggagcgagtgagatagtgataatgattgacaagcatgacttcggctgcgttcgaatgtccaacgattcttggatgaaattttagattctcgtggcacgcttttcaaactactaaacggtgcatttcgtgcgaagactttctatatgaaaattgctctaaaatatcagattaatccatttttcaagtttgtaataattaaaactcaattaatcacacgttactaccatctcgttttgcgtgaaacacttaatctttatcttcatcttcagaagagatggactttgatggacttgatgatatagcaaaaataaatactgacatgtacagcaaccaggccaagaagaagaattaaactaggctaagaagaagattaattctgctaataacatgctccgggacgaattcaacgagatgtaatggattttggtagactagataggaaacatagcgttggtgatatggacccgggggtatcacgtctagagggaggaggctgccctcaaacccacgtggctctccccgagggggatcgagcccgagatggagcggcggttgcctcctccctctagcctcaaacccacgtggctccccctaagggggatcaagcccggagtggagcggcggctgccccctcccagctagagggaggaggccgccctcaaacccacgtggctccccccgagggggggtcgagtccggggtggagcggcggctgccccctcccagctagagggaggagaccgcccacaaacccacgtggctccccccgaggggggtcgagcccggggtgcagcagtagctgcccactcccagctagagggaggaggccgccctcaaacccacgtggctccccacgaggagggggggtcgagcccggggtggagcggcggctgctgtcacgcccagaaattcccgaatagaatttcaagcagaatgtgcattaaaatccccgtccaggaccggccggggtacacaaacgacaatgttgacattcagatccacgtcttacaaacatcataaaagtcttacataaatgcagcggaagaaaagaaagacaacaggagctaagccttgactaaaactacagcggaaacaccactccacaggcatcctcgacggcacagacaaagcctactcctcggagaaaccttcatctgacccgaactcaaactctggggttgggaaaagtagagcaagactgagtactacccactgtactcaacaagtcataccggaataggggtatggtgcagggaatcatcaaagaagagctaaagtggttcatttgcataaagcgagcatttataaacagaaattgaaagatttaaacagttgtaataattaattaatattaatcatccgctgtccaacgctatcccacgttgcgacaggcccagccatccacctaaactatccaaattcaaaagattacactaaggtgagactaatcacggtgaatctggttgaccgcccataaccgcgggcacggctattcgaatagttttactctgatcagaggtgtacaactgtacccacaagacacagccccacaacacgtttccgtgcgccgacatgccaccacgacatatcggaaagaggctgtgacaggacccttcgcctaaccccttctagccaagcacaccacacctcaggtttcacccccgtccccagcgggcaacgggcagtcccctctcgtgcctaggtgaatccggaagcgacagaggccgtcgcagggcccgccccgctccatcacgcccacccttgcctggatgcgtcggctagaggagagctacactacaagcccagccgttgcccacactggcttgtggtaagtacgataagttcttccagggcatcccgcgaaccggtccttaactgccataggtgcgaccagcaaaaccatgcacccacagcccaccatgtgatttattttaattaaccaacaccaaagcggtgttactaatccaacaaaaccattagaaccaacagtctaaacattaataggatttttccccattgtgaactagttgaactaagcatggctaagcaatccctagtccaaactctaatcatgtta

SEQ ID NO: 7316 - DNA, 25935 bp, Oryza sativa
  unsure (1)..(25935): unsure at all n locations
gagagaaaagaaagaaaaagaaaagaagagaaaagaaaaaaaaagggagaaagagaaaaaggaaaaataaatagaaaaattaggaagaaaattaggggggataatagtttagaaaatttaaaataattagaatttaagtatagaataatcatggtcctagaattgcaaaatttaattattctttgtaatttctataagaaatcaattcgcggtagtaatttagatgtaattaataactaaacaaatagatgaattcttatagattattatagattatttttgggtaatccctataagtaatcaattcacggtagaaattcggatttaattactagggattttagccatgtgttatatttaatcatttagtcatagactaaattaaatcgtataatatttctaggatttcgtccgacatttagctcgcgatagaaatttctaacctattatatggatataatgctcgggtagattaaattaaaaacttaggacaacaaaatatttatacccgcaaaatagtttaggatattaaaactcgaaattgggtttgccttagttcgcgaataatcgactttcgcattcgactttcatttgaatttatttggatttttatttgaattctaaccgaattcaaatcaatttttgcacgtaactatagcgcctgagggagttgcggatccaagcgaaggccaagacccgcaagactttgagcaaggcaagtcatcactattccttgaacatgttgatcccaattgcgaaattattttgtttacaaataaaattgcatgcaatgatgaacatcccacttgtgattatgccatgccttgattattgttaacccttaaatctttgtaaccatgtttacgtatgagtctctattcaactatgacaattgcttagaaatgctattctagaatcatgcatactcatatttatcaaatgctatatgcttgggcaattacctttgggaaggtaattgagatgcggcatgtggagacatgagcgccacattgccatgatgttgatgacatgatttgtgaaaggagaaataaaattaaacaactgttttcgactggggcggacggaggatttgggtggtatctggaaaaggctagtaccgtccccggtcaattaaggaccaagccatgaagttaagcatgaaacgacccccgtacaaccgtacttctcgaatgggtgtagacctagcggattagatagctgagcggatgcagtatccctgcatagatggttcacccctgagtgaggcaggtgcgctacggtgggacagccattgaggtagggccgagaggcgtgccctacatcggtgtcaccattggtaggactgccatgagtgtgtgagagagagaacttaacttgaaccataatttaatatgtgtgtgagacttctctttcccgggagcgccagaactcctctcactgctagaaacatggacgcctagagtgcatgaggatttaagttcatggagcgggtactgccaatgcgaggttatcgaaaagctttgccgtgacgcgtctcatgtgttgggacgaggctcatgtgttgggcagtcgcggagtgcgggtaaagtgtacatccactgcagtgtgagtaaaccaaatctattcgaatagccatgctcgcggttattgagcaccgggacatgtattacacttggctagactctaaaattcttaaacttgtgtgggatgggatctgcatgatgatttttatactgatggagccacttcctgagaggcgggaatgtggacgtcctcagaaaaccataacgactcaatggcgggaagctatccttgggatcacaatggatggtggacagaaccgtcattgtttaatatgaatactggtattaaaacttgatcagtctatgctaggtcttaggcttgtgaaaagaattacaaaacttgctttgcgcaaaagaaccatagccatcctctgaattcctctgtcatgtgcatcattgctgtgatggcttgctgagtacggttggtactcacccttgcaaatataaaattaatcagaagcaggagatgaagcctcggaggatccctatgcctactaccaggagggagatgaagacgatggcgttcagtaggtcttagtacggtcgttgcctgtggcaatggcatgccgctgcctgaattccgctgccttatctatttctgcttttggatgtattccagaccgctcggtccgatgatttaagactatgcctgcgggcctatgatgtaataattcgtattagacactcgtgtatgtgcacttggtattccagctatgaattcgtgtgtaccaaactacttgatccagggaaatggtactgtttacacgattgattcctgttataaaaacgggggtctacagagctggtatcagagccatacgactgtaggaaaagaccaaaaggcgccccaccccttttctaagttggccaagggagaaattcccatttagtaatactttcaaaaataaaaacgctatgtttacaaaactcggtacaattttcatcttactcttaactattttctttacaaaaacaagttttaccctcaactgactttgggtttttcttaaaattagatggcagattcggattcacccgctacctgggagttgagcttacctcaatcagaggggtatgtcattgagctgcatcggatgttgaggcgtctgcgataccctgggttcccgtcataccgagtgagacagtgtggctcagtttgggaggctcgggtcgagattcacccccgagtcccttccaagttggactacagcttccagacacgtcaccaccgagacctgccagagaccgcgatgcaggatgccgcccgggaggccttcctccgactcagctctattcaccgagctgagttagtgagtaccaagtttgctcatcacccgttccgggaggagggcaactcagtttgcacagttcaagacacgccctgctgctacaacccgatagtgactcggttgtcacgatgggctgaggcagtagatgactactacgaggaggctctgttggagattgacgaccaccagagacgtatgggagagctggagactgagttgactgacctctcagtgcagcagcttcagttggaggaggagcaccaggcttggggcagtgagatggactcactgaaggcacagctccaggtccacggcgaccagttccagcagttatctgaccagtacaacgatcgccgcgggatgatggatactcttgaggagcagctgagagagagtcaggagcacgtcagccagctggaggagcagcttcgagcagccaagatcagcactacaggggcttctacttccacagcagtaggccgtgaccgctacttcttcctcaccccgccgtacccaccggcgttccacgctcttctgggagaggctagtatgctagctaccgagtcaacgccctacctagtggacccgacagcggcacagccacctgttccggagttggtgcacactccactgatccctacaccttctccacagctgggttccagtttggagactccgatccaggtcgactccgagacagagggaaccgacaccgagccagagatcgagccagacatcactgatcctttagaggatgagacccctgttccccgcatcaccttccttggaggccctcgcacccttagcactgctcgcaagagcacacgacctccgggcaagaggcccaagccagatccaggggccactacctctgagccgtggggactcaggtttgcgcgtgccagtgaccaccctctacctgccccgggatcctgcggatggctggaggactagactgacggactccttgaagcttcgatctcgtatcagatggtttttggataatatgcgagacaccccctcccttacctagattgacgagtagtttgatgattagttcgttgtatcttttggatgaaccttatttggactgcgtatgtatgcagtcgattgcatcatgattcatgtaccatttgtgaaactctgtgatgttatttatgatatctattgttgttgtattataaatgagtttattccaccatgcttgcaaaacaaagttcatatcaacataactcccttaatgggataaagccataggagctagttagaaaattaggatacttactccatcaacctacacagatggcaagccgacgttgggcaacaaccagcaatgacgaaactcagacacccgacttaaccactctggccggagttatggccacccaaactcaacttctgcaagctatcgcgaacaaccaaggcaaccgcggagggtcaagctttggagagtttatgaggaccaagccacccacattcgccacagctgaagaacctatggatgctgaagattggttaaggatcattgagaagaagctaactcttgttcgagtacctgaggccgataaagtgatctttgcggcaaaccaattggaaggaccagccggagattggtgggacatgtacaaagaagcccgagaagaagatgctggagaaccaaactgggaggaatttaccatagccttccgtgacaacttcgtgcctgccgcggtgatgcggatgaagaagaatgagttcaggagactacggcaagggaataccacagtacaagagtacctgaaccgtttcactcagctggcacgctacgcgactagagatcttgccgacgaggaggaaaagatcgacaaattcattgaaggcttgaatgacgagttacgcgggcccatgattggacaagaccacgatagtttccagagtttaatcaataaggtcgttaggctggagaacgaccggaaggtcgtggagcacaatcgtaaaaggaggcttgccatgaaccgcccgcctcagaccgcaccccagcgtcctaaagggacaaccccctcggcatggagaccaacagtggtgacaaccagtcgacctgccgcctccagcaatttccactggccggttaccattcagaatcgctctcctgcgccaaatcaggccgccactggatcagtaaggccaggaagctgtttcaactgtggagagtatgggcattttgccaataaatgtcctcatccaaacaagacacccattcgcaccggagctaatgcaacggctattcacgggactgctacccctgttgctggacgaggtctattcaggactccgcagactaacaggaccgctaccggatttggacgcgggcaagtgaaccacgttcgagctgaagaggcccaggaagatcaaggcgtactgatgggtatgttttcactcaactccactccagttaaagttctcttcgattcaggagcatcgcattcatttatatctttgaaagcaagtcaacaacacaatttaaccagagttaaactaagacaaccaatgttagtacattcacctgggggtgagatagcagtggatacagcttgcattgacgtacccatccgccttagggatgtggtatttccctccaatcttatggtgctaataccccaaactcttgatgtcattctgggtatggattggttagcaaagcatagaggaataattgactatagacgtagagaagttaccctgaccacaccctggggatcggatatgagagcaaccatggatcaagatcctaggctaaccgaacgtgttggaggtatatttaccatgctacccctaaagggaatgcccgtagtgcagcgatttcctgatgtgttcccagaggatttacctggaatgccaccagatcgtgacatagagttcattattgacctgatacccggaactgccctcatatccaagagaccatatcggatgccggtcaatgagttagaagaacttaagaagcaaattagggagctgcaagaaaagggatttgtacgccccagttcgtcaccttggggagccccagtgctattcgtcaagaagaaagatggtagcataagaatgtgtgtggactaccgctcactgaacgaagtaactatcaaaaacaagtatccactaccacggattgatgatctttttgatcaactcaaaggagctaaggtgttctctaagattgaccttcggtcaggataccaccaattgaaaattagaaccagggacatacccaaaaccgcgttctcaacacgttatggattatatgagttcactgtaatgtcgtttggtttaaccaacgctccggcatactttatgaatcttatgaacaaagtgttcatggactacttggacaaatttgtggtggtattcatcgatgatattctaatctactccaaagatgaggaagaacatgcagagcacttgcaattggtactcgagaaacttcggaagcataagttatatgcaaaattcagcaagtgtgagttctggttaaaagaagtcgcttttctaggccacgtaatctcggccggtggagtagcagtggatcctgctaaagtggaggctgtcacggaatggaaagcacccaaatctgtgactgaaattcggagttttctaggcttggctggatactaccgacggttcattaaagggttctctaagatagcccgaccaatgacacaactactcaagaaggaaaagaagtttgtgtggtcagaatagtgtcaggaaagctttgagcagctcaaagaaaagctgacctcggcacctattttagttcttcccgacatcaggaaagactttgttatatattgtgatgcttcaaggcaaggactaggaggagtactgatgcaggacggaaaagttgtggcctatgcgtcgcgacaattgcgaccacatgaggaaaactaccctacccatgacctagaactcgcagctgtggttcatgcgctaaagatttggagacattatctaattggaaaccattgcgatatctacactgaccacaagagtctaaagtatatcttcacccagtcagatctcaacttgaggcaaagacgatggttagaattaatcaaggactatgatttagaggttcactatcacccaggcaaagcaaacgtcgtggccgacgctctgagtcgtaagagccattgcaatcatctgagaatggaagggatggtccctgagcttagggaagaaatagctcagctgaacttacatatagtaccccgtggacagataaacaccctggacattcaacctcttttgagaacccaaatagaagaagcccagaaggacaacgaggaaatccgagaggtgaaggaacgcttagctgcaggacgtgcaaaggaattttcaaccgacgaaaatgatgttctatggtataaaaagagaatttacgtacccgaacagggtggactgaggggattaattttaaaggaagctcacgaatcggcttattcattacaccccggaagtaccgaaatgtaccaggatttgaaggagggctactggtggcccaacatgaagagagatgtggccgaatacgtagcactctgcgacgtatgccagaaggtgaaggctgaacaccagaggccggcaggtttgttgcaacctctcaggattcccgaatggaaatgggatgagataggtatggattttattgttggattgcccaagaccgcaacaggatatgattccatttnnnnnnnnnnnnnnnnnnnnnnnnngacggcgagattcattcccgttaagacaaattatagcagtgctaagctagccgagttatacatgaccaggatagtatgtcttcatggtgtacctaagaaaattatatctgatcggggcacactgtttacctcacatttctgggagaaagtccatgaagccgtaggaagttacctcgcatttagcaccgcttatcatccacagacagatggccagacggagagaaccaaccaggtcctggaggacatgctgagggcttgtgctatggattttagcaaggactgggagagatgtttgccctacaccgaattctcctacaacaacagctttcaagcaagcctaaagatgtcacccaatgaggcattgtttggtcgaagatgtcgtaccccgctaatgtggtccgagactagagaacgggcggtatttggacctggcattattcaagaagccgaagaaaaggttcgcttgatccgtgaccgtctaaaagtggcacaatcacgacagaagatttacgccgacacccgaagaagaatcctggagtttaaggaagcagattacgtttatctaaaggtttctccgatgaggggaacaaaaaggtttaaggtcaaaggaaaactggcaccaaaatatgtgggaccattccagatcatcgccaggcgaggagaagttgcatatcagttacagttaccagagaatatcgcggatgtgcacccagtcttccatgtgtctcagctaaagaaatgtttacgaatgccggaagagcaagctccgctggaagagattcacattagcaatgatctcacatatccagaacacccgatccggatattggatgaagccgaaaagaggactaggagcaaagtgtggcgtatgtacaaggtacaatggagcaatcatactgaggatgaagccacctgggaaagtgaagaatttttgaggacggaatacccgcatctattcgaaaactggtatgaaatctcgggacgagcattatttaagggggtaggtttgtaacaccctgaaaattcgatcgacaaaatcaaaactctaaaaatacggattttcaaaaactttttaaactaattgcatcatgccgatcttattcgtctattttatctggatttgatctcgaagattattaatcgtgagtaaagaatagttaattaggaataaaccttaaaaacaaattggtaaaataaatataaattaaaaataaagattgggtgtggatagtaataaataaaatattatcgcgaccatatttggatcaattaaatttaattacgatggaataagaattaaccctaattaaaactcaaataaattatataaaaataaaatatgagtaatattaatctagggtgaattcattagttaaaatataaaattaatcagaagcgggagatgaagcctcggaggatccctatgcctactaccaggagggagatgaagacgatggcgttcagtaggtcttagtacggtcgttgcctgtggcaatggcatgccgctgcctgaattccgctgccttatctatttctgcttttggatgtattccggaccgctcggtctgatgatttaagactatgcctgcgggcctatgatgtaataatattattacatcgtattagacactcgtgtatgtgcacttggtattccagctatgaattcgtgtgtaccaaactacttgatccagggaaatggtactgtttatacgattgattcctattataaaaacggggtccacaacatagtaccaccatataggacatgtacaaaggtagagtcatggtggagtacacagtaccaccatataggacatgtacaaaggtagagtcagatatgagctctacattatttagatactagcatcctacaacagttagagacaatatggtttctaatcattaatgtatcaaaatactttttcttacttttattttctttcttccaccaccatgcaactaaatttgctctaataaatgctaagagtcgactctgaactgttgtcatgcataacaaccatacccatttctctttcttccatgtcatcgaatttgcttgtatgacaatagagagagaccactataaacggttgtatatgctctaatgcttgtgcttccccatctaatataggaatttaattgcataattggtgattttaccactgtccactgtggtttgtcgcgaccgtgggatgcgagcatagatacaggagggcttctttaccaggggagcaaggagggctacgatgggtttcttttttagtgaacctgcaacagcctcacattgtactagcggattcttcgtgctttgctgcaggaattactaagtaattttttatattatttttcgttacaattcagcgaggagtaaaaagaaaaaaaaaatctcaggacttatcaatatttatcatgaaacaaatgaaattcgtactttaatgtagaacatgttgataagtatatattaaatattataaaatgatagagagatttgtaaaactattggggaaatgatgtgagaagtggtgagtgaatatgtgttgatgaaaaaaacacacactggcctagtagatttgcttaactccagtgcaggtccaaaatcttgctcttgggttcaaaggcgtgctagttgatttgatcctgtaatcaacaagaaggaaaaacaagaaaaacgaggttaaatccataaacaatagccgattggcttagggtcgatgacatatcgttaatcattgagccgacgttattggcattagatcggcaatgaagattaaatcaatataaaattaaatctactcaatcagctgtagatatcaataatatataatattcctctcgaaatatatttaaaccaagtgattaagatagatcgaacagtaagtcgaggcagtataaatcacttatgcttaaaagtactttaagacgaatattatatatacactcatagcatagccgattagatagatttaacatgtgtcggctaatactctgataccactctatatcaagatattaaatgtcacgaccggaattaacccaacgggcgttccttacgtgcgtgtattattccttgtcccaggaggcaaggtacaccaaaagttgatacatttcagagtttatcaagcggaagcgtaaatagttaatttattacatgggcggcgaaggcccagcacacacaaagacaaacgggaaacagcgaaagactagggcgacggccacaagcgcttgacggctggcacgagctagacaccaaagccttcatcttccaggaactccacttctgggtttgggaaaaattgagcaagactgagtacaaccaccgtactcaacaagacacacccacaagtgcagaataaatgcaagggagtacaaggggggttataatataaagggttagggtttgcagtaaacagcattaaaagacacttagttgctcaaagctattttgtaaacacgattctagagctatacaatattattaatcaaggccgtgaacccacacgaacctgccttaacccaaggcctacgatgattcagactgaactagcaacccgaccctgggtcccagctcgtcccaagccaacccaggccaaccattccacattttagttgttaagcaggttttaagaattaaaacattaacttgggtacattgctcggcttgcccataaccgagggcgcggctatttgaatagattatactctgatcagaggtgtacatctttacccacaagacacatcttcctcacgtgtaaccacgtgtcacataccaccacggtatacggacggaagatgtgacatagtttccaacccatcctagccatagacaagagtaccgacccaaccccacctacggccggaacccctaggacaggtaggcagaactgagcccctagcagcaggacaccggccctgtgccatgacatctcgactaccgggccgcagctcgtgtagctttcatttgtcctagagatgtccatcgacccccgacttcgtccatctccatccgtgtacttttgtttataaccagactgagccacaaactaagccttacccactagacatgtggaagtacggtagtgctttgcaacagaggcccgaagaccggtccttatatggccgagatgctactatcaaaaccatgcaccccgagcccagcctaaaaccattttgaggattttgaataaagggggaggtgtgaatccaattccacaataatccaaccattccatagtatccaggtgatatgaatatcccaaagtctagagttgtaaaaccgcctaatgttgcctaattaagcggcgaagcatctaccaaaaatcatactagtggtaccatgagtagagtgtccactagttggggttttgtttattctagggtgaacaaggtaataataacaataacaataataataaggtcataacaaaggtaaataggcatggctaaataaaacagtgataacgcgggaatttaaataaagcgataatgcaataatttaaatcaaaataattttataaactgggattcaatatattcaaggatgatgtgacttgccttgctcgctttccgaaacgtcggcttcaacctccacgaagagcggatcttctgaagctgcagcgtctacacgaccaacggaaaagaaaaggcttttactctaataaaatccatataacaagcaggaacaaagcacaaaaatgggttcttgacttcttaaggaaaaattagagacttgaacggtccaattctgagttcaaatggccaagttatggccatttgaagtttatatgctctttaaatgaatatttgcgaatttcttcatttaaattttaatttaaaaaaaaggtttattgcgtcagccgaggggagggggcgcgcggaccgggtccatgggagtggggcccacgcggcagcctcacggtccacggtggaccgggcgcacccgggctcgcaccggccggcgccgtgggccccacgcgtcagccgcacccgagggcgcgtgcggctgacggtcgggccccacgcggcagccactcggcgcgcccgagggcggccaagccggcgcagccggcgggaggcagcgcccgcccccctatggtcaccggcggtggccataggcacggcggagcggtggccgagagaggggaagggaagggggaaaacaagcggcggtccatggctcaccctaggtcgacggcgaagacgaaaaaggcggccggagcggaggaaggcggcggcacggctcgggtcgacggggtcgacggcgtttcggcggtcgacgagcgaaacggaggggtggacgaggtcggtgaggatgcggtgaagccgaaggaggcgacgccgaggtgggcggtggtccggggcgacgacggcggcggaccggagcttggcggcgactgcggagagagagagcgacggcgcgagctcgatttcggcgaggaggaagggcgcctaggggcgtaatgccatggtgtgtttccggggagggtttctatacagccgggccgagagagggtgtccggaaaagaaaggaaaccggcgcggcgctctcgggctccatcaatggcgccggcgggattagggaagggtttcctaatgaatccaaggcagagatgtagggaaaattgggggaaaggaagagggaatcacgggaataattcccccctattgattgcacgcggggaggacggaatgcgncggattcgccgacgacgcgggcgcttggcgcgggcggaacgcgggaacggcagaagaaagggaatgacgggtgggccccacccgtcagcgagggtggcgggcgggcccgcccgtcagcggcgcgcgctcggggagaggccggatgggccgcgggggagaggagagagggggagggagatgggccggaccggcccaagggagggaagggggacttttagtgtttttctttttataaaatcattttaactttgtttatttcttaataattattatttgtgctctgaaaattccactaaaatttatttacgcattttaggcttttaggaaatatacaaaaatcctctaagccttatttggcttttaactttgcacattttaattgttggaggctttcacacggattttaattattctaggcatcatttaagggatatattttagagtcgttttgggacgtgacattaaagcagacaaaatatatcaaatagtaagcctaatatactttaatgcaataagatgttaatttaaagggcagacttagcatattaagtgaacatgtaaagattaaagtagctaaatccggtaagatcggctgaaacctcgatactgtcagggttacggataaggtataccctctatccttggatataggttgtatactgatatggtatacccgcgcgtatacggatagttcctgtatgcgttaaggaaatctatcacgtgatagaaacggagtccacagatagaaggaatccgactcgaacagaactgggtcgttaccatatcgtgaggggtccgatatctccgagttctacttagagatcaactgatccgtggtataaaaggtaccccctgggtaagacctaaggcatcgaatctcaccgccaacacatccaccacagcctacgaagccgaagcctacaggagccaaatcgccgggtgatctagtcgaaccaactcgactacggtctcgtcggtatcatcgagttccattattccctttgtaatatgtgattttcatcatataatctcataccaactggattagggctattcctatcaagggtcctaaaccagtataatccttgtctttcgtttgcttgatgtcgtattgcatagatcctcgttctaatgtaccccaataccctctatatccggtctacgggtttcccccatcgacagtagcgcgccatgtagggggacttggtgctcaaggttctactagtatgacttcaagccttcttgacgacagcgtcaaccccgccatcaaccaaggatcttctaactcaacgatgctggtgtggacccaagtcggcgaaatcgtcttcccggtctacaccacgatgccgatcttgactggcccagcaatggctggaagcgagagcgacgtggttacgaccccgacagactccatgtcgaaggatcctcccgtaaaagcggaaaacggaacatcgacaacgtctgagcccgagaaggatcctaatgtggcccaatcttgtccttccgacaagaagtacgagccgacaaggacaacttccgaggcaacaaggtcctggtgtcctatccataaaaccagaaaacacaccttgcaagcttgctgggattttctcgacgtacaagccgaaatccgtgcttgcagagagcgcggaaatcaatgaacttctttaacccgtgatgtctattgtcctatccacaagacaaagaatcacgacctctcaagctgcaaggttcttctcagtgtcatgaggacgtcacctcctaaggtctagcagtcacaaatctctcctagagatacggacaaggaacgagaagcggcagctatctcagatcgattcgttggggtactcgatatcgatccccacgagccatctgttctacatttgctcgaagaccaggcctcatcgtcgacaagtacaccatgcgacgtgtacactgtcgatgggactagcacatctagggacggcaacacggaagcggagtatcaagtggctacaccggcccagcacatcaggaccatcaatgcaatactgagggaaactccttatgatcccgtcctgaacgcggatctcgatcagtggacagaacgactacgggaatcagtggccaacctcagtaacgcgttcgaggaggccgctgccagggcaccgccagagtaaccggcggctggcggcactaatagggaatagcctgcgcagcggacgccacctcgtcaagctacccttctgcctcgcggcgccagtgatctccgcgaccatctaaaaggccgccgagaagcacgacgcgcccaaggcaacgagagtcgttcccaacgtcgtgtctcttcgcgacatcgtgagaacgaagagcaaggaggacatctcagcgagaacccagaccgtgataatcgccacaaccgccgcgaacatgataatcgcgaacaacgggtgcctggcgatactggtcgaggacgccgacgcaatgatgatgacgacggagatcagcgccagaacaacaatggtgggcggcgacaaggttctcgagaacccgagcgcacaccggaaccgagtgtagacatcggatagacatccgcggaggacacatgatcgccgacaacccactgcccctggcgacgggtgtagggctttcagtcgtgccctgcgagatgtccgattgcctgagagatttcgaccgggagcaatagagaaagacgacagaagcaccgaccctgaggagtttcttctagtttattccacagtacctacgctgccggagcagatgacaacgcagtagcaaattatttgccggaggcgttgaagggatctgcacgtacatggctagttcacctcctgccctactcgttttcttcatgggcagatctgtggcagcaattcgtcgctaacttccaaggaacatacaactgccacgcgatcgaggacgacctacatgcattgacgcagaatccgggcgaatcattgagggactatatttggcgcttcaatgagtgcagaaatacgatccctgagatcaccgatgcttctgtgatccgcgctttcaaatccggtgtccgagatcgctacaccacccaggagttggcgacaagacgaatcacgactgctcgcaagctattcaagattgtcgatcgttgcgctcacgcggacgatgccctaagacgcaagaacgacaagccgaagatagggggagagaataaactagccaaggacgcacctgagtcaagcaagaagaagagtagcaagagtgggaaacggaaagctcgaacggaggtcctcgcagcagaatatgcagacccacccaaacactcagacccacaaggcaacgacacgaagaaaatatggtgccctatacacaagtcggacaagcactacctagagacttgtttcgtcttcaaaaaggcactcgtgaagcaactggcattgaagaagggcaagcgagtacgtgtagtcgagaaggttgctgaagcaactactcaggactcagactcaacatacccagactccgatcttcatgtttcacacatgttcggaggttccacggcgtactcctcaaagcgagagtacaagagagtggagcgcgaagtttgttcgacatggcagggggctgcatccaagatgaagtggtcagagcagaagatcgaattctcagaggcagacgaccccaagactgctgtcaccccagggcgatatccgatcgtggtcgaacccactattcggaatatcaagtttgcacgggttctcatcgacggcggcagctccatcaacctacacttcgccagcaccttggacgcgatggggatcccacggagcgagttgacgcccactgatcaacccttccatggaattacccctcagtcgtcgtccaagccattgggcaagatcacgcttcctatgactttcagccaagcaaacaacttccgaacagagcagatcacctttgatgttgctgagtttgacacagcatataacgccatcatcgggaggattgcactcgcgaagttcatggccgcatctcactacgcgtatcaaatactcaagatgcctgggccgaagggaacaatcactatttagggaaacgcgaagctggcggtgcagtccgacaagcggagcctcgacatggtcgagcacacccccaacccacccgccacagctgagccacccaagaaagtgagcaaaacaaacaagacgccgaagccagacggcgcaatcaagatcgttccgctctccagtgccaacctcgacaagaccgtcaagatcggggtgtcactggacgagaaataggtactcgcgctcatcatcttcctccgtgacaatgcagacatgtttgcttggcagccgtctgacatgtcgggggtccccagggaggtgattgagcacaaactcatggtgagaaccgatgccaagccagtaaaacaaaaactgcggagatttgcaccagaccggaaacaagccatacgagaagagctcgacaagcttctcaaagttggcttcatcagagaggcactccatccagagtggctagccaatccaatcatggtgcgcaaggccaacgggaagtggaggatgtgcgttgatttcacagacctcaacaaggcgtgtcccaagcatcacttccctcttcctcgaatagaccaactagtggactcaacagctggttgtgaattgttaagctttcttgacgcttactccggctagcaccagatcagcatggcaaaagaggacaaggagaagacaacattcatcacgccgttcggtgtattttgctacgtcaagatgccgtttggactaataaccgcaggaaatactttccaacgcacggtccaagggaacaatgtcgaggcctacgtcgatgacattgttgtcaagactaagacaagcgactcattgatcgatgatctccgggaaacgtttgacaacctccgacgatatcgactcatgctcaatctagagaagtgcacgttcggagtaccatcgggcaagctactcggattcctcgtctcaggaagaggggtcgaagcaaatcccgagaagatcaaggcaattgagaacatgaagtcgcccacaagactcaaggaagtccagaagctaactggatgcatggcggcattgagcagattcgttgctaggatgggagaacgaggacaacccttcttcgctctgctgaagaaacaagacacaggaagccgaagatgtgtttatcgcacttaaaagctacctgtcaaatccccctgtacttgttgccccccaacctaatgaagaattattccgctatattgccgccacaccatattctgtgagtaccgtcattgttgtcgagagagagaaggtacaaagaccagtttattacgtcagtgaagctctctacgacgcaaagacaagatacccacatatccaaaagctgttttatacagtaatcatgatatcaagaaagctacgccactacttccaagcccacagagtcacagttgtttcctccttccctcttggtgaagtcatgataaacaaagacattatcggccgcatcacgaaatgggtagtcgagctaagccaatttgatgttcactttgtgccacgaacaaccttcaggtcccaggtcctcgccgatttcgtagctgactggactatgcctgacaacaggtcagaaagtcagaccgacaacgagatatggacaatggcgtttgacggcgcactcaatagccaaggagtaggggcagggttcatcctgacatcaccttcgggagatcagttcaagcatgcaattcacctcaactttagggcgaccaacaacacagccgagtacgaagaactactcgctgggataagagcagcagccgcactaggagtcaagtgactaatcgtgaaaggggattctgaactagtcgcgaaccgggtgcacaaagagtacaagtgctctagccccgagttatccaaatacctcgcagaagtcaggaagttggagaaaaggtttgatgggatcgagatccgacacatatatcgcaaggacaacatcgaaccagatgacctagcatggcgtgcgtccagacgagagccactcaaacctggcaccttccttgacgtcctgacaaaaagaggcaaacaacgaagatagcacagtcgtccccgacattgactcgggggctacaaaggcagtacacgtcgttgccgacatcgagaccacagacgactagcggaccccactcatcaggttcctgaatagcgacgagttgcccaaggacgatgcagaagcagataaaataacccgacaagccaagatctactgtatgatcggcaacgatctatacaaaaaggcgccaaatggggtacttctcaaatgcatttcattcgacaatggcaaacacctcctcctggacatacacgaagggatctgcaagtcacacgccgccggccggacattggtcggaaaagctttccgacaagggtttttttggccgaccacgcttaaagatgcttgcgacatggttcagtggtgtgaagcctgtcaatttcacagtaaacacacaaggctaccagcgcaagcgctccagactatccctcttacttggccgttctcgtgctgggggctcgacatactcggaccattcccatgaggacagggcggctataggttcctattcgtggcgatcgacaagttcaccaagtggattgaagcaatgcccacgggggaaatcaaggccgacaacgccatcaagtttatcaaagggatattctgcagatatggtttgcctcaccgcatcataatagataatggttcccaattcatcagtgccgacttccaggactacttcatcaaattgggagtcaagatctgcttagcctcggtttctcaccttcagagcaatggataggtcgagaggacaaatggcatagtaatacaagggatcaagacccgtgtctacgacagactcatgtcacacgacaagaagtgggtcgaagaactcccctctgtcctatgggccgtgcgtaccacaccgacaacgtccaacaaggagagacccttcttcctcgcgtatggctcagaagctatgctccccacggagctacgacatcagagcacacgagtacagaagtactccgacgagaatcaggaggagcagtgaagcgacgatgggaatctactcaaggaacatcgagaaagagttaccgtcagagcagccagctaccaacaggcccttcgccgataccacgagaagcgcatcagagcacgcacgctttcgatcggcgattacatcctccgacgggttcaaagccaagcaaggcgtaacaaactctcacccaagtgggaaggaccatacacgatcacgcaagtcttgcggccaggtgcattcaagattgcagacggcgatggtcgcgagttagcaaattcctagaacattgatcaattacataacttctatgtataaatcaatagtatccatatttgtaagacatcttacgatttcaataaagttgatttcaggtgaagattacgatcaaagtgtttctttccgacgatcccttaccacgatgacacctagcgctgaaacctatcctcatgtccctttccgccgtcttgacaaggcctctgaggaacttaagggaacttcggctggggacgcccagagtggataaggccttgtcggatcatgtagagacaaacgaccatgtaagatctgttcatgtaagagttcttgccgtgcgtattaaccaagctgtgtaattggaaatttagttttccaacttcacggctgggggctagggtcagtgctttttcaaccaaggcaggtcaggggtccaagagccttatcctctgagaacgattcttcgacgacaaggttgggggctagggagagtgtatgactcaagtgactgatcgaagtcgcaaaatgagaaaacacccatacacaacatatccagagtaagagagcttagctagatagatttcttttctatttcacaagtacctcttacaattcgtaaatattccaaaatatattacatgtttccttgagatattttctacaagatacaaagactactaggacggccaacgccagtccatggactgaaagaccttctctgcgagcggcgccattgactgtgcctgatcgtcaatctctgcgggagtcctccgagagcgtgagaacccttcgtggaggaactcgaggtgcagctgcgggcggtgatctcggatacagtccagcacatgccctctggcatagcggctcgatcgatgacactcctgctttagggcctcgtcgatgcgcttaccgatcccttcgagctgtgtgcaggtcctattcaaccacgagatatatctggccgctgactcctcgggattcccgcgaggaactcggagtttcctgcagactccagccattgccgtgcagcagctcctgaggtacgagttgaaccatacctcgcgacctctgagagcttccatggccaggtctttcttcacttccaccatggtcttctcgagttcggccacctcgagcttcgtcctccagtattggattcgacgatctcggtcggccaacgcactctcgaggtctgcccaacacggaaaggactgagtcaggttcttcttctccctcgagaacacagcaaattaagtcaatccgaacaaaagagtggaggaagtaaaaaccaaggtgcaaacctaaggacgtcatagccatattcgtctccgcggacaggtcttgaccgacatcctcctgcgacacgtacggctcaagcgcaagtgccgggacgattaccggcatctcaggctgcccgtgctgctggacatccttgatgtcgacatgtctacaacgacaacaaaagtactcggaatcacatgctaagaaaacaaaggaaacagctgcatacataaaagcggtcagaacctgcggaagtttttacagcgtgttgattaaggggtacaagggaaacaggatcctactcttcaaaaaggggaagaactgactcccccaagtcaccgacttcctccatcacgcctttgcgcgcgtcatcggcggccccttgatccagagcccttttgaggtcaaggtcgggatatgccagcttcacgcatgcaaggatgtggcatgccgcggtgtagataccgttggacgtctcctcgcagatcctggcagcatgcttggatggtggtcgtgacgccgcactccctggcgagctggtgtaggccggtgtaagatatccgcagcgagccgcggatctccgacaagttgttctcgagctccgacatccggtgctcgagtccttgccgctgcctttcgttgccggccaccagcttcctcatcttcaggaggtcctcgcaggcctccgctaggtcgtgtgccagcttgtcagcgcattggttcgccgacgacaccgccgtcctggcctcctcgatcttgtggcctacgccacgagcaccagctggaggatgcgctccatctcagcctggagctccccccaggtgaggacatcagcaggcaggccccgagcgggcacaaggccgtcggcggggccgcttggcgtcacctcccagtccctagtcaagaccacgacatctgtcgaggccactacaagggacgcactggagcccgcaccggacccgtcttgtgccaccttcgcccgcgccaccctgcgaaaaatttccgctctttcataaaatcaggcgatcaaggtttcgtgaatgaaaagacttccaaaaacatctacttacttctcgccgatcttcacccgcctctgccttcactgaggcgggggagacgcgtccgtgacctaagcaagatagcatggtgtgaggttaaaacattccgattatgcgttaaaaaaaagaggcttaccgatggattaggcgcctttcgacgggtcccgagtacagaggagaatttcctccccttctttggaacgttgctgccgcttgtggtagaagcagcgacgtcagatgcctccttcgcgatgccctctttcaatgaagccgccgcttgatggtccgcaagcggcccgatgacgtccgtcagagggagggcctgtgcaacatgaagtcacaacacgatcctggcagaaaaggggtaatggagtcatcgagtacactcacgttgatcgcagcttcgcgttcagccggacccttctcgcaaagggggacggggatgttgctcgctgtcacaggagcgctgatcatcacctggccaatgcggcgtgccatggtgtccctgtccaaacctgtagatcgaggacagggactcgatcagtcaggagaaacagacacatccggaacaaattctggaatacaagaaaaataccacgaggagaaacccgggtcgcgtcctccggcccagagtagtcaaaggccaggcacgagcctggagcagttggatccgcctacctacgaagtcggcaacgacttcgtaccatgacaacccccgtactcagaggtcatcgataatgtcgatgaaagactggagggagggagtcagggcgggtttggcggtacactctggaatcttgtctggttgttcctcggggacaacaaggacaggatccgagttttctatctgaagatagaaccatctcgcccgccatttactgcgagaggaagggcactagaaggggatgtaacatgacatccggccatcccgaagtcggaatccaacgcatccagataccctgttggatttcatccagcgcaactcgtagtaaaagcggaagggatcaaggaatggctctaccccaatgtaggcctcacaaagataagagaagatactgaggaacgcgatggaattggggtttaggtgaagcaaggaaaggccatagaagttcaagacgagaagaagaaattcggagggcggaggaagaaaaacgcaagaaatgtaatcctcaacctcaaccatgcggcccaagatgggttcgggttcagtacctcctgtttccctctgcatggtcccatgaccagggagggcgccgtcgtcttgccacttctttagagacgcggtggtggaggtagacttatcgagatccatcgccgccggaggatcgccggagaacaaagcaagatgagcaaactagggtttttttttgcgggagcggagaagacgaagggcgtttgaagaccggagtgttctgtggcaaacggacttcaaaatggatccccaaaattcctttcaataagcacactaccgacggtgcgtattccaagcaaaggagagagattgccgccggaaaattctaggtccgttacgcgcaacggttttcggacttcaatttaaattcactcgtgaccgttgaacttcgtacgatgttgtcgataactatgtgtatctacggttatcacaccgagatcgactagatgagaacgacaacgattctgacatcagaagtcgcgatcggttgcatgagttcatttaagcagaagtcgggggctactgtcggggttacggataaggtataccctctatcgttggatatatattgtatactgatatggtatacccgcgcgtatacggatagttcctgtatgcgttaaggaaatctatcaagtgatagaaacggagtccacagatagaaggaatcctacttggatagaactgggtcgttgccatatcgtgaggggtccgatctctccgagttatacttggagatcaactgatccgcggtataaggatcccctgggcgggacctaaggcatcgaatctcaccgccaacacatccaccacaacctacgaagccgaagcctacagaagccaagtcgctaggtgatctagtcaaaccaactcgactacggtctcgtcggtatcatcgagttccattattccctttgtaatatgtgatttgcatcatataatcccataccaactggattagggctattacctatcaagggtcctgaaccagtatattacttgtctttcgtttgcttgatgtcgtattatgtagatcctcgttccaacgtaccccaataccctctatatccggtctacgggtatcccccgtcgacagatactatctctattgatgatcataagacaagctagatattgcagttatgaatattacttaatagatcgaactcaatcgaagaagaattaagcataataataaatacaagatccaaacatgatgtgatcatggctaccacggatgcaatcattgctcacatcatggatgaacaagaagatatcgagatcaagtactccaagtgctggaatccgattcggctacctactacactgctgacttcaaacggccaccgaatctgcatacgacctccattttcggcccgtgagtagttgatggaaagctctcggagccctctttctaacggatccagcctcttctctgaattccatctcgtgtggccggaatcacaggaacaaggtgctgcgtcacctataatgggcttatgggcttgtaacttcatttgggaccccggcccaggtggggcccatgtggggtgcgccccaagctggtggagcacgaccctaggcacccctaggttgtcctcccacccctatatatagctagttaccccttcagggtttctggggttttgatagattaaagtttagccattgctacttgcttgcagtgcgcgtgtctgctagactgtccgtctgcttgttcttcggaaccccaacttatcatttgtatt

SEQ ID NO: 7317 - DNA, 49140 bp, Oryza sativa
  unsure (1)..(49140): unsure at all n locations
cataggtgaaagactagcactatgatgtacgtatacgtgaataaaataatttataactattatgatcgttattgcctgcacacacatttttatgatgcataactctgtcaatgtgttgaggctattggattttttaaaaataatattatttgatggaaaatggtaaacaataatttctgcctcattataatcgtgaaagtagaagccaatcgaactcgtgtcgtgataggaggcttgtcgaacagcacaagttcgaccgagccatattgaccgttggaaacacggcgagccagaccaatcaaactacgagtggtacaataggggcttatcgaactttgatagttctactgggcccacaactaacagccgcaggccctgtcgaaccacagtagctcgactggccccagcatatcccatatcgaacaatgggcattcagtacaaccctttaaattccttccccacagctcgacaagggtcattttgatctgtagagggaggactagttagagggcagatcggcatctgcaggggatggggagtgaggagaccacacctgcggatagcgggagaggagcggcggtggaggcccttcctcaagtgatattaaattcccaatccctaagttacatgtttgatgttagcacaggtttaaattagttttactagattagttagagtagttaaatttgaagttagtacttggtgagtacatatcttttttagttagtattaatttattattatagtgaaaaaggtttttgttagcacgtatgtgactttgtgcttagttggtggtagtaaaaattgacacggagtattaagttgaagttgaacgtattttaatgaagttgtattgcatgagtaaaaaccacatgtgaaattattgggtagtaccatggtaagacaatttttcatgttctatcaagaatagatttagaatgatttaggccaaaagcttgctctagttataggataataggatggcaattcaaagctttcaatctcagcctcgctcaaacgaaaaatcctttttgcatacggccagatcaatttttcgcatgctcatgtggaccgcatgcaaagataaaaaaccaaaaaaattgcaaaaaaaaaatcacgccggccgctcccgctgtcggtgacgtgccagtgtcgcgccgtccggtcccgccgtcgaatctgggtaggaggagccctaccgcccgctgtcaaccgctgctaccgagccgccattgcgccgtccacttccgccgccggatctgggtggaaggagccccgccgctcgccatcgcccactgctgccgagcgggggatggccgctgccaccggatccgggagggagaagccctgcctcccgccatcgaccattgctgctaagctgctgtttcaccgtctgctctcgccatcacgggagccgctgcggacaccgctcccgtcgccgaattcgggcaggaagagtcctaccgccagccatcaatcgttgttgccacctcgtcgtcatcgttgtcggtggctccaggtgaggaaagggatggtggcggcggcgcggcccctagccaccgccttgtcattgtcctcggagatgaggaaggggatggcaggcggcggcgctgccgtccgccggccgcccactcgaagggagagagagagattgaggagaggaagagagaggaggagaggagagagaaatatctggagagggagagagcggagaggggtgaaaaaaatttgaagtggtgaggagggaaagaaagaggagtggagaaaaaagagcagatatttttgcatgcggaccattttaagggcccgcatgcgcatgcggcccttcaggaggactgcatgcaaaaaaatattcattttcgcacgcggctccttaagacgtttgcttgcaaatattgatttttgtatgtggatctcttaaaaagctgtatgagaaaataaatgttgatttttgtagacacggtcagttatggttcatctgcaccctaacgtggatctcgtccaggaaattcgtctaagtagtagtgtattgctactgatagtagtgtcaattgttctgccaatgctgtcgccgctgttgtttgtgaaggttaataacttatatttctgttaaacagttttgtcacctgtgttgttatttgtcactttgtcaatcgtgttgggtgctggtcgtggtcggtatcgtgaactatgttgggttgtaagtgaattttttgtcatatttctttttagtattcttaacatcacaactggagaactgatctttcgtgggtcatgcaaaaaccacattagtcccggttcctattcgaaccgggactaaagatcatcatttttagtcccagttaaaaagcgcaacgggactttatgatctttagtgggactaaatatcatttttagtctcagttagaaaagacgtcaggctacaggatgtagcgtgtcaggccccaatatctttagtcccggttgtttacaccaatcgggacgaaacatcgagaaaatcacgccgagccacacgcctccccgcctcatcttatctccttcacacgtctcctcctccttaactctttcgcacgcctcctcctcctcctccccctccttatctccttcgtcgctccacctccactcctcctcccggcccgcttcacacgcctcccctcctccccttcccctttccgtcggcggcatgcgaggcggaaggcgccagcgggcagcaagatctctcctccccctctcctctcctccccctcatccccttcccctctccgtcggcaaagacgacggcggcggcatcaggcggaacagcgttggtggcgggtggcttgccaagccgccggggccctcctcctcctctcccccatctattgtcggcgaggaggatgagaagcaagagcaaggaaagaagagaataaagaaaaaaaattgtgaatgattttgttgtagattttgtggatgattttgttgttgcattcgatctgtgatgttaattttgatgttgttgcattcaatatgtggcattggaaaaaaacaatatgcaagcaacaaaaaagcaatggaaaaaaagaaaaaaaaactatagtccgggttagtgttaccaaccgggactataaatggtagcgctagccacgtggcgctactatctttagttcagattgaagttactaaccgggacgtcccggattcggggtcccagtttacaaccagggacgaaagggagttataaaccgggactaaaaaccacatccccaatattcatcttccccaactgtcaatattttgcatttacatgaacttaaggatgatgctacaagctggtgctaaatgtgttgaatgtttgcaacagccaacaatgcaaagaatatagtactagtcgatcttttgtcggtaatctcattgttttacccagttatagtcctcatatttttttataatatattccctccattctaaaatataaggcacaaccacccttaatctaaaggccaagaaataattattatcagcttgtagtttggatcactctaataaatataatgcatgcatccaatagaattagagaatgtgagagtaaaggatttaaaaatgtaataatttaatggagaagatgccataattaattgcatgcatgcatgccttatactatggaacatcttaaaaaaagtggttgtgccttgtattatagaattgagggagtaatatatagatagctacatatagatatcgtataatctaaacggagaggcctctccgtttagtcatatcgcgagacacgcatgggagccgtcgatcggtgcgcgggcgacgtggctttcatccggcgcgcgcgcgtgtcccgaccgcgtgtcggcgtcccaatcgagcgcacccgcaccgcttttctgtccaaccgcaagagagagagagggctttcactgttcaaaattttgggtggcgctcgagagggagaggggtggagagagggagagaggcggaggcggcgagaatctctagcgaaatcatcggtggaggcagcggagacgttgccgcagcggcggtgtgggaggcgggaaggtgcgcttgttttcatggcgtcgcgccggcggcggacggaggcagcggtttttttctccacatctcgccggcagttgtggggggaagcggaggctgcggcttaggtggttttctgtccaccaaatccggcggctgtgctgtaaggtgaggcgtgcatagaggtggttgccatttttttttcagctggggagaggtcgattgatttttttttgtgcgatttttgtgccgggagaggtggagagacttttggtagtttcactgcacaatttttgtgcgcgatttgtgtgtgatttttgcgccgggagaggtggagagattttggtagttttcgcttcccatgtgtgcgattttttgtgctccacaaacggcctcttggtttgttttctccccctataatagctctatcccctcatttcccctctctagctctccctcatttcactccctctctatctcagctaagttacttccaaaatgtactgacttacttctaaacacataaatgttacttcctactagttgttaagttgtaatttggttagtttttggtgaaactaatatttaaaatgattttataggaatggctaggaagaaatccagtactgttaacaagtaattcagtacatattgtcattctggaagtaagttagtactgtttagaagtaactcacacattactaggaagtaagttgacacatttgcagagtaactaattacagttttgtgttgctgaaagtaaatcagttttgtttttgaagtaattcagcacatattgtgattttctagaagtaagttagtgtatttctagaagtaacttacacactactagaaagtaactttgcataaaacaaataccaacagaagtacctgaatagattgcccatgtctgtttttttcgaagtaagtcagtgtagtttgggaggtacttctgaatagattgtccatatctgtttttttcgaagtaagtcagtatagtttaggaagtaagtcagtgcagtttgggaaagtaagtccatgcaaattatggaagtaagtcagtgtagtttgggaagtaagtcagtgcagtttctatggttttttggatggatctcaaaaaaacagaggatgaactttatgtgtacctgtgatcttttttttttggatctactatactttcttctcctcatcaacttccaagttgatggtttcctcttcctctcccctgttcgtgcttttctgatttttttttcaccatggcggctgcgtgtggattgacgccgccggctgtccggatttgatgggttggaggggggaaggaggcgcgcagcgctctgtcctagccgggcccatgccagctataccatgcgaagcgagagccgtgcgttgcacgctttcctcttttggtaggggcgcgcggttgctttttctggcaggggcgcgcgtcgcgcgatagagctatcgcgagaccgatttcggtctagtcgcgtcctatagatatatatactcgccgtattgacgtattgatgcttttgagacccgtaacgcgtatctctgcatatcgcgaatcaataagaaaaaaaagaagaggcatatcgcgatcggaacaacagtcatgcgcgcattgtatacagtatacatacccggtctcgagggagaatggcagtgggccgtcgaatccaggaaggctcgtcacggcgacaccggccgccggcgccaccgtcgccgccgacgaggcaacccaacaaacgaagcagcaggcgagaggcagcagccaccaccaccacctcctccaatcacggcggctggtgcttctcctcgcaaccatcgcgcttgcttcctttcccatctcggctccgtaagtacaagcaactctatgtcctcatgctaacgatataggagtataaaaataatgccaggttacccaaatcgaatttatggtatcgaattgtatttatttgttgtattgattacgttggacacgtagctgtattgtatttatatcgtatacgatagtgttgctgtcagctttgattaggcgttcttttcagatttcagacagctacattatggatgttcaggccctgcttagatagtaactgaaaatttttcaccctgtcaaatcgaacgtttgaacccctttatgaaatattaaatatagattaaaaaataactgattatacatattgcgactaatttacgggacaaatcttttaagactaattgctccataatttgacaatgtggtgctatagtaaatatttgctaataacagattaattaggcttaataaatttgtctcgcggtttactgacggattctgtaataatttttttattagtgcccaaacaccccatgtgacacaccctatatagtactcgatgtggcacctgccgtcacgatcgacatttctagacaatttcaaatgcactgttcacgtttcatatttatgctgtgaagatttgatgcatgggaggatcgaagggactattggagtgtataaagtaaattgcccgtctttccctatcagcttaggcttttaagtgcaactggctggtgcatgcaacttaatatggtatcannnnnnnnnnnnnnnnnnnnnnnnnnnnnnnnnnnnacaattaaataaataattgcagcccactccaatattccacgcttaagacttgagagggtctcgtgtgagggggagtgttggagtgtataaagtaaattgcccgcctttccctatcagcttaggcttttaggtgcaactggctggtgcatgcaacttggcggacctgacaatgacggtgagggagacagccaatcggagacgatctcccccagagcggcggcgacctaggcggagacaaggccgtccgtcagccgcggagcccggcggaggtcgataagctgacggttgccatcggaggtaggggcggtggaggtaggacgacgagcaaaccgatgatgaccggacctgacaatgacggtgagggagacagccaatcggagacgatctcccccagagcggcggcgacctaggcggagacaaggccgtccgtcagccgcggagcccggcggaggtcgataagctgacggttgccatcggaggtaggggcggtggaggtaggacgacgagcaaaccgatgatgaccggagactcagctactgctgcttgatgacgatgcaaacgcccaagagatcgatctctctcaggacatcgacttgacaacgcgaaggaaaaaaaaacggtggccgcccccaggagattgaaaccctcctgggggcgacgagtggaagcgtgagagagaggcgactagatcgcccgctctgatactatgttggatagtataggagaggtatactgcgtatcgtggaacgattgtattgagcctcaaggagccggtatatataaaagtacatggggaggagataaggaaggattacagatatggaaggagtccacacaaatcaatcctatcctaatatgactctaactaccatatactctaacaagaagacattggcattcgaatatttgttccagactgacgaacactgctattctccaagtcgcaatcgatcatcagtttatcaatctcttgtacgttgtcatattggcacaccagtttttgaggtttccttcggtttgaaataccctctgttttatactccctccatcccactatataagcgagcaattttagaggggtgtaacacatcttacaactacaaatatctaaattcgtagtactaggatgtgtcacatccctcaaaaatcaggacggagggagtattaaaagtcattttgacttttttaaccaaattttgttaagtttgatcacatgggaaacattaacaaaatctaaaacactaaattagttttattcaatttaacattaaatatattttgataatatgtttgttttgtgttgaatttactaactacattttatataagcttatcaaacttactaaaaattggtcaacaaaaaatcaaaatgagttgtaatatgaacgagggaagtgttatactagatcaccatagaagtttgttgaatctctctcttatacctattggaaataaagatttgttatatgacccatgtcataaatgtagttagtatatggcatggatgagagtccacatgctatatactatgagtaaaaaaagttaaatatcccctcggaagttgatgaggagaacaaccactagcgcatcaatcttttgtcggtggccgccgccccccgacagtgaacttttatgatgctggttggcccgtattaaattgcacatgtgtactgtgtactgcaacgggaaagaccagcgctaaccagcatcattgccaatttttggatcggctgtgcacagccaccagtgtaatctttcatccatgcaaacctgtattctcgaacaagagtcaaatcatttcttcctactatatagtagttggtagaagttttacggtgttaagagatgtagaggtattaaaaaatagagaaacgtaaagtaattaacttgtaaaacaagtgtatttcattgaaggggattattgtcaactcaatctaatcggtagtaggtaaacgcaatgtaaatcactcaatcagttatttagatcggtaggggaaagaaagaacaaagatcttgcatttagtttgttagagtgcgtagcccggctcaccaaccgtgggccacacaggtcatattgggcctgctccaccacaggcccaaccggagccataactttagatcctggacctacacaacctaaaagactagtctgatgggtgaggaccgcccccaccttttaaatcgtgctcccccatcatcaattaccgatgtgggactaaacccaactttccccccatcacacatcgggcccaacaatctccaccatgtgacccatggaaattgttccgggtttcaaacctttggctctgataccacttgttataaaagttagttgatatagcggaacgacgactaaccttcccgatcgcttcaatcattattcacccaagacatgccagatgacgacacaggaaaacaaaaatatttgttaacgaggtttagtcgaagcctacatccccggagctctgattatgcgcgctcctccccaaccaatatagcttctagccgctacgagtccatggccatgccgccatcgtctccctgtgtgtctacgctacattgtagtcgccatggttatattgtggtgcgcccctctctatttaagagagatgccggattacagagtccgactgtaactccaccccctaacacctattacaactctaagtccaactgtaatcaaataggactagtatattcgacacctattctaacaacacctattctaacatagttgtgttgaagtgggttaaaatctttacttgtttgtggctaaaaaccataactcccgaattcctgtttcccttatctaccattgcggtctgtgtcaagtgcggagactcgaacggtatctgtatgacagcgggagacgaccaacgatagcaaacaccaagtaggcgtggactggcgatggcaactggcatgtgcttgttcaacggtgagggctttggcaactaacagggcagccggcggcaactagcagtgaggcaaaggcccagccaagcaagattcagtcatattttaactgatgcaatcacttatattataatctatcatatttttaggcacaatacataaatctgaaaaaatcacgcaaataatgtaatggatatgaggacgaattaacccatactgaagaattaccaatactacccttacctatgtatctatcactactgtcaaagacaatcctactcttacttattgaccagtaaaattatctttttatccttcctatctaagtatctcaatcaagtataagtatcttttgcatactacctttcactacgaagtgttggttctttactttttatttttatgcaaacaccattaaacttcttcatagttggaacccactgtagagattatgccaaccgtttgattgatacatctttcttctcagccattaggttaacagaaaagtacgaattgcccctgaactatcacggccaatcgatttacccctgtcgatgtttgatagtcacgactagggtatttggatgtatggggatcgttggtactagggtatatgcgagattgaggtaaaagagatggagatatggatttttatataggttcgggccccttatttgacaggtaatagccctacatcctgttggccgaagccggtgttgcttctttattcatctgaatcatacaagtacaacaattgggataacccatctagctgttgttgacttggcggctagataaccaactcgtagtcgacgacaaggtagtcttcctcctcgaatatgaactcgtcgagatcagagatggcgctagatccctctttctggccttcgtaggcaccggatggggtatgtctaggctaatctctgatgtcgagatctggcggcgtgtgttggctttgtgtatgttgcgtcttgtggctttgtggcatcttgtggcttcgtagattatggtgggtgtgtcctctctcctcctagaggggcttgtatttataccatggttgcccacttgtccatgtaagactagagagaccaatatggatacaatccgattagtctttatcgtttccatgtagaactatatttgtcatttcttatccgaaactccttttatatacgaggtttgtttccgtataagacatggtatgtggtgggccctgccaagtttagttaactactattaggtttgtggtatccataaacatgacaatccccttaaactcgaaaatcagacatcgattaccctgaactttcaatatcgaataaaacacccttttgcgagcggtttggggttcaactagcatacgtgacagtctagtcagtaattttttattttaaaaaatagtggagcccacctatcatattctctgttctctctatcccctctcacctatatgtgtctctcgtcgcctcgtcggaggctcagcactctgcttaattacacactaattccaaattaagttgtaagtaatcacgcaaggcaatgagcatctctaatcgcttcagctggagagctcgggagcttggacacgatgctggacatggcgaaggtggcggagccaccaacgacgcaggcgagggcgaccacggcctggacggcgacctcccttgggtactcctccgtgacgaggtagacaacggcggggccggcggcgagcagcagcagcgcgacgccgagcagcgcgccgggtgtcccgtggtcggtcgccgccgatagcacctccagctcttccgccttgtagagcaaacccagccactccaccgccgacagtgacagcccggcgcgctccgctgccgacaggagcaccgtcgtccccgccttcgtcagcagccgtagcttctccacgttcattagcagcttcaccggcggcgccgccgccttccagctcgtcgtctggcgtggccccggctctcccaacgggaagtacactgtcgtcccttgcaccgccgctcgccgctgttagctagctcgatcgatctacaagctcacacaccatggggaagaagaaaaatcgctagtcggtcagtcacttacccttcttgtgccggaggtgggcttctggtggccatggtggcgaccttgtgaatgcggcggtggctgctcagcctcgccgcggttgccacgactttggccgacgacagtgacggcatcgcctctcacctctctgtctcagttagaatttgtgtcgaatatgtgtacgtagtgagttacaatttaggacttggagttgtaataggtattaggactagagtatgagtcggactctatcctaggatctctcataaatagaggagcgtgcctgttgtaaccgcatggcgacttagcattgctgtaactctgatacgcacggctgccggcggcgaccggccgtgagtcgttgtaactttgatacgctgtatatgctggatcggggaggaacgcccgtaatctgtgccccggagatgtaggcctcggctgaactccgttatcaaatatcgtgcctcggtgccgtcatcgtgtttggatctcctatggtgtttattccgtgttttgtttccgatgtgatttcgggccggttttaaaaacaagtggtatcagagcctgtgggagatccatggtaacggtcggaaaaacggcaataagcgatactctcggagacacgggcatggcaaatccgaaacaataccaaatattccggacttggggggcatgtgttaataaccaaatttggtaatccaagtatcggagatgaagatagggtcaaagcggaatttgagatggaaatcgttccggaaacagagtaaggatcggctggagtctgaatcggctgcgactgggatcggcagagtccgagttggacaaagttagccgattgagccgaatccaacaatgtgacatggtatatgttgtcaggttgggttaacgtgcttcatgaggattgctacgcacggattgagtcctgagaaggcaattgtatctactaattaggatatttcatgtaatttccttagagatatgtttgggcaaaagtctgccgcaaagacttatggtatcttagagtttgttagagataagagtcatgtccgacacggacatattttgtaatctcgggtataaatagaccccaagccccatgtaatataacaacacacgttcaatacaatctttgcgcatcgccaccctttactttcattttgtttcgacgagttcttgctttcgggttgagctgcaacggtttcgatcttcaactacaagtaaaacttgttatggcggtttgcgttctcgggattagtgcttccatctttatgatactctaatcttgtttatgtaattcgtcgagttatcatatattctatataatctctaccaatattgtcatctaacctccaatcggctaacgtctgcaactagaaggtagccgatcaggttaaatactaatgttgacttagattatataggatatccaccactctatgaaacaaccagcggcttgattgtctatatattgttcttcttttcatacttatagctccatcagttgagtttgaccttataagtcgtgattagaatctcaatctctagcctgcttttggttgccgattagggtagcatcagggtttcagccaatcttacctgatttaactacttttatcctatatgcttgattgacatgttaaatctgccctttatattaagatcttattgcatttaagtatatttaggcttttgtttagtatattctacttgctttaatatcttaatatagagtagtatcggagtattagccgatacatgctagatctatctgatcagctatgctatgaacatatatagtcttgttgttaatatatatttcgatctaagtgatttatactgtctcggcatggtaactgatctatcccaatcacttgatttaagtatatatcgacataagaattatatattgttaacatctatagccgatcgaatagatttagttctttcttatttatccatgattgccgattaattcacatatgacatcgtctcaaaaataaatgatatgtcatcggcaactagccgatcggctatcgtttatggatttaaccgcggtttctttgtctttatttcttgttgattgcaggatcaaatcaactggcacactcacacacctaaaggcaagcttttgggcctgcattggagttaagcagatctcctaggcctcgtgtttttacatcaacaggctatagcgtcacaatgccgaagtgggaggagatggaggccagcttgattgagaggggtatcaaaccggccaccgctaaatggccggatcgatcgaagttctaatactatgctcacggtggaacgcttaaccccgttgatggctccctggtgttcagcgatcagatacgcgaggctgccagtcgactaacggacgcagtggaagcctcttctcagggcacgttccgacccgacagagagaaggacgagctgtcactcgccttgaagactcccgagcattcgggaagaacacgaggaaaaggcatggttccttggaagattggattcaaggaggacatccacacgtacaggagtcggatgaggagcaagagagatactgaggtgaagattgcagatcttgagtacagggtatcgagctacgagctcagcatgaaagaggaggtggaaaggaagatggatgaacacatggccgcacatcggtgccaggatccccagtcgtacattcctcctataatggtcagcccctcagggcaatcgtagcaactacgcctcaacggggcaggtaggatcacagagcatggatgccatgcaaactcaggatgaaaccacctgccccgttgatgaaatcatgcagcggacaccatgtgagctgcatattcccttcaagaacttatcaatcaaggtatgcccgtagtattatgttttttggacttgtacattccgcaagtttctgcctaggttgattactaatagataacctctcatcacgtgaaggttgcatcaggaatggccatcccaacggacccttcagggacttaccactgcaggccgattcctgcaggatacttgagggtcgaaattgagctggtggaagccacgtacgaggacctcgagttggagtaccctagaggagacggtgagacgtatctacgcgacacaagccacgccattatactatggcgcaagcgctacatcatcctccctaggcgacaagcggcgtttcgtgcaccatcccctctggctccaccgtctcctcctcaggctcctccaccgtctcctcctcaggctcctgcactgtctcctcatgattaggctcctgcaccgactcctcctcaggctcctgcaccgacttctcctcaggctcccgcgccgtgtcctccagcaccttccaagtcaagaactcaccaagctccaccacctgcccgcacaagggcaacgaagaaggcgaaagttgatgccgccgagaacaaggagccaccttacgactgcacgcaagaggagcttgacgcttacgtggcagcagaagtgaagaggcaattgaagcctcggagtctagaaaagaagattcctatacacccgagtgccaagaagttcttcaggggtatgtcggcaccagtcaaggaggccataaagctaacggactacaagcgaacactaaagaaagcatattatgggaagtccaaaaaagtccctcagcttggagagcaaccaagccaggaggtcgagccgttggtgacctggcaagaaattggaataaaagaattcatttctgacactgggctaactagggctcagttgcttaaaggcgaaccaatcccaaaggcggaagtgagacaccagtacgaactcggtaaaccgcttgtaaagcctgagcagctgcagtccctaccaacacagatgtacaaattccatcaacggtacatggagatgagcgccagcggtagggagattatcggagcgaggatcaagaacactgacttcttacaaggggaagatgttctctggatcaatttcaaggatatctacaaactataccagctggacgccctcgacgtctctattctgagcgcatggattttctaggtatcgttgagttatatttcttacattcctttaattagctccttgtatatatgtacacctcatataacaattcctttatatcgttgtagaatggagattcaaagggcccgacggcggggggtttttgatactagattcatcgaccctcggaaaataaacgtcgaaatggtcaccaagtatccgcaagccacagaggacaatcttgaccatctcctcaaggagtagcatttcaagacgttcatactactgtcgtacagcacaacgttagtttttactgtctaccgaacaaatttcgttcctgtacaaatagatgtacagtgtttcatatatcacctcacacaaattgcagattccactaggtccttttactctttgacttggaggaatgcagagtcaatgtctatgactcaatgaataaagatgagtctacttttgaccaagtttttgaacttatagacaggtaatgtcatatattccagtgttattattacgaattttgctattgctagtacgaatcatatctttaaactccatgtagggcttggtatcggttccgtcatttggtctgcgacacttggaaagaaaatttttcgccggaggttcaaatttgcattgagtacatgatctaaatttatattcaatctataattcaaatataagtgtatattaattaaatctctcgtcgtttgtgatgtatgtagtgtgcaaagcaggaagagggaactaacttgtgcggatactatgaatgctagtattgccactgccttacaacccaaatcattgccacaagagagctcgatgtacgtaaaaataaatcattcaaaatttcattgcgtacgtattgatttcttttatcctaattaatttcatacattcataggttattcgcatgagggataacctcacacacaaggaatttatcgcggcggttcaagaacaactcatgggattcatcaacgaacgagtccttgatcccgagggtaaattctactacgatgaaaatacaattcataagtcgttagcttctgagataacgactactacgtcgaagtcgaagctagctaggacataatgaattgtaattaatacatgtctatttttacatatgtacacatttactttaatgtaaatatatattttggttatatatgcacataaaatattaagtgctttaatatatacatatatatatatatatataaccatgcagcaacaagcccatgcaaataaaaaaaaggtagctcgatatttagtcccagttggtaataccaaccgggactaaagacgactcagccagccacatggctaacccatctttagtagtcccggttatttcacccaggactaaaaataacgatctttagtcccggattcgtagtcccggttggacaaccgggactaaagggtggttacgaaccgggaggaaaaagggtttctccaccagtggatgttccacaaagtatatcggaattgtttcactaagtatatcgaaaatgtttcaatcgtttaaatcgggcgttgtttcaccatatataaacacaatgtttcagcaaatagcgaaagaatgtttccattcactccaacatttgatccatacatagtgaaacattataagtgcactagttgaaacatttgtggtggaaaaaaaaagaaacgaattcccttaatagtgggtttccaaaatatgtgggtgatttgttaaaaaaaatgtttcagttcactgtaatatttgatccatatatagtaaaacattacaagtacactaggtgaaacatttttggtggaacaaaaaataaaacgaattcccttaatagaaggttttcaaaatatgtgggtgatttgttgtaaaagaatattttaatccactgcaacattagatctatataatgtttcaacattgtaagtacattaggtgaaacatttttttggaacaaagggagggacaggtgggtgcacccagcggggtgcgcgtgttgggggagggggagcgaccgatttcccccctcacccggtcgaccgatcctaagaattttcgtgcaaacgtgtcacagtttttctgttgttactaattaaatgctaccatcatgtgtattactactccctccgggttgataatacttgttgttgtggacaagggcacagtctccaaaaaacaattttgaccactatttttcatcataatatatataaaattgttagcaaatatatgatcttattaaagtattttttaagactaatctatacatgtagtcatcatatttggaagacaaatatttttaaaatgattcataatcaaagattctagagtttaacttcactcttgtccaaaacgacaagtattatcagcccgaacggagtaattattacaagcagcaaatctttattttacctctcatatgatcgtttgattatgtttttacaggtgacttgaacaatatacgtcagagaggagtgcctgaaatccatcttgcaaacatctcttgacactccttgggtttatactctgcagcagtatgcccagcgccctgcattggtatacacatatgtcaagattataaatattatatatccaaatcacgactaattgtatcgcttgttttagtatattgatatttttgcatgaactaaaaaaatactctgtatatatatactctaataacatgcatatatgaaaatgcaccttcacagttgcgtatgtcaggttattactcgcaaagcttcgtgtgaatctacaaaacaaagtaaccaagttagggtatgatacaagcaaaacatatcagcatatgtcccaaacagctagaacataataaataagtatgtttattttggacaaataagcagataacaatatccaactgtatcatcatatataggaatagaaaacacatcttccacccatgatccactataccagcaggccttcattgatgagttagaattctgataaaatataatagttaagcatgacaatatatcttcacattaacagatttgacacacctttgaatgtctctaatgaagtactgtgaagtaatattatctctagttgaaatacacattttacctcttggtagctatactcaccaaagaaattgaggcatttccataagaccataagggctaattgtaaaaggtctaattcgtgacatcacgttctattccagtggtaccaacagacaccaaattaatactagaagtgtaactgattgtatgatacattcttaggctgagttattttcttcactttcctaacttatctcttttgtttttcgtgcacacgcttttcaaactgttaaacggtgtgttttataaaaaaaatctatacataagtcgttttaaaaaaaatcatattaaaccattttcaaaaaaaaaagctaatactaattattcttacatcgttttatgtgtaggaggaggggttcccaacacctcccaaatatagccttagtatgataatggtggtgcgataattttttaatggcatgtttagcacaacttcagctctcagccaaacagtttcagctccacctaaaatgggagcggagctgggtggagctctatcataaaatgaactagagagttggaactgggtttaggctgctccacaactctagtgcagacccaactcctgaagctagatttgttccctaagttaatttatgatacctcttggtacatcatctctacggtaaaataggtcatgctacaaagtgcagtgcgtagctcacactagaaagcatagtatatcaagtataattttaacaatgagtgttaacggaaacacttacccggcaacttgtccatcaacgtaccacggtcgccaatcatcagcaatagaaaggttaagtaatctaatccatgcttgtgtgctaatggagggaactctagaatcatgatcaccgctgcatcgttaattacatgaaaacattaatccacgtatctgggttaacctgtttactatcgacgagaagagttattttgatctcaaccacaaggttgcattggaatatagtattatatagaaacatggggatttatagatatatatagcttagtttgtgactgcaaaaatcttgtataagaatttaaatttctactgtagtagttaactccatgtatgtacacctgaatatatattatatgattaagagaaatcagtccaacaaatcagtaccgaaagacgaattacctgtatatgattgctcggtatccctttctcattagcgtcaaatgatattccactgtactacggacatcgctattgtaatctatatcgcgattgcatcgtttccactctccaactgttccctgtattgcatagcagttcttttctgaaattacactgatcatatttgcacaactatcatggaattaatgcagatttcaccctttctcttaggccttgtgcaaatataggtagtaccatagtacaaataccttttgcacaccaagactctcccttactgtttcatcatttgcccatatttttaataacacgtgggaagctttctgcaataaattaaccaaaattaaaagtttttagctcgagaactatccaaagaaactgaggggaaaaaaaagaattcaatgggattgtatgatgttgtaataatatttatgcacgcaactctacactcaaatataataatgtcatcatcggcagcagcaggacgagactccagcatgagcctactcattacatctctcgctgcagtgttatggatggggctctggagttcttcacataatggctcaagaatgtgtcccctgttgatgtcctttgtgcactaaatggttggtgaaatgtcagcgaatttgtaaactataatattaatacaacagaacagacagctatatacagtaattttgaataaattattgatgtttctatacacacagcggcgtaatagagatcatttttattgggggtacttacatcgtttattgcttggacggaatgcgcacattgagcattgctcggagcactgtatttttctccgcaggtctcctttgcatgctgataggaaatttgtttgagtggtgattatatataaaatgaaagaactattacagttagtgtctaatgatccgttcgtgtgtcatactgtcatgaatggataaagatggcacattacccaagctactaaatgttgctgttttgtaaaaagttatatatttatatataagtttagtcgaatattttttttaaaaaaactattcaagtcgttttttttaaaaaaaaactattcaacattgtaatacctaattgagtattttcagaaaagcagataatccatcatctattcatccgttgagctgaaaagaactactgtgccatggtggtcaggcatatatggttaccacttcagaaatgcacatagaagacgacactagctatagatgtcgactatgctaaaactagcacctatagatcttttctcacttttctgtgctgaaaaaaaagcacatttaaacgattgtaggcattggtattttgaaaaaaaaccgacaccattaatttattgtaggtgcaagttaattaaaaaaccggcatcaataatgattattggtgccggttttttaaaaaataggcaagcgtaaaaaaccgagccaagctgatcgttaaccttatcctcgggagcagattaatctgctcctgcggctctcgcgcctctctcttccttcccagcggtggcagcgcccttccctccaccagatcaggcggaaggggaggcggcaagctccccacctgacggtgacggtgtcggtggtgccctcctctccacctgatccggcggaaggtgaggcgcgggctccccaagcagagacggcggtgctctcccctccaacagatccaatgggaggggaggtggcggacttcccaagcagcagtggcggcggctatgacgccctcctcgacatcgggccattcttgtgctcttagtgttattggatgttcttgtattcttagatatttttggatgccgattaaaattttcattctgatcgggttgaaggggagctgctcgatgattcgagctgatacatcgagccctttttttcatttctagaacctcaaaggtgccggtttgaaagtccggcacctatggccggttcttttctatagtattggcccttgatctgtttttttttggcaatgcctacaaagatatgcagtatgtactatatggaaacatataaagttatactagagaatggattacttcgtaaagttcatcagatataagtcccatgccatgcagaaatggaattctaccatcttcatcaatcttgtaatctgtcactggatttccagcaatgtatccctgtgttatgtacagaaggtaaataaattagttgaaggaaagttaattacaggacagattgtgcccattaagaaacaaattatttaaggaatgcaagatagactattgaggcaattaagatgtcaaatataaaatttcatgattgacataatctgataagatcagaccttgagattaaaaaatggtttttcttctgaaccattgcctgaaaaatatagacacatattcactagttaatagttgtgtacatgcgcagttagtcgatacaagaaaatgaacaccatatttgtcccaactcgtaaacatgaaaactacaatttttgtgcttgtatatatctagattctagacaacaagaatagcatttggttagtaacaaaaaaatattataattattgtgatactaatctatattcacagacagccgttacccgatatgagattaggaatttactaaaatatatttcccaaactgctaataattcaatcttaaggccctctaaatgtatgtggtaagtctaaggaaattatacattcataatgaaagaatcttactttcgtcaattgcaagtgtaagtgtaggtacaatcattccactatatgagtcacctccaatatagagtggattcagtgagaaccggggatggtcatgaagccactgtataaagcaacacttttagcacgcatccacggaatatctgttatacatgtaggggcaatgtagatcaatgggttatggtctcataacactatgtttttattatcgtggcaccatatttcaaatggaaactaatcctcatcacagtattgtttttcataattacattgtgcatgcaatcaatacatttttgaaacgtcttcattgttcaatgatcatagtgttagttttattaatgaccaattgaaaagtaaaggcagtgcatgcatttatttaactggataggagtaagaatggtaataatgaaaaaagagtgaaaaaaaatcttaagaatataatatcatttaattaacatgagagaagtaaaaaaggtaataatgtgataattcatacggccccttaagaagcccgcatgtgataatacgaccattatatccccaaacaagcttaagctgcaaccatttgaacttgaagtttctctctccaaaacaaagcaacaaatagggggaagtttccaacttgaaatctttgcttcaaattggtatagtaggttacatacttgcttacctccttcaattgcagccattttttaaaaaaattcattggtgaaatgcagcgaattttgcagttaataagggtacttttatgagcatttttttttgcaaattttagctacaataaagaatttttaggtgagcaaattgttattgtaagcacaggttcatagtgattcaatgtagtgttgcataattttgtggacatacatgaattttcatgttttgtggggaacaccttcaccctaattttattcgtactgccatgttttatagattgatttaggcctggatgtaagacatgcgacaacctcatctggcatttatgaagaaagcatataactttgttcaccatgctaaggcacatgctttaaggaaaaataggaaagacatatattttgttcgttctttgattgcaagaatcagaaattgttgagagaccccagtacaatattggtgtactcaatggagcatgaatttaaggaggattgcagggtatggctatcacggggaaatcaccgttcctgaaggtgacagtaacatggaatgtgacgagacttgttttccccttgatggggcagaagattttacaattgatgacatggcccttgaaagaatggatgaagatggttcgactagtagtgacgattttgaggcagaattcagtctagaagatatgatgcaccacgctaaaccagaggttcttatgggtacagcacggggattagacaactaagaggcattatagaaaccaacggaggatcttctttatgaagaatccaagggatatgagaaggattatacgtgttgcgtttggtgcttgaactctttatattgaaggctaggtatgaatggtccaatagcagcttcaatgatttgatgggtttcttgagagttttacttcctaagcctaacttattgccatccaacaaatatcaagcgaataaacttatatggccattatctctaggtgttcaaaagattcatgcatgtgtaatgcagacaattgtcccacctgtgagaaaattaaagtcgttacaaaatgggtagtgggtcctctgacagtgaggttgttgaaccagattcatcaggcatacaaagaaaaagattttggccatggtgatgtggaacctgcactgaaagatcgcatgagcatttgttctcaaagcctaacgacgctaagttgatgagatgacgtcaagataaccggaaagtagctggtatgattcgatacccaacggatgctcactagtggaagtttttgattcactacatccaaaatttcctatggatccaagaaatgtaaggtttgcattgagcacaaacagaatgaattcatttggtgacatatacatctcacacaacacctggccagttctgctcaccatgtgcaaccttcctacatagattgtcataagggaaagtatattttgttgactatacttatacaaggtccaaaacaacttggcatcaccatagatgaatttcctgaacctttgatggagggtatggaagatctatgtcaagaagggttacgaatgtgggatgtataccaactggagtactttactctatgtgctatcatattcgtgatcatcattgacctgcttgcaaatattttcctctttggccagattaaaaggtaaactgcatatcttatctatcttgacaagatgtcatacaaatatgtgacatcctcaagcaagatagcttacatacgccatcaacggttcttactccagaaacaagtattgtacgatggccaaatgttttgacaatacaatagagaacgagtctgccaccgcaaaacgaagtggtagtgttgtcttcgatatgacaaagaatattaagatcgcgtttgagaagggaaagaagtagtcaagaggaagaaagcagtggaggaaaatatatgccttacaggaagcactctatcttcttcaaatacatgctgtactgggaggacctggagattcatcatgccattgatatcatgcacctcgagaagaatatgctcgatagcaccattgacaccttaatagacatctagagtaagatgaagcacaggctggattcatgtaacgacttggtaactttagacataaggaacaaccttcacccaaaagatttggcgaatgggaaacaagattctcctgcttgctactccatgacaccaaaaaagaaaaacggatttttgtaaatacttgaattgggtgaatgccaattggtttctcatcgaacatcaggaagctagtctcaatgaaagatatgaccatctcagaatgctcatgattgtcataatgctaacggtctttctccctattgctataaggacaatcaagctagttcgaaggtagtgataacaaagatgtgttactttttcaatcaaatttcctagaaaatatttgatcctatggaattaggaccaatccagaacttcacaatcgagacagcgtgccaacttgagatgtattttcctccatcttattttgatatgatggagcatctgattgttcatattgtccttcagattacgaacttggtctgctatacttgcatcaaatgtgggtgtatgagtggtacatatcgattctaaaagggtatgtccgcaatcatgcttacttagagggatcgatgacataggggtacacaactggttgagtgcgttctagattacataaaggatgtcaattccaccaggaaacccatggctagatacgagggaaggttaactgggaagggggccgtaggcaaaagatgcttatttgataatgattacaaagcagtagcggaggcagacaacaacgtactgcaacaactcgccatcattgagccctatattgagcaacacatgaatgaggttagtgcctgcaatgctttcctcaatggttgttggatcaaagcctgctattggtgaatccatgaaggaaaataactttagaaagactggcatctggcctgtcaagtctagtgacctcatggcaatggtatgtcattaacggatatgaaaataaaggacaagaaaagctcagcacagaatagtggagttcgtgttgaggcattcaacacaacggacgagaagaaattgcactagggatcatacaagaaattgcagtaaacatccagatccctatcatcgatgctaatgggtgaaagacacaataggcatttctctggataactacaacctgacgattgtggaaggtagtagagtaggcttagaatattctacgaattgcagtttcaccggcagtttggtttgtagaacccaaaattcaagtgcttaatcactcatttgcaatcgagttgccatctaccttgttcttgcttgtcttcttcgatttgcatgtagggattagccttctctgcatggtcaatcatgttttggcacggttgataactagagaatatgtgatgttatgatttcagggttcagattatattgatcggaagccagatcatgtatgtcgaatttccgccaaatcgagggttattaatacatatcaaaatataggggccgagttccttatctgaagcgatgaggcatcatgcgatggaccaaagactgacacgcttatgttggcaccgacaaagccaaagccaatgcccataggagatgagcccagcggcaagatggcagacgtgccgcacggtatgaaggaagcagcgacggatggtagtggcacaaccagaaggggccagtaaaggaaatgttgtatgtgaatttacagcacccgagcggagcagcgatggatgtatggtacgaggcttacgaatgtgagattgattcggttgtgatagactatattttggaaaggacaaaaatgcccactgaacgatgatatgggaagtactatcgtaccctcacaaattgacggtgtagatcatttataccggtagtataatactaccagtagagagcatcgtaaaggtaatccaatcaaatagcatgcaaagtgtgaggatattcttgtccaaagcctttaagggaaacgaaagaaaagaaaaccaattccgtacaagacaaatagagtaaaaagttgttcttctaggaattggtcaggacagagttacctttctaaggaaaattagaagttgtttcacagcattggtatcactagacttggaaccctcctctgtggctgcatatgagaaccctgcccctacaggagaatccacaaagattatattgcttacctacaaaatcacacaattcatccattaaaatatgcaattgggcttatccccttttcattttcagagaaagagagagatacacatccactaaaaattgaacatggaacttatttgctaatacatggtatttggcatatgcaggcgacaaccttagtccatgtctctggtcggtagataattatgggcaatcctccactatagtatcgttttgcagcgaattgaaatggccctacaagagcatacatgcacatcaacaatccgttaaagtagaataagcattgcaacataacctatatgcacaatgcaccatatgttggttatccatagaaactcactagaaccttttaataatttgtgaaaaaataatacgataattattactccctccatctacttttgatagtcatatttctaaatctgaaaattttatttttgatagacatatttcaatccaacaacctatcatcttaatgactctctcggatttaatgcgtgactctccattctcccatacaagattggctacatggacatcgagaaatataaatattaatgaatcacttgttcatgaggaataactagtagcatgtttaaatggatgataagtagaatcacttatccttggtttgtgtgccaagatgaaatatgactatcaaaagtagatggacggagtattacctatctcatgggctaggccagagatgctagagcagccaggcccacctgttagccagagcaaaagtgggtctagatcaggattcttctctgaccggacaaagtagtagaagagctgcacgccagtgctctcgttcacttccacgtacctgcagcggtcataagtgtgcacatgatgtatccatggcttgcattatatgtttgtcatttcttggaccagtggtagaccggcgttcttttttttttttttgactgcgttcattggagaaatatacggacccataccttttcttcaaaaacaaatttttggtagtgccatttttatattttcagcggtatggttaaatagaaatgaaattgtttgcattagaaattcatctaaccctatcaatgtggtattgttgagttctttctatggcttttgaattttattccaacaggaggactattatttggattggggcaagtcatagattggagaatatcactctctttagaggtgtttatctcacatgagtagcaatagggatctatccaaactaaagtttgatgttttattatttcatttagaacttgttggtatgtctatttttctaaggggtatcaggtctaatacttaggtatctgatttgatatgatgatatctatgagtaccatgtgtgatacctcgatgctatgtatcttaattaggtgcatagtttcccatcatcgctgcccaatcactagtattgttttacatgctaaatgacacaatctcctgcatgattaccttttggatcatctttaaaccattcttttccatatggatcggtaattttgccaattttagcttggaccatcccaaactacttctccggtgcaccggtgaatatagcgcttggtgaatgaacaatatcatgcttatcgatacatatcgatacttaatataatcctttattattaaaaaaaaatattgagactgcaagatgtactcacgctttgcattcagtatatatacatacccggtttcgagggagaatggcaatgggccgtcgaacccgggcaggctcgacacggcgacacaggccgccgccgtccacgacgacgaggccacccaagaaacgaagcagcagcaggcgagccaccaccacgtcaagcaacggcggctggtggtgcttctcgtcgccaccatcgtgcgcgcttcctctcgcatcgtcgatcgaatggtttgtttcccgtttcgtctaaccaattatgactgaattatcagccctggggttatgtgaaaacagatagaaacaagagataaaaattggcaaaggaacatgcaaaacaggccagtccaactaactcttatctcgtctctgacagattcatggatgcgtatcagaaattcagactatatttatgtgtatatatatcagattattgacatacctgcgcacagatcttaggatcacttactcttcggaatgatccacttattttactttcttcacttgatcgatcggaaaaacagcactcctaatatacgcaagagtagaactcggtgtcctctagtttcggcagctagagctcagcgctatgtatatcttttatatagttatacaaacccatatagtgggaacctatcccatgcatacaagtgttgcatgcttactttgtaccaactagcaaatatcatcgaaaaatctaaaaaaattgtgcatacaatttcgtcagtattatacctactttttaaatcttaatctcaaatttattatattttagagatgcattaaaaaattttatcttttttttatctttttttagtcagaattttatctttttttctctatataatgaatttgaatatgaaactttctacatagatatgtacaacttgttaagaaatttccatgtgtacatgctgtgcatcatcggttagtgtacacggtgtatacatgggaaggcttgtgtatgtaggctattagttagttggtacatagaagactacttgtctatgcattagttaacatgtaagtatatgggcatcagaaatcatatataacatgtatatataaaaattattagtaaatgattaaatataattatactacatcatctacaaattatagcattatgaagcatgctgatcatacgtttctataatattgtgccgtacaatgcgggtcatcgtattgaattgcatttaagtacaggtctatgttgatatccgagttgattacatgggtcgatcacgtaggtacagtatactgcatttaaggtataggatatgtgttgttgtcatctcaattacgacgtacagctatgatctggcataatcaatgacggacgttggacatggcacccgtgcgtcggtcatacgagtcacgacactttacgacgatctttcctgatttctagatttccactgtgatgatagcagagaaattggcactctatacattcgttccagcctgaccaacactattcattactacaaaatccaccgtaggtatcggctcatggaacgttttcccatcttcatgtgttgaaaaaggctcttttaaacactctagatactggttataaaggaagcaccaatactataggtacttttttataataatcgcacaaaaaaccggcacaaataaaaactaagcgagccgaacccccatcgaaccgatcgagcgcccaccccataaaccccccgtccccgtcgctcgcatcttgtcctctccccagtccccacccctctatttctcgcaccttcctcccccttctctagttcacccctcccgtccttgatccctcgagttccccctctccttccctccattcgcctgccctcctcctcctctccgtatgcgtgcacctcctctcctctcgagaagttcgccattgatatttcttaatgacattgctaaaaatataatttccagtaatggtgctcgaaatattacttggtgttctttactgttacagatataatccgcaagtacacggatatactattgtagcatttcacccagaagtattacaaggtatcatatttatttaatcccaaggaaagatatgataggagagtactatgctagtaatttatactccctctgtcccaaaatataacaacttttagccctcaagttttttcctaaaatataacaacttcttcaccaacattctctttctaaccaatcacaatcctccaccattctttttcccacctgcctccactactcaaccaatcacaaccatccatcattcacttctatctactttcttattaaccgtgtccaactctaaaaatgcttatattctgagacggaggtagtatcacttatgtagatcattttaggggtaaggatagatagacacacagaaggatactctcactaaaatgataatctaggctaagtgcgaaaagaataagaaaagaatcatttatgtacttatagtatatagttatttagtctacacttgctattatacaattatgaagccaataccccctaacaatgccctcctagtatatcgagaaaccacctctgattgtcgagtttcttacgacaatccgtcatggtcatccaaccggtaatagatatggaggagtacccacaccaggagaaactcttagccctatttacacacgtggatgaatacccgtattgagctgtcaccatcaacggcctacctctacagatccatagcatatagcaccatttaatggtatgtaataatctaagcatcgcgcttatattagtaaatattactctatatctctgaagatgacatagagcaatcatgtaaatgaacaccaagccaataccattacatatctccactaagctagctacataattattatgagtcaagtatgaactaaagtcggcactcgaataattatataagtaaagtaaatgaccaaaactatattaaaaaataatatttcattacagaataaagtcttacaagcgatagaagagctactagagctatacccgaaatctccggaagacttgaagaactaagaaactattctaattctactccattagcactagaacaaagtaaataactagagagcttcttgcttgatccaccttagtgtgtgttaaaatggagagagagatagcctccatatgatggttgtaacggctgaaatatcctaaacaccccgcaaccgtcattgaggagtaatccaggacatccacgtggaaggccaggatgaacggagctggtgacggttcggccgaaccctgggctggtccatttggcccatcctttctcctgtaatccatttgatggatcctaagctcagtggtatggtggttgggccaaattgtaggtgttcaaatgggtttgtgggcccattcgtccataagtgtgccacacgtcgagctctgattgatcgaacgattattttcatcctttctccatcatttatacgaagatctcctgtacaccaatactttgcaagtacaagtgaaaatatattatttttaaacaaatatgcatgcaagcattgctagttcttctttattttcggatgtattgacggtcgaaattggtctataacgaccgtcaccactcgcggatgatagtggtcaccgtggctgggagtaggcgggtggctgtagtgcccaccactctaccagatccagcggaaggggaggcggtaggcgacggcacccgaggaggggtggcaggaggcaggggtgccctcccctctaccagatccaacgggtggagaggcagcaggctccccacagggaggcggtggtaggggtgcagcatcctcccctccccgccggcggtgtcacattctttgttgtcaatgacctccgcagtgtgagaaccgatgcccatgtgcgatgaagatggtggactggtaggtggtggcgtagaaccagaaggtggcggcaaagaagtcctgttgccagtggcaggcacctagcggcccagtgggtcacataggtgctggttttgtgtttacagttgacacctattaagccacaaaggtgtcgattcgaagtgtatgacaagcacctataatactgtagtaaaaaaatggtattgcagggcaaacaccaaatactcacaaaaatcccacatcaattcaaagaatatatccatattcatatcacccacatgccaaattaatctccaaacatacacatatatccatattcagtaatcaatctccatgagtcacatcacccacatcccaaattaatctccaaacatacacatatatacatattcagtatctatctccaagagtcactcacttcatttcacaatggtgttgctgccgaaacactctgcaatcaaatctagtaactcctgaaatagagttcctctgtacctgcatacactgtcgtcttcggttttaaaatcctttcttgcaaaggtcaactttttctgcaaatcccaagcaaatagtttgtcattgcaaataggggatgtgctgaatcattgcacaatgataattagcactatatgatggtaatatctcagtttttctgcttcaatgtttttatccagacaagaatagaacgccatattgtcatccttgttgagtctgacaatgttgacaaaatcatgcagtgcactcactgtccaggtcattttaatcaataatctgcgtatgctgtaaaacgaggattaaatgtagccagtacatttttatttgtttccattatcctggaattatctagaggaatgggtatttgaagcaaaatagagcatgccaccatgaattaaaaggacaccaacatgccacagtactagaattagacaaagagaatgttaaaacagtaccaagttattctctgccattagttcgtcaatactttgttgatccaggtcatttggttcaaattcttcagaaccatcagtgtgtacattctgcaatataaagagagagtgacaacagatcacattagtcaacaaggattaagatgcactttcccagtcagctgatatcaagactacttctaatttcctcactgttttattacagctaattaacctgaagtgcatgaaacataaacaggtacctcatgttcgattccattgagctgatcttgagaagggaataacgtcgtttgggttcacgacctgtaaggaatacaacagtgaagtatatgatataaggagccaggaggcatatacatcagtaaaattaagattagtggttgaggtaactttccaacattcttctgaccaaacctccgtggggttaagcactaaggtagtagtccaaaatgaaaaacaaaatttgtggttcttagatggaatgtgcttcaaatactactgaacacttggttggttgatcccacatgtacatttttcaggccatctacagttaaccccagcaccaagaacagataagtgttcaagaaagcaaatagataaccagattaaatccatcacattgaattcatgttcaggacaataaaaaaacgacatcaatccaaataactaatctacaagatacttagaaaacagagtttggacttagttactaaaaataataagtttggacttactgacaaatagagtttcgatactttaattttaattctgagcatcacatttattcaatcatggaaaaagtataattaggctacatattttacaattactatttttgaatttagagctgttaatcgaaccaattgttcagtataaacaatataccatgggctctttaggttctagttttttttctcaagacctattactttctaaatccagaattaaaaatattgaagttgattttgttaatttcattttgaaataaggagtagcaattgatgtagaccctctattaatgcaaattgccataacttataaaacggccaatatattattagaattttagtatttatgacgatgataaataacccccgtgaaacactcgggttggcgactagtaactcctaagtcatcattctcgcaatgtgcatacgtgcatgtacacgtcacggcttgcaaaggagatcggtattcggtaacgcatacagcatggggatgcatggcgggatgatgttccgtagcattcacgaagggaataatctacggaaaacaaagctaccttgcaacaagatccattatcattctcaagtctcaaaacctagagttagcagaatgaaaaaagaatacgcaaagttgcaatgtggataataataatgatgatgatgatgatgatgtcaagataataattttcagaaaacacgaagtacactgactgaggacagggctaacaaggatgagcagaggaaggtcaagtttagctggacctatcataggtgaaaacttttcacgctgtctcacttctcttatgggctcgatttgttcactgttcactgagacgatatatggagatttgctgttaatttattttgcatgataagagtttatttttccttttttttcccagtccagatcagactgccttgaatagtttgtggtcccaaattaaattttatctattattttctttaaatccatatgaacttcaagttcaaggacgagtgacctggttgggttgttttgaaagtctatttttatagtttccaccactattgcaccgggtctgcgatcttcagattatgagtgcttttaatcgctatcacaagacacgcaggttcagctatatattaagggagataagaataggattactgagtgagctctgataaaaaagggcattgtgtgattttggatcatggatgaagatgcctattctagttatgtagttctccttccaggaagcatctaacacctggaagcaggccaaaatatcatgtgtacttctcaaaaaaaataaggcaatctattttcaagttaaactaaatcagcctactaaagtagcggcggaagaataaaatgtttttcatcttcttgctgcccacatggccacatctcgtacatgatgagctgatagcattgatcctatgatgaaggttttgtgctgttggaaatgctctcctcataagcctccaagcaaaaggtttgcaccctgcgaggaagaaatttgtgtttccaggtgtttctgattatgaatactatctatgtacctaagtttgtcgtgaatggaagaatatcactttgtacgcacgttctgtgttacattctcctatttgttcctgcatgatagcttgtaacagcatcattaatagagagattttttcttcatctcagtttttatttagttcacaaagatcattttctgggggcgagtctgggggaacacttctcgaccttggaaagttgaagtgagttgtgaatgaactgcaacataagtttactatattcttaacgttcagctatccatttgcgtatttgacaactgaacatgatttcagagattcatcttgaaacgtcaggtttcttgttcttaaaataacatcagccaccaggactgttaaatgcaccttttacatagataccggttaccaataaaccccacctaacagtaattcgaacagctcgtaaacacttgcaaagcctcgatgggcacatcccagtacttttggcacaagacaagcataatttttttggcccgtattgatgaacatactaggatacagtggaggtggagcttcagcttgttttgacttttgacccactaagctagtaaaagtggccatcaccttttttctgattttagggtgatgtatcataagaaagcctgccatgactttgcaattactgtattatctgcaaaacatgtagtctgttgaatcagtgcaatccatgggaaaacaagcattagatatggtgcaaatccatcggttaataaaataaaaaatgcttctaggtattataactgaaggaaaagtgaaaaaaacaaaaaaaaatgaataagaccaataaaattgcacaaattgtagtgtcatgaatgaaaaatcccaataaaaggagtaatagataataagaaagcaaattcactagcacacgcatcacaactaatatgatactccctccatttcacaatgtaagtcattctaacatttcccacattcatattgatgttaatgaatctaaacatatatatctatctagattcattaacattaatatgaatgtgggaaataccataatgacttacattgtgaaacggagggagtagaagtgaacatgctgaccattcacatgtaatacattttgggaagtcattattaagtacttgctcaagcaaaagaacatttttgtcatgatatgttcactgataagttaattaggaaagaacgatattatattgttcaatgtctgtggatctgaaaaataatgctcactacatgatgaaaatggatacttgcacaataaaaacaaaagatagtttgtaatactacaatatacaaatgagcaaactggaaattctgatagatagcggtggaatgatagatacttgcatagctgaaggatggttgttgcctgatggttcctgttgagtgctcacctcatccactcttttgggaactctacccaatgttcgaaaccagtgactgtgagcagcacctcaaatcagcagctggtgtcctctcactgcatacacaatgattcctacaaaatcaacaagcccatgttttgaaatataagagctgccagttcaaaaatatagcatgtaatcaatatttccttgattattgggcaattgatggacaagatttgcaaatggaatccacatagacaaaaaaaatctgtaatgaaaaaatgaagtacgttgtgttcaaattctcacaacagacaccatttttttttcgtgactcgtgagttgggacagcaaaagagcaaattgcagcagtgagaatttgttgtctagttctagagaaaagaacatggacggagcgaagcaaaagttacattgtatactggctaaattgcctagaaaatcaggaatgatagagagtaaattggcgcatccaaacgagatggggggaaatcattaaacagaaaatttcaattcaagtgcatccagccaaccaaaaaaatctgaaatttgttcctaggcatccttgcagcgctttaggacaaaaaaaaacaaggatttattcatccttgctcttgccgtaagtgcatgcacatgaaccaattttcagaaaaaaaaaatggacaatactttcttaggaaaaaaatgggcaagattcatgtacacataccacctttttattaaaaaagaagttcagtaagatgaactgctgagcctggggcttcagatccccaatgtagtagaacctgaaaaaaattgaagaaatcgaagcacacagtaacttgtactaattgctacgaccaaaaggaagaacaaacgaggcaaaaaagggaggacaaaaatcttcaaatgtaagtactactttgcatgattacatctccagaaaagaagcatgagttccaacatccaaacatatcaggaggcagcgcttgatgtaaaaaaggtaaaagtgtaggtcgggagtgcatacctctcattggtgcgtggggtggtcgcgcgcccgaagagaaaactccgtgaacgagaggacggtggatgccatgtcctctactcaagcgaaggttgtcggcggctacgcaaacgcaccgcgggcgactgcagttgcggaaggaagtgggcgcggtggttcgggggaggtagactcgagccagtccgacaccggtgcgagcgcgtccgcggtccgctccttccaggacggaggtgcgcggcggcgcctcccattgctcatgggctcacaagcccggggtgtctccgagaaaggggatcttggcggcatgcgtgttcaggccccagcggggcgccacatgcacctgtacagaagtatgttctggtatcactagtgaacatagtttggtttcttttaacatttaaaccgcaaaaattgatgttaaaatacagaattcagttgtgcctgcacactgacattagtatatataaaactgacatgaaccgttttttatagagggaattgcacagttgtcagcatcgtatccagttgataaacggatgcagcagattacaaaattcccttgtctaatcatctaatgtacaaggagcatactagttaatagaaaatgcagaacatgaggggcttttcttttctggctaatttgttaaaccgcttcgctagaacattggagacgagcaaaaatgcagttaatgtagttgggataacgtaccactgcctgggtgtacttggtgttcaggaatgtcaagatcaactgaactgcaccctgctggagtcttcccaactcctttatggcgcctttgatctaggaaatttggcgaaaatgttttctggtatcatttgtgaagatttcttttttaacatttcagccacaataatcgatgttcaaatacagaattcagttgtgcctgctgattgatattagcatataaaattaacatgaagcgtatggttatttctatgccagaagcccagcaacagttgataaagggatgcagcaaaacacaaaatttccttgtctgattcatctaatgtccttggctaatcacctatgtaccagaagtattgttaatagaaaatccagcacatgagacaaccaaaaaatgcagttaatgtaattgggataacgtaccactgcctgcgcgtacttgttgttcgggaacatcgagctcaactgaactgcaccctggagtcttcccaactccatggagcgccatctttctcctcatgcgttcagcctgctcccatctctccgatgaggccatgatatttgacagcagtatgtactctgcatcgttggttgacacacgacaggagtgcaattggtgaatctcacttgatacgagttcagacatctctgcatcgccatgcaccctgcaagctccgagtaaggagcaccagatcacctcgtttggttgaacaagcatgttcttgacaatctcataagcttctctcaatcttccagcacaggccaggaggtcaaccaggcaaccagaatgctccactgcagcagcaaccccgtaaacatcgaacttgttgaagattcttagtccttcatctacaaatcctccatgcgtgcaagctccaagcacagcgagaagtgtgatcgcattaggcttctggtccgaacactccatcttggagaacaatttaatagcctctatgctctatccatgggtggaaagtgcagagatcatcaagttccagcattcggtattcctccattgcatgttgtcgaagatctttcgtgcgaaagcgaggtcatcgcacttggcgaacatgtcaaccaggccattcagaacgaagtggttcttccggatacggtgctggatgatgaaactatgtacctttcttgcttgctctagcgaaccgagctgtgcgcaggcagagagcacccctgccatggtgaactcgtccggcttgatcctgtcatccagcatcgagtgaaatgcttccagtgccttcccggagcatcctattttggcataccccgctatcagcggaagagcgctacggctcggacgtccggcatcacaccaaaaatcggacgtctaaacgagcgcatgtgggaacgaaccatgtcactgtaatgtatgtgcctagctgtttcttttcattctttcatcctctttttaaatattttttcctcttaaattacttatccgatctacgatccgatcacaccgttgtattcgttgcaattaaatctttacaataagatatcacatgattatattatgtcaaaaaaaaacatatgtttcaaaccgttagaataaaatatttcatacgtgataatgatatgtttcaatatgtgtcttcggtgtgtttcacaaaattcctgaaactatctgctactactctctctccacctcatgcatgcaacatgtatgtattttagcaagctttaaaatgaattttcttttaaattacttatttaatctatgatccgatcacaccgttgtattcattgtaattaaatctctacaacaagatatcgcatgattatattttaataaaagaaacacatatgtttcaatccgtcaatacttgttgtttcatatgtgacagtgacatgtttcaacgtgtatcttcaccatgtgtcataaaaatatttaaatgtttcagttgttgtattctttgtttcaccatatataacttaatgtttcatttgttggtcaatgctctctcccgcactcccgtgctgcgttgcttgcctgccctgcatgtattgcttgcgctgctgcttgcatactctctctctctccctcctattacacgtgcctaattttttcctcacattgtaaatatttttctccaaaattatatatctgatctaaatttcaattataccattagatttttgcacaaatacttcattatgttgaaatatttttaaatctgacgctacaaatcttacgttcaatattttttcaaatatcgaatgctactcctcgtagggacgtgttcgagaagcgatgttgtcacatgcatgcatgtaggagtagagctggttgccaaggtggcctgaggcaccattactttctctctcttaatcaaactttaaacaaatttttattctaaaatatatatccaatctataatttataacaagatctcacatgaatatattttgataaaaatatatatgctttctagaagaaaacaaacttatgttgaactatttaaaaataattctttcatcacttgtggagatgtttcaacccacttcacaaattattccaaagaagtacaatatataaaaaagttttgacgacaacaataatcattattacatgaaacattaagtcccgactagtgaaacattttttatatttagatcgaaacatcgaattataattattgttgaaacataaaaaatatatttgctaaaacatataaaaaaagatagcatgaaacattgctaatgaattagtgaaacatcaacaaatgcttgttggaacatttcagtaacaatgtgtgcaacatttaaaaagaaaaattaaaagtcgtcggaatgtagtcatgtgatatcttgttataaagatttaattataacgaatctaatgatataattaatttgaaatttggataaatagtttaagagtaaaaatcatttaaattttgaaacatgtttgtatacatgctccgttgcttgtcagtacacctgaccaaccgttgcaccatgcacctacactgttgttcttttagattaagacgtccgattttttatttctggccggactgccgatggtaagcatttccgctatcagcgtgttccaattcaccaagtttcgcacgggtattctgttgaacaccgcgtgcgcttcgttggcattgccagccttgaagtacccagtgaccatcgatgaccacacgaacgcgttccacgtaggcatcttgtcgaacagctccctcgcggtctccatgtcccccgtggccatgtaaccctgcacagccacggtccacgtgacgacgttccgcatgcccggcggcgcggcctcgaaccaccgccgcgcatccaccatgtcgcgctcctccgcgaacccccggatcagcgtcgcccacgtgacgggcgtccgtgagcccatgccggcaaacaccgcctcagcgttggccatgtcgcccgccgccgtatacccggtgagcatggcattacacgtcacggtgttccggtccggcattctgtccaataccccgcgtgcgttggccaggaggccgcacttgcagtacaccggacaccagcgtggtgcccacgaggcggtcatgggcgttggcggatttcacagcctccgcgtggagcgccctgccgaccgaggatgggatccacgcgggaggcggtggccttgaggaggacgatgaggagaggcaggcagcgcgtacgatggggcagttgctttgagtagatgatggcggcttcccagaggaaggagttggaggcgtagtccttgctgaggttggcccacttgtcagggtcacaacatcctctcgtcaggtaaaggccgtggagctaagggtgtaagtgggtcagccgcgaacccacttaaacctgcttattttgacctataagtgggtttcgcgggttaaccacttacatccctatgtggagctgtctcgctcgactggccgccatggcgagcgttcatccgcccgtgcagctgtggcggcggctgctacctggggcttataacgtcattgggtcaaacaaaaagttcctggaaatctagcattcaaaagctcacgattaaggatgaaggagataaacagtgttgctctgttgcaaatgggtaatacgactaaattgacaggtaacaaatcccacaaatcacaagcaacaaaagtggcaggattgattacaaattagccattccaagcagggcttagccagaaattttttgttgggtagtcctatttcaaaagttcacatcacacatgaaaatttttcaaacaccgcaaacaccatgcatagtacaaatttggttaaaaggcgatgcaaatatagtaacaatatcttatgatattaataatcgactaatttaacaagcaagctcaaaatgtgcaattattacagtaggctaataccaatcctcactcttcatattttacccaataaaagaataccaatcctgcaataacagaagcaatctattcgcattcaatcattcacaaatcagcatcctatgctatgagctaatcaattagccatgagtatgatcaatgagggaagctaatcagtaatcataaattgcatattcacaggttcgctaatcacaaattgacaatataacattatgatagtactctagtagcaatcacaggttgcattgcttgtaaagttggcctgccccagaagactgccctcattggctttcaatataagccgggtccttgtgacctttttctctaaaaaatcacagattgcattatgaagctaagagcaagaggagtagagctctagagcccagaagtagaggaacctcaccagcaatgtggcaccggcacgggcgcatggcagtgagtgccagcaagccagccagccacgggatcttggtctcgccatctcggctctcagctggcatctcgagttcccacgccgaagccgatggcagcgtcacgacattgagcgagagtggatttgtgtggcgtaggccacaggctagaacggctgtgaccagcaatccggcgaggagaggtggagcggcgaacaaccggacaggcagagaggagccggccaacgacctagcattgcttggctctatggctcaccgctgatcgtcgaagcaatgaagaaatagcgtcccgcgtcgcggcggcgcggcgcggacccacgggcaagggcaggcttaggattttcaacttaggtatttgaaactagaagagaaaaaaattttcaacccaaagtctaatagttgtataatataaaacggtatagtgttcatagaatcgaccataaattgaatgcgttaagcatatttaagtacagtactaaactattaattgacaaaacatatcaaatttatagagcatagaaaatggcaaaatgataagaaatcttacaattcagaaaggaactttcggcttcttgatattttgaaaacatgtacactgataaatactacaatatggtattccaatttaagtactaacattgctaacactgctaaatatgtgcactgataaatactaactctgctacaaagcttcacaaatcagtgaatcacaagtttcgaagttcaattgttcaaccatgaaccatccctggatggctggattcaaatcctaaaataaaaatgttcaaccatgaaccattccagattactggattcaaataaactaaatcctaaatcctaaatcaaatgaaccatcctagattcaactgtgaacaactcctaatccaaaatgtttctaaccaaagtaaccatctctggatttaggcagtacagagctatgggcaggggaagaattaccttcgtctggagctccgggcggcgtcgcggcccggggaggcgccgaggcggtgcggcgcaactcggctaccgcgcgacgggcaacagccgacggtgcgatgggcgagggcgatgcgctgccgccgacgacggtcgaccgtcgatggcgagttgacagcggcgcatcggcggtcggccggtcgctctcctgtcctggctgtgtcagctggatagggttaattagattttgggctgttcttttgttattgggccaatgggcctgaaataatgaggagagaaggatggtgagggagaggggctgctgggctgggccaacggggagagattgaaggagatgggccggattcggcccaaaggtaagagagggattttaattaactttttaatttaaataattgctgaaacgatctttcatctatatctatatctatctacacgtggcatttgaaactcacgaagataaagattaatttagagcacgtaaaaagattaattaagttttaattattacaaacttgacaaatggatatatttgatattttaaaacttctatatagaaagttttcgcatgtaacataccgtttagtagtttgaaaaccgtgctaatagagaccgaggtaaaatctataatttcatcagaaaataatagggcgtatatctatatctatatcatcatgatcatgatcatgagaaaagaaatgtaccagtttcatccatactgattatttttaacacttagatcttttcatccaacgactgatatcgcgagttgatccgtccatacaattattgatctcccactccgcataaacagcggttacagaaattagcgatcaatcaaatcttcgctcccatcgccaacccactgccgccgccttctcccacgctcgccctaccccaccgccactgctcgtaggcggcggggttgctttcatcgtcagtcgcctccatctccacggctaggtgagaggacagagagccaggatcgccatcgccattgatcctccttccgggacgttctctcttcgccatgctctcatatcacccctccgcctcgccaccagcgtccctgtcattgtcgtcgggattatcttcaccaataccttcccacgacgatccatggcccaggcgccatccgtgcacccaaagcccgatgacctcgcattgcgcccaaagcccaaagatcgagaaaagggactaaatagcctataaacgtcatttagaagcggtaatttcattcataaattatccaagggaagccggtgcaatcacaagacacggatgtgagaaccatttgctcctcctcgccgtcgccccattcggaaatcaagaactctgactctggtttgctaagacataaaacacgcgaatattagagaagaacctaatatcaaataattagaaggggtgtgggcgtgaggcttcgaatccagttcgtttagcccaccaccttgtggagttagccggaagaccctgggtgtttcccttgtttgctaagacatgaagatcaaagagactcttttgtctttgctaaatgatgttcaggctattaagtaatatatttaaatctctccctcccaatctttaaaatttaggcaattttctcttcgaagagtacagaaagcacatattcgatttcgattcacattgagatttgtcagacgatgagtaccacattcaacaacaatggcatcatcatcatcatcctcggtagcctacctcgtacggctgtccggtgctgacgcctcggacggacaagtacaccacccacccggaccacctgccccaccaccaccgccgccgcctcgcttcgccggcagaagctgtccaccgtgcacatcaccaccccgtcgaacatctccgcgccggcgtccgcgtgcccctcgacgcgctgtgcgcgcgtcccgaaccggccgtccatgatccgccttgccatctcctcccgccgcaccgcccaatccgcaccttgccacccgaggtggtagctcacatggacgggcggcagcggcggcgttgtgctgcgtctctcgccgggctgtccctcggcgttgtgagcttgtcgcgccaccgcacgagcgggcggttggtgatatgccagccgtcggcctcctcgacggctgtagtggtctgtacgcacatggtcacgttaatattccaaaagttttgacaaaattacaccgaaagataaacaatgtattcatgagtaatgtgaaatagaaatcttacatgtttgaatttttatcaattatatttgatttgcgtgtggttaagttcaaccctttcattgtcgatggatgacctaaagatccaagaaataaaacaagaaaactactacaaccatcccaagggcgatgacagcggaagcctaagcggcagtggccataggacgccctctctgatgccatgttaaatattataaggagagatagatatactgtagatattggacacattgtattgtgcctcggagggctagtatatttagattacatggcttggatatcaagcaatgtcacatatatagtactagtgagtagaaactaatcctatcttaccataacaacacaatacattatgatcatatccatatactctcattatgttaggcaaagaagatgagccgagctagacttgtgtgggcatcgtctaagctatttcctgtactaccggtgaatattgatttcgaaaatccaaaaagtccaacgagtctccctgcctcaaaacgtgttattctgtttcggcccactcctggattggtatccctcttcgctaaaactggtatggcgcggcgcaagggtagggtgacgagtactccgttatcgacttgcccttttcgctcatacgcccttgttgctcgtttggcgatggagcgaaatcatcgtcaaggttttgcaacgggtgacaacgnagnttatgcgccacgcgggtttcatccgggatttggtgttggaaatcaacatggtggtgctccgggtgnaagagggcgtggtcgcggaagaggagggtcggccggtcgccctgggtttcgccatgatctctctcacggtggtagatggaataattttggtggaggtcatgggtggaggggtggctttggtctcaatgctggtccgagtgaaggtggatttaatggcgctgggttccagccttcttttggatctgctgttcgggcagatggaggtggagttggtgctggtaacctggtttttggtgcggtaccagggatgtctgctccagttttcccggctgctggcggaggtgtgttgccggctggcgctttgctgactggtggtgcgccggggggtggattgcagatggctggtggtggtgtgcagactggggttttgccggctggcgctgtgtcgactagtggtgcgccgggtggtagattgcagacggctgctggtggtttgcagtccggcgctttgctgaccggtggtgtgccaggtggtgggttgcaggctggcttcccgacgaatggtgctactcctggtgccgggtcagctggggcaggtgatcttttgctaactggtggtgtgttggctgctacatcggctgttgcatcggagactgtttcgttaatgaaaattgctgattcaagaaaaggaaactcccaacaggataggttaaaggtggatggaggtgggattcagactagaggttcgggggcaatggtctccaatatttctagtggtcctactgctggtggtcctgctgggggttctatacctagtggaggagcttttggtgcttttgctcttgctccttccgcttcggtatatggaggtggtaaggattcttaggttcatggtgagccggttcaacatgagatggcagcttgtgtggttgatgttgacaaaggcaagtcaaaggtagaaagtaaaggatcaggtaaaccttattgctttagatgtcttacaaaggggcatacgatgcaggattgttcttctaagttttactgtgaaatttgtgaaagtgtggatcatattgctatccgttgcccaacttttagatctacagttaaacctactgctcagttatgtggttatgctactgatggtctgggtttttttcatattcctctctcagctggtcataaaattaaacatgagcctagggcagctttgattaaggtatcaaagggtaagctttctgtaaatgatg

SEQ ID NO: 7318 - DNA, 4047 bp, Oryza sativa
gagacgacggcgagatacggcggcgtcggcgcggggatttgccctaggcagtggcggcgaaggagagaggccgagagagatcgatcggccgaaaacgtctaagtgttggtgaagaagacgagggcgcactgggagaaccacttgacgcttaggctcatcaggccctctgcccttctttcctttgctagacatgtccttcacgaaaaagacttgcgttacatcattggcaaggacaaaaggttcgtccgagtatccaaccttgttaaggtcaacagttgtcatcccactgtcatcaatcattacgcctccaccagtcaacctaacccattggcaccggaacagaggaaccttgagaggaccatagtcaagttcccatatgtcctcgatggcaccgtaatacgtgacagttgttccatcgtgtcccatggcatcgacacgaacatcgctgttttggttcgtgctcttcatgtcttgggctctcgtgtagaatgtgtacccattgatctcatatccctggaatgtcgcgatcgacccagacggtcccctcgccaggaaggcaagttgttggttgatcgactcgttacccatgagatgttgtcgtagccacgcggggaaagtatcaatgtgatgccgtgtaatccatgcatcggacttaccgatgttcctggcgcgaactagagccaagtgctcctcgatgtaaggagctaccaatgaagagtgttgcagaacagtgaaatgggctttacggaataaattgttgtctaccgtcgttattgctttccttccgagagttccctttccccgtagtctcccttcatggcgtgattcaggtaccccgattgggcgaaggtcttcgataaattctacgcaaaattcgatgacctcctctgttccataacccttggcgatgcttgcctctggacgagcacggttacgaacatacttcttcagaacgcccatgtacctctcgaaaggaaacatgttgtgtaggtacataggcccgagaatacggatctctttcacaaggtgacaaagcagatgcgtcattatattgaaaaatgaaggtggaaatatcaactcaaaactgacgagacattgcaccacttcattctgaagggcttctaatctatccagatcgatgaccttctgcgaaattgcgttcatgaatgcacatagctttgttattgttgcctggacattgtctggaaggataccccttattacaactggtagcagttgtgtcatcaacacgtgacagtcatgagactttaggtttgtgaacttcttctccttcgtgcttattattcgcttgatattcgtggagtatccagacggtacctttatgctctccaagcattcaaacatactttccttctttgccttgctaagagtgtagctggctggactcaagtaatggcttcctttctcctttggttccgggtgaaggtcgtcacgttgttccatatgcttcaatcattacgtgcttccagtgtatctttcgactttccgtatacacctaggaagccaagaaggtttacgcaaaggttcttagtgaggtgcatcacgtcgattgcgtagcatacgtccaagaattcccaatatggtaactcccaaaatatagagttctttttccacatcgccgcgtgaccatcttcgctctctatatgctggcttccaggcccctttccgaacactacattaagatctttaaccatagcaaacactgttttcccgctgcgatgtttaggcttcgtacggtggtcggccttatgttcgaagtgcttgcctttcttccgtaccgggtggtttgctgcaaggaatcgacgatgacccatgtatacaaccttcctacagtgcttaagatacgtactttctgtttcatccatacagtgagtgcaagccttgtaccccttgttggactgtccggataggttgctaagtgcaggccaatcgttgatggttacgaacagcagcgctcgtaggttaaactcatcatgtttgtcctcgtcccacacggggacaccttccttcttccacaactgtttaagatcttcgaccagtggtcttaggtacacgtcgatgtcgttaacaggttgcttggggccttgaataataatcggcatcattatgtacttcctcttcatgcatagccagggggggaggttgtagatacacatagtaacgggccaagtgctatggccgctgctcatctctccaaaaggattcatgccatccgtactcaaaccaaaccgtatgtttcgtgcgtcctttccaaattctttaaattttctgtcaatgtttcgccactgcgaaccatcggcggggtgtctcagcatcccgtcctgttgacgctcttcagcgtgccatcgcaacattctagcattccccttgttcctgaacaaacgcctagccgtggtattatagggaaataccacatcaccttagcaggaattctcttctttgttagctgcccgtcaacttctcctggatcgtcccgtctaatcttgtatcgtagtgctttgcaaacagggcatgcttctaggttctcatactcctcaccgcgatataggatacaatcgttcggacatgcgtgaatcttatgaacttccagtcctaacgggcagactatcttcttagcctcgtacgttgtctcgggcaatttgtttccccccggaagaatgttcttgacgagtttcaataaatcgccaaatgccttgtcactaaccccattttttgccttccattgcaacaactccagagtggtatccaactttttgtgcccctgctcgcaacctgggtacaacgaagttctgtggtcctccaacatcttgtccaatttatgggcctccttttcactttcgcagtcttccctggcgtcctgcaacatctgaccaagatcatccgcaacgtcgttaccatcagcagctatttcctcctcgcccgtttgatttccttcaaatccaacatactgagcaaagtccggaatattgtcgtcttccacttcttcttcttccatttcaacaccttgctctccgtgggatgtccaataattatagcttggaatgaaccccgactcaaacaagtggaaatgaatagtcctggatgcagaatactccttctgattcttacacttattgcatggacaacaaataaaacccctttgcctactagcttcggccactttcaaaaaatagtgcacgccgtcaataaactctttggaccgccggtcagcgtacatccattgccgatccatctacatgagttaaaaaaaaccgtacacaaataattattcttacaataatgacagtcatacaataattataagatatctttattcatacaaaaatcataaaatattacaccaaataattcttaaaaactatttgtaaagttttaaactaattttaatgtgttttacttcttttaattttcattttagtttgttttctattatttaagattaactttcactagagttttccttctcaactattttataaaaccttgtttagcaaatgaactaaatttctatatattctttcttccccacacacattttctctctcatcaacttacaactaaattttggagaaaaaaaagtgtgcaaaacataggtgcaaatgtagtatgacaaaaaaaaacattggaggatgaagttgcaaaccttttaggcacctctgatttgtatgtaatcaccaaaataaattcaatagaaattttggcatgacctcccctcttttttgaagaaattttgaagcttgctcgggcagctggaggaggaagaagacatatgtataggggtgtgactttagtcccggttggtagcactaaccggggctaaagatcaccgggatctttagtcccggttggtgctaccaaccgggactaaagtcacaatctttagcctctgtcggcgtcccccaccggcagcccgagcacgcgtcaaaatttcctcagggaagaggggaggtcatgccacaatagctatcaatttatcttggggattacatacaaatcagaggtgcgaacaagctttgcaacttcatc

SEQ ID NO: 7319 - DNA, 26440 bp, Oryza sativa
tacaaatctgtagccagctgcagtgcggattccaagacacaatgtgtgtatgacaggtgggaccatatatattaatagtatagtaagcaaatattgtatgaattggctataaatgaattggagctagtagtgggctatgactgtacaaaagcattcattcagtaataagctcataattacgtattattttggaccctcttatacatgtgcgatcttagtattgagtgtatttatttatacactttaaatgattttagtggtggtgtctgagcctgctagaaattctacaatctaacatgtgggactataaggtgctcagagcctgctagaaattccacaatctaacatgtgggactataaggtgctcagacgtaatgtttttgctttatacattactagaaaagatgcatgtgcgttgtaacgggtgaatactattttaattttattattgttatacggtttaactaaggtgaaattcattgtgggaatttccttggatatttttttttaaaaaaatcatgagctgcaattagtcgacattcatctcaagttagcatgtgagtttttttaaagagattccttacacgatttccaaaagaaaacgaatttaaaatccgactcaaacacggaaccgtattttcaacagcgaacgaacttaaaatccgtctctaacatggattagtatttctaaaagcgaacaaacttagaaccgattctactatttttataatagtagagatagagaagagatatgcctattcaactaactatgttaagttagctataaacctgtagtaaagttgttatttttgcatttatctgttataaatatctgttgcaatgcatgtgccttcagctagtttgagtaaactttaaggggctgtttggatggaggctaactttgccacaactccatttgccatggtaagctacgcaaagtgcggccaataatttgttagccacaactatagcaaactttgactagaaaacgagagtatgacgcgtggaccaatatgctaacaaagtgtagcttgactcaaatgtagcactctaccaaacgctagctaagaacttgtggcacgcctaagatttggtttggcagactgctgccaccgaccaaacagtccctaaattactgaggacttcttttcaggaggatgcggggcgtgcgcggtggtggtgtccaagtacgacgccgccgccgacgaggtgacgtcgttctcggcgagctcgtgcctgacgctgctgggcagcctccaccactgcgcggtgaccaccagcgagggcatcggcaactccagggatggcttccaccccgtgcagcgccgcctcgccggcttccacgcctcccagtgcggcttctgcaccccgggcatgtgcgtctccatcttctccgccctcgccaacgccgacagggcggcctccgccgcgccgccgccgccgccgacgccgccggggttctccaggctcaccgccgccgacgccgagcgggccgtctccggcaacctctgccgctgcaccggctaccggcccatcctcgacgcctgcaagagcttcgccgccgacgtcgacctcgaggatctgggtctcaactccttctggaagaaaggcgagcgcgctgacatcaccaagcttccggcctactcctgtactgccgatgttgccaccttcccggagttcctcaagtccgagattaggtcatccggtggtgctccggcggtggcggtcaccggcgacggctgctggttccatcccaggagcatcgaggagttccacaggttgtttgaatgcaacctgttcgacgaaatgtccgtgaagattgtggcgtcgaacaccggctccggggtgtacaaggatcaggacctccatgacaagtacatcaacatctcgcagattcctgagctctcggccatcaacagaagcagcaatggcatcgagatcggagcagccgtgtctatctccaaagccatcgagatactacggtcagatggtggagacgcggtggtgtttcgaaagattgcttatcacctgggcaaggtggcctcaccgttcgtccggaacacggccaccataggaggcaacatcatcatggcgcagaggatgtcgttcccgtcagacatcgcaactgttcttctcgctgcaggatcaactgtcaccatccagcaggtggcttccaagaggatgtgcctcactctggaggaattcttgaagcagcctccatgtgattccaggacattgctaatcagcatctccatcccagattggtgttcatatgatggcatcacttttgagacatttcgtgcggctcctcgtccatttggcaatgctgtctcatatgtgaattctgcattcttggcaaggagttcgttggatgcagcatcaggaagccatcttattgaggatgttcgcttggcattcggcgcttttgggtctgaacatgccatcagagctagtaaggttgaggagttcttgaagggaaaattggttagtgcatctgtgatacttgaagcagtccggctgcttaaaggagttgtttcaccagcagaaggcaccacacatcctgaatacagagtcagtctagccgtcagttacctgttcaggttcctgtcttcccttgctaatggcttggatgataagcctgaaaatgctaataatgttcccaatggttcatgtactactaatggaaccaccaacggtagcgctgagtcgacggttgacagctttgatttgccaataaaatcaagacaagagatggttttctctgatgaatacaaaccagtcggaaaaccaatcaagaaagtcggggcagagctccaagcttctggtacatatatactttcctgttcctttatgtgcacaatcttttttagtttataagttttgctttaacttttcttttgaaataaagaaatttgctttaactaatttctttgaactactgtactctaaaatcttgcaacgtacctactatgtgttgagctccttggactttgatagcctgaacttctaaacttgttactcaggggaggcagtgtatgttgatgacatccctgctccaaaggattgcctctatggagcatttatctacagcacacaccctcacgctcacataaaaggtgtaaactttagatcatctttggcttcacagaaggttatcacagttatcactgcaaaggacattccgaccggtggagaaaatgttggatcctgcttcccaatgttaggagatgaagcactttttgctgatccagttgctgaattcgctggtcaaaatatcggcgttgtggtacttacgaccaaaccacctgaactttctttcgatgagacaaaactagctagtaatatgtcaaatattcagattttttttataatgcgtttgagcttaccatgtcctgatccatttctatcattcagattgcggaaacacaaaaatacgcctatatggcagcaaggcaagctgtgattgaatataatactgaaaatcttcagccaccaattctaacagtagaagacgctgtccagcataacagctacttccaagttcccccatttttacaacctaagccaattggtgacttcaaccaagccatgtctgaagccgatcacaagatcatagatggggaggtacggacatttcgttttctcttaacacgctaaagctttaattttgctattctatatattaattagaagaacaattttgattcacactggaatctactgagcaacagagttgctctgaatgaaacgaaatatatagcctcagttcatgacaattctaggagaaataccttcaccttatttgttttttgggcacatacaggtgaaacttggatcccagtactatttctacatggagacacaaacggctttagctttccctgatgaagataactgtataaccgtctactgctcagcgcaaatgcctgaggttactcaagatattgttgcaaggtgcctcggcgttccatttcataatgtccgtattatcacgagaagagttggaggaggtttcggtggaaaggcaatgaaagcaacacatgtaagaacctgactgaccatagctttgcatttgcaggaaaattatattattgaactagtggaattaatttcccgtacgtctagctagttccgttgctatagatatactgcagtgcatatgcttttgtttgaaaataaaactatatatatatatttgtaataccacaaaatgacaaacgtttgtgattgaacatgtatgtagcagtctttcacctttcaatagaaatatactagtatttcaccactaaaattcagcaattcagatctctgttttgatagcaaaacagagaatttttttccgatcttgattttgatttatatctgagtatttgaaatgaaaaacttctagatgtaagtatgaccagaagtattatgatttgacaggttgcaactgcttgcgctgtggcagcattcaagctgcggcgcccagttcgaatgtacctcgatcgcaagacggacatgataatggcgggagggcggcatccgatgaaggccaagtactccgtcgggttcaagtccgacggcaagatcacggccctgcacctcgatctcaagatcaacgccgggatatcaccggaattcagcccggcgatcccgtacgccattgtcggggccctgaagaagtacagctggggcgctctcgcgttcgacatcaaggtctgcaagacgaacgtctcgtccaagtcggccatgcgtgctccgggcgacgcgcagggctcgttcatcgccgaggccatcgtcgagcacgttgcgtccacgctctccgtggccacgaacaccatcaggaggaagaacctccatgacttggagagcctcaaggtgttcttcggggacagcgccgccggcgaggcctcgacgtcgtcgtacagcctcgtcatcatcttcgacaggctggcctcgacgccggagtaccagcggagggccgccatggtggagcaattcaacggcagcagcaggtggaagaagcgtggcatttcttgcgtgccgatcacctactcggtgacgctccggccgtctccggggaaggtctccatcttgaacgacggctccatcgccgtcgaggtcggcggcgtcgagatcgggcagggcctgtggaccaaggtgaagcagatgaccgccttcgcgctgggccagctgtgcgatgacggcggcgagggcctcctcgacaatgtccgtgtcatccaggctgacaccctgagcatgatccagggaggatggaccgccgggagcacgacctccgagaccagctgcgaggctgttcggaagtcgtgcgccgcgctcgtcgagcggctcaagcccatcaaggagaaggctggcaccctaccatggaaatcctttattgcgcaggtgaggaagaaaaaaacatccaaattttcgactccctccgttttgaagttttgagattacaagtcattttgactttggttaaaggcaaagtcaaattgctttaagtttgtagaaaaaaaagtagtaatgtagaaatcctagattgtgcaggtgaggaaagaaaaaaatttcaaaattttttagtaaactgaaagcatcagtagctaggcagatcatgttttttgaaagatcactgttgtcagtctgaagacagcattgtaaatttgttttcactttcaggcaagcatgggtagtgtaaaactgacggagcacgcgtactggacccctgacccgacgttcactagctacatgaactatgaagctgccactagtgaggtatacacactacacgaaccctgatccaaattacatcagcaggcagctctgaaaatgcaattttaatcggaaatctgcatatatatgatatgaacactgttctccaggtggaagtcgatgtgctgacaggggcaaccaccatcctgaggagcgacctcgtgtatgactgtgggcagagcctgaatcctgctgtcgacttaggccaggtcagtcagtcactcaatctttttttttagattttgttttatttagatagatgattacatcctggcctctgcatctgtgatacatacagccataaagtttgaattaaaaaaaaaacagtgctcctgctactaattggagtaccttcaaaacatcaattaattactttctccgttccaaagcataatttttttaaagaaaaatgtttctgggtaattttggaatggaggtagtgatcagatctctgcatgatgttgcaaatcattaatcaattgcaagaccaatgaaatccatgtgtaaatatatatgtataatctgaatgcaagattgttagctgaatattgttgattttggcggtctccatcgataatcaggtggaaggcgcgttcgtgcaaggtgtgggcttcttcacgaacgaggagtacgcgaccaacgccgatgggctggtcatccacgacggcacatggacgtacaagatccccaccgtagacaccatccccaagcagttcaacgtcgagctcatcaacaccgctcgccatcacagccgcgtcctctcctcaaaaggtgacaatataaatgcatcttctgctaacctcttcttcctcctcaatctttttttcgccggaacggcggaaggaagccgatcgattttattagatttaggagaaaataaaagtatatcgtagtacagggtgccactaacaacaagtgattgcaatttccaaacgaaatttcggcaatttcgcacccccacaggcaagcacatttctggcccagaattttcggttttttttttcaattttttgtgaatttggtcaaattttatttaaattcattcaaaattcgtcaaattttccaaaaaatttcggcaaaaaagtaccgaaatttcggccacccccggcaaaaaaaacaatttcgagattgctaacctgtgaacaacaaaccctatacaagctatacattcacaactttaacactgaaaaatctgaagctgttttggcgtatgtcatggcagcgtccggtgagccgccgctgctgctggcgtcgtccgtgcactgcgcgatgagggaggcgatcagggcggcgcggagagagttcgccgctgtcggcggcggcaccggcggctcagatcaggtgacgtcgttccagatggacgtgccggcgacgatgccggccgtcaaggagctctgcggcctcgacgtcgtggagaggtatctcgagagcttttctgcaaccaccgcctagtgctgggagaaagccgaaatggcttcgcatcttggctggaagaaaattatgcaggacctcagtccttcgcccacccagaaagacttctcatcttgagtgacacgtgtccgcacgaatcttgatgtagtcatcttctacctgagctcaagtcaagtgcagagtgccaaactttccctttctctctcctctccactctccacctcccttcctcctcctcggccagggagggaaggttccacttgctagaggcggcgagctcgccaaactttttcatcgtggcgttgtctctcctctccactccactctcatctcaccacctccttcctctctttcttcctagccaatttttggccggatgaacagcaacagcggcgagttcgtccaatcgatggtcacagactagcaaccttaccagcctcccaagctaagagcacaagtactgggtgccgagttgccgactagacatgctacattgctgctcttgcatcatgttgcatcccgtgccggagattgggcctctggctgtgcagaaaggagccaggggaggtagggactgggaagtggaaagggagaggagagagggattggggaatttttcggcactttggtctgaggtagaagatgactgttctctgctctaagattcgtgcgaacaagtgtcactcaagatgagaagtctttccaaatgggcgaaggacccaggtcctgtataaacaccaacaataatggggctgctgacttgtatgttgatgagttttttttttatgtatgttgattactggaaatgatgtttaactatttattttattttaaaatatcatgcagttatatttattttgctgtaacttatatttttatatctttactaaatttttaataaaatgtatggtcaaatgttatatcaaaagttaaggcgttagatattttaagttgaagagagtatgtttagaagagaaaaggtttttacttttgcaaggtaaacctgtatatgtatggagatgagcaattctacagttcttaaggaagtaccatgagatactaaaaatttaatgtaaaatttggtacctcatggtaccttatagtatctaggtaccaagaggtaccaaatttataatagaaaaaatggtatctcatggtacctcctcaagtaccataaaattgctcgtatggagataatatatggacagtaatgttcttatggctcgtgcaaaaaagagcgaaaaatatgccattatttctctacatgggattgggcgattggccggacttgaaccggaccgaaccagactgagctctgggtcatctgtggccgatgcttgccatacggttggtttactggtcaaggcaccacatgtaattgtatactaaagtactctctctaatcaagatagaactctagacccatactctctaaaccatagatgtctagtttaatgcacacaacgagcgaccaaatgatcgatccaagaaatattcctaaataaagattgatagtaaagcataaagatataaaaggatatatatatatataaatattggaaatataaagcatatatattaaccaaaatatccgactcagaaaagatataaaagtttttaccaaacttccagaggcactcctctgaacttttgtcggttctcgtacttgacttgactcccgatcaaactcctactcctctacgaagtagagttggctattcctaatactctagcaactacagtgaacaaagtggagcttctactctgagttagagtagtggtgtgctcggccttgaagtgattgggggagggaaagtttggtctgccggccagtgacctccgctgggtcggttggcctttccaatatctgagatcatgtcctaaagtcggtgttacaacttgtattccccactaacatcggttggaccaacggtcgtggaaggggccaactaaccggcctaagagagtggtatgtcagatgtgtactaaatcaaaaggagtgtgtaacctagaaattacccctctgaattatcgtggtcgactgaattacccctctgaacccgaaaaccatacgtcgcttaccctaaacttttaataccggacgattcactcccctcaacccaatccaaatcagttttgtcccacatggcatacgcgtggcaatccagtcagcattttatttttaaaaatggtgggacccacgtgtcataacccctcttcctctcatcctctcttccacattgtcagtgggcggcagcgtgcatagcgcgacgtggggaaggacaatgggcagtagtgcgcgggacgggctggccatcggcgcgcatggcagcgtgcatggaggtggaggggatgggggagggcaagcggaggtggatggggaaggcagtgggcacgcggtggcgctcgtggacgggcaggaggtcgtgcgcggtaaggtggagaggatgggggagggcggaggtcgatggggaaggggaggagatggaggtggaaggggaggggcggtgggcggcagtgcccgtggataggtgggcgggcgacgcggacggcggcacgccgggatgtggaggggatgggggagggagagggggagtggaggtggatggagaagggaagagatggaagtggaaggggatgtcggcgcacggcggcggccgtggcgggcgaggcaggggcatggccgcctgtccccgcgctgaccgcccccgtgcgctgctgcctgtccattgctcgttctagcgttgccgtgcacgccttttgcccaactgcccgagagagagatagagagagagagagaggggagggggagggaggaagaggggaagaggaggtacaggaccatgctgacgcccggtcggcctccatctccgttgccgaccgcccgatccgcctccaccgccggccaccaagctcctctccccatctctctcatccttctctcctcacggtgtggagaggccctcccttcgccggcggcaaggtgctggacgccgccgcctccagcatcctcctcagcgccgtcccgcgatgacgccggccgcccgagttctctccgcctccgcctccaccacccgccacctgagttctctctgcccccaccgttggtcgcccgagctctgcttccgctgccagccacccgagcgagcgagaaagagagagagagagagcagagggattgggtaggggagaggaatgacaggtgtgtccaagagtttttttaattctttttgttgactgaattgccacgttggtgccacgtgtgcaagctcaagtcgaaaacagctcaaaacagtgcttaggagggttatttgcccgatttgtacagtttgggggggggtggtgaaggatgcctggttttacggtttaaggtgggtaattcaatcgaccgtgatagttcggagggtaattcgtactttttctgtggaacctaggtgtgagctagagagaggcaagaggagtgggacccacttgttagagagagcatcacatcgaacctattctacattgtagagagaatacagctaacagttaatttacattttctttaaagtgaaaatcacctgatataaaatgttttggaccttcggcatcacatagagttgtacattgatctactggagattacatgcagcaaagagccggggcctttcttcaccgccacaccagtgacagcatggtgaggccatcttggccatcttggccgcgtgagtgttctgtgcgcgatctggttccaattttccttttttgggtcagtttagtgcatctgtccttttttcctgttttgggtgattcttggtggggtcacaattaacattcttgccccatgtgcatatgatacattattgagccaaggttgccaatttttggtccatgagacgtgtgatttgtttttctgttctgacaaaatcagtctaatttttcatgggcttggcccaattatcatacgggcctcacatccaacacatattgttttgtgttttgttttccttaattttattttaattcgtttcaaatgtatagaaaaaatttatatgtataaagtttctagtttatacatataaagtttatatgtataaattttcatgcatttaaagttctatgtatttttttcccaggttaatatgttaaatttatttcaatttatgcaacacgttaaattcgttccaaattgatacgtagaaagtttccatagttgttaaaaaaagggggcttgatggatcaggtcgaatcgagccgctccccatcacccttatacctccatcgatccatacaacaacaacatataatcaagattttcacgcaacaaaaatcacaaaaatgtcaaccggatatccatcaacattttcacatcatagaatcaagcattcatgaaaaaccaacttccctcatcccttctttatgaagttttggcaatctgttgctggcatctctggagtaggcgaaatgacttgatctttaatggtattcaagcaaactttggcaaatggaaggctgattttaaggatgagtttactctgcatacgcatagagtaaaggagacatacacatagagtaaaggagacaggaaaaccattgtagcaatcatggatttttttttgcggggcaatcatggattaataacatatactccctctgttttacaatataagtcattctagcattttccatattcatagtgatgttaatgaatctagacatatacatctatctagattcattaatatcaatatgaatgtggaaaatgttagaatgacttacattgtgaaacggaggaagtattaactagcttgcctttcagtcagtcttttcttctttctttcccttctattatattccccctgtacagtttcccttgtatattgcccttttattttaatatatttgtgtagtaggagcctctcctgctgttttaacagttaaaaaggatgtgtagtcgctcactgcagaggagaacttcgcttgctgccatcgctcactgggacatggaggttgcctctgctactgccccatgcgcgagagccatcgctgtcgtgggatccaccgccaccggatccacccgatccacccgtaggggtcgctgttggtgcattaggtggatccaagcgcgggagccactgccatggcatcctgtggatccgcccatagccactaccaacagattcacctgtgggagccaccatcgtcgcagccggcaaagctgcctataggagctgccaccgtcgaggaggaggattccatgatgccgtagcggcggagaggggttacgttggtggtggtggagagagagagaggagatggagggggtgggagagaggagagagggcaatgaagataaggatgagtggagagagaatataaacgttgcacacgtgggacgagggagatgctcgagctcagaggtttatttcttccaccccgcttagctcagctctatcttctcgacatgtgtcggtttaataaaaaccggcaccatgtaggtgctggtcaaattgagaaaacatgcaccagaaatatatgtgctactatttttttaataaattgacacttataaagtgttatatatgtggttttttaatttcggagtctctaaagggttaggaggatggggaaaagctcatttgtgccggttttagattaatcaacacctataggtgttctctattacgttttctatagtagtgttaatatgtctttaataaatatgtaaaacaatcgtcttttgatgtagtagtgttaatatgtatttaataaatatgtaaagcaaccgtctttgcaggacgaagagaaaataaatagggcatataaacagcgaagacagaccaaggcaaaagaaagtggggcctatccagccgcctatacctacctttaagagagaggaacgggttgaggaagaaacatatgataacattgaagtcactactaattacttatatatacaaaaatatatagaataaatacagctagcacttgatttatatatttttttttaaaaaaaggagaatcacttgatatacagcgtatgaaacctgtctcgctgcacagttgtacactctcctggagaatgcatgcagcagcaagatagctagggtcgctttccctatcttcagagatggatttttggacatcctctttgtttattagtacccgtctgaaaaaaaaaaaatccaatcctacgtactaacctagaaatatttgtgtgtccagatttattgctaagattaaattttttttacagagtagtacgtcccacctaaataatcaacaaaatattattttaaaaaattaagaaaaatagattaatataaaaatatcacatcacgaatataaaaatttaaattcgacataaaaacaacgaatgtaaatgtgaattgagattttagtttaatttattctttttgctatggtttataggagttgtatttgcccctgcatgtttgtaaagtaatcactactggtgaaacccttatctctccctttatatatttatcttatattagtctatcttatctttttataaattttctaataactattaatgtgatatggaagaaattaatggtgtccaaaaatgcatctctgaagataggggatacagctaggacaggtgtacactctcctggagaaagcaagcagaaagggtcgatcgctttcacaccacgcggctataaatatcactctatctgcagactgcagcaggcaacaacaaagcatcatcactgtcgctgtcatcaatcattgtcacttactacttttgtcttcgtctccaccaaagtctcctccctttcctcccccctctcgatttcttcctctcccaaatcgatttccaagccctagcactacactcactcacctaccccgagacatggctgagttgccgccggtgcagatcgtcgcagccaaggacgacgtcccgccgccgtacctgaccgacaacgtcgtccacaacctgctgctctgcctggcgccggagccggcatacctcgccgtggcgacggccgtgtccaccaagtggcggagcgtcgtccacagcgaggcctgcttcggccgccgcttccgcctggactacgacgggccgacgccgctgctcggcttcttctccaacaacgccgcggggccgttcttcaccgccaccggcgccggcgtggtgggcctggcgccgccggaggaggccgtctcggccggcgacggcagcgtgcagcacatctacgacgcgcgccacggccgcgtcctgatggacggccgggaggacaaggagctcctcgtctgggaccctctgtcccgccgcaaggacttcatccccatgccgcccggctacttcgtcggagagggctacggcggcggcgcgttgatctgcgaagccgaccacggcgccggcgacgactgccatgccgcgccgtaccgcgtcgtattcgtgtactgcggctcggatcggccccccaccaccatggctagcgtgtacagctccaggaccaacacctggggccccgtggccaccatggatgctcgcgtcactttcgagctcaagcaacccgctgtgctcgactataccgtctactggttggtaaatgggaggacccaaatcattgagttcgagttcgataccaacagcctagcactattcagaacaccggtggatctcccggacatcgtcgtcttccccatggaagacgggcggctaggctacactggtatgatgggcccaatcgtcagggttttcgccatcgaagatatctatgaagacggtgatgccacctggacaaaagttactactcttcatctagatgctatgcggccaagccagtcatatcagcaagttcttgattcggacacagactctgactccgatgatgaggaggaggttgtattattgttggcacatcagtttggtcccaaggcgaagaaggatagcaaaatcattccctcgcacccgccaactattaagagtgataacgacgaatataaccatgtcgtgatcaggccaagagttatcgggttcatagaggatcctaactcaatcttagttcgaaatgagctaggtgtattcatggttgatattgaatcaaacgaatacgagcagttatctcagaggatctacttcaccactgtctacccttacgagagcttctacaccacaggtataaatctgtcatatctattttctttaacaaaacaacaatattttagttttgcctaccgtttaattaaattacttataaacacatttaggaaaaaaagtccttcttattagaaaaaatcagtgttagtatacagatttatcttccacactgcggtttcttagcatttgggtttgctgtaaacttagtgcaacaataatatagctagctagctaggggcaaacattttgaaaaaaaagtttaagtctctatattatagggttagactcctaaaaatgtttcttttggataaagtaaatgcaaaatagtgtttttgctcgggcagcaagtgcaaatttatagagtgtattgcattattatactaaaaaatggctacccatctaattattttccatagaattctgttcatgagtattgccctcttcatgttgcccatattcttcatatgatgattagactatctcattaagtgtatagtgctccgtttattttgttttgttgaataaatttgcttgttctaattatttgaggtatggtgcagcatatgatatattattgatctgatctgtgttcaccaaattttgcatagtctttctgcatatatagttgctacagtaggacttcacaaactgcatatgtgtttcaatgcaaaggtacattagattttcctaaatataatacataattatttaaacaatttgttagctagtcatcaattccattttcctctgtgcattttatggttggccacatcagattatacatacaattaagttcatcaactaatgtatatttctattacaacgtcttaagttgagctgataagcaagacggaatataccttcgaactgaactgccaagtgcatcttgaaaattattcaaacacaaatttagtttattcaatagctttgttactcaagtgataactacgatagaatttgtgctctaatagtattctgaattcaacaaactgcagataattgatctgagttaattattattcaattctagaatagtatatattacaattgtatgagtaattaaagattgtgcatatatagttgtaacttgcaatatgcatgataaattagctgttcttttatacccttttgcatcttctaattatcatatatatttaaaatatgttgacatggaattttgttcatttacgatcatgtgcttatctacatctgaatatgatattgacaatgtatacatttcctgtactgagatatgttcatatcagaatcacatctaatgaccggcattttcctaaaaaacagttgcatttttcacagcccaacatatctttcttgtcaattgcatagatcttatatattcgatgttgttacgtacatacagttggcaaagcaaatttcaatgatccggtgctgattgatcatgagaacaacgatgaacaaggtttacaacagcttgaacccctcaatgatacaatacttccagatcaggagaacattggtaaagaagtttacgacttaaatccattataatttataagtaaacagtaagcttatatggcttaaacagtaaagttttgcctgttcttgttttcccacaggtggagggattagtgcttcaggtgatggagacgagcagtaaacaggtctttctgttacctcatcagttcaagtggtatgaattattgtttgctcacctgctatatagacattattctcttttttgatccaaattaagttttcatttatagatagctagttagcagtttttttttagataatggattatatcaaacccggcctctacaccttgtgagggtgtacacagccaaaaagctacaccttgtgagggcgtacacagccaaaaagctatagttagcagtttaaaaagaccgtatgttcttatgtatagtttctgaaactttgctatgtcatttatatatctacacatttgttctttgtagacgtactagcatacaactccattttctgaggatcttgcagttgtgctagcaagatttctacacattttcttatgttcattttactagagcgagagtagcaaaaaaaatatggatatatgcagacataatagttagcgctaggttcaaatgttacaaatcttgcaagagctggcagatagacttgaatttagtctgacgatgctttttttatgttgacctgctcattcttatattcttcaattcttttactttatttaattagttaccagttccccaattgaagatagacttaagaagtttctggcaaagaaatgacgttttcattagcgacaaaatatcatttcgctatgtcatatttttgtaaaaatatttacatcaagttatagattgagaaattatttttctggaacaacagtaaatgtgtggactttgggatcagtttatataattgataattgatgacaattatatatcttattaattattatacacaggcatcaagattgggcgtacattgaagatttcttggtcggcagctagctactataataatcaggctatcgcacattcagtcagattctcagatgtgctgtaaacttgttaatttaattaataaacccatgtcatgtgtttgttgtttacctgcattaattttcgtatgtgtacttgcccctgcaacaactggtgctgcgccgttcaaatcttcagctagtataagtttagacgacagcagggatatatgtgaaatcaatgttttgattcatgtttttgcgatgaaaaataattggcatgatcagttgattgtactggttttaatgatttgatgatttatccgcgaaatgtaaatttgctatctggatgggtctggaccggccgtggttggtcacaccggacaatatttgactgtgaatagggttatcgatttggatcaatccggtcagaccggacaatatttgtgtgttggggtattttgtctcttgacgaggccacattggagaaccatctttggtcggtcgaccaaattccacaatagtcctggttccattaaaaaccggaactaaaaacgatttttagtcctggttaaaaaatttgaaccaacccgggactaaagatgatttttagtcccggttcatcccctgtcagatgtatgtcagggggccgagaatctttagtcccggttaatactaccaaccaggactaaagattaccactttagtaaagatcaatttgatctttagtcccggttggtaagtattaaccaggactaaagattaccactttagtaaagatcaatttgatctttagttcaccaaccgggactaaagatggatctttagttccggttagagttatcaaccgagagtaaatatttctctcccacatctgatcggttaagtcccagacagatatttagataagattggatcatcccctctcttcctcttctcagatccaatccccttcctcctccccttcctcttctcctcctcccctctcgtccctcccatcagccggcccttcctcctcctcccctctactccctcttccattagccggccggcggcgggcggcggcggcgcggccgtgcggggtaggatggcggtggcggcacggccgcgcgcggggaggcggcggcggggaggcgggcggcgggcggctcggctgcgcgcgtggaggcgggcaggcgggcgggcaggcggccggcgggtggcggcggcgagcagcggccggctcgtgtcatgccccgaattagtaccgaccggaactagcccgcgacgcttcaaattaacctgttgatcgataccagtcccaggaaacagtgctggtatcacagggagacagaatatcacagcaacagccgtctctttattatagagtaggagtacagtcatgttgggctgcggacagatcccgagctcacaactgcattacaaaagggaaacagaagcaggacttggaccaaacaacacaggcgtgacttgggaactaggccgaaaccctaaaactcatcgtagccggcttgctcctagaagaactcctcatcagcaggatccgcttcatcttcttcagcaactgggggggggggattatttatatagagcaagggtgagtacgggagtactcagcaagccatgggaaataagtgtttaatgcaggcttcaaggaaaggctgttgtttttgcaattgattttagttgaactcttttctaaaaacaactaagtgagtgcttctcaaacgacacggatgagacagtacgtctcgtccggtcggagtatgtgcaatgtatcagtctttaaaatttaaaacaaggttggcacccggtcaacagcttttcaaacggccacccgggcctacaactttcaaacggccacccgggcctagctgatcccatcagctgcagatttttcaaacattgaacccctttccacaacagcaatttcacaagcagtagtcaaacaaactacgctaggaatcacctcacatccgcccatgaccgtgggcacggctgttcgaacagtttgttaacctctgcagagggggtacactttacccacacgacattactaacccggatcacccagcccgtggggatcagccacgtcgggagacctccaagctttcatgacaaggcatttccaaagccgatacaggtttaccatatgccgacaagaggggtcccagaccaggttaggtcccagaccatactgtgccaggaagcccaggggtcctccccgacaccaccccggcgaatccacatgtctctcgacatcaaggctcccctgataagctagttactcagccaggggtgtcccattccacccatgtggtcgtacttgtcttatgtttggatgaaattccaaggaatcggtccttaagtgcgagagcgggaaaaaccgtacacccggtacgttccccggtccgcggttttggaaattcatttagttcgcaagcgccgactcaggtgtcgggttttccaagtcttttgtaaaactccagttttacccaagttgttactcagattttaagtttgaaggtgaccgtcgatactcgcacagagtgcacgaatatcgaggcgcaactggatggttacaaggggacatggtatagcaattaacaatggaaggatcaaatgcaacaagttaggtaggtccgccaatctgccttgcagacgggacaacagattaagtgcgatcctatcaatgcataatattttgcaagcaacataattaaatttcaaatataggctcaagatgttcaaaggtggcttgccttgctcgagatctagagcttgatcctcgaaatcctcgcactgcgggtcttcgggctctgaaactacacgcgaaacggggcaactcaacaaacggcgaaaataaagccctattaatgacctctaagcgtgccattagatagatctcgagatttgaggaattttggaagttgaacggagtcaaacggatttatggttgggaagatattgaatttctaagattattggatttttggtctaaaggaaaaggatttaattaaatcctttttggaaaagaaaagaaaagaaaagaaaagaaaagagggatggaaattagacttttcctcgggcggctagggcgcggcccgagagagatggggcggtccggccgagctaaatgggccggccggcccaagacagcccaagcgcgcgcgcgggggaggggaggagagagtgggccggtggaccgggctcactgtgcgcggtcccgggtgggacccgcttgtcagcggctcagctcaccgtgcggagggagcacgcggcgcacgcgcgcgggcgggggagggacgcggtgcacgcgcgcggtctgcggaggaacggatgcggcgggcccacgcgcagcctcacggctcgcggtggaacgcgcgcatgggaggggctgaccggggtcggcccgtcccgacctcggctgagctggcgccgacgtggcgcctacgtggctgccacgtgggctggcgggaggtagacgacgacgccggccagaacggacggcggacaacagcggcgagcggcggagcggaccacggcgataccggcgaaaacgagcacaccgggtggttgcacgagacgaggggagacgagccaactgctcggattcgccggaggaagcttgacggcggcgaatcgcggcggcggcaaccggcggggagggaagagggaaatggcgacgaggtcacgaggggccgattcccggcggtgagagcacctacgcggccacgggaatccgatgctagcgtcggattgtgcggagctacgccgagcgaggctggcgacgagcgggtgctacggagctcgagcggcgacggcggcgagcacacggcgggcgacggcaacggtcggggcggcgccggctagctacggggaggctactcgtgctaccaccgaaaactaagggggggagatggagcgaggaggaagaacggagggaggcatcaccgaggtgaggaggggcgctgtgacgagaggccgacgatgcgggagtaatctctccggcctcgggccggggaagaggaatgagagggcgcggccgaagtccccttccgcgtccttgctcgtgccggctcctccgacacgcgcaacgacgaacggcgacggcgaaacagaggggcggcaatggcgcggaggtgaatgggagaggaaaggaaaaaggggggggggagctcgggtttataggatggcaatgtcggtttgggaaccgacttagggcggtcaaaggagagggctagcgctcggcggtcgtggccaaagcggcgacagggaggagggaggaggatgacgccggcgggagggaaaaaggggaaaagagggagagaaaagggggcttgtccccttgcctcttcgggaaaaggaggagggagcgggggcgtctcggcagagggaggagggaggctctgcctccgtcccttggaggctagcgcgggagtggcggggccgaggcgatgacgacggcgatgacggcggggcggtttggagcggcgcgacgtcacgggcgacaggcgcgggctggcgcggcagagggtgacggcggcggcgaccaggcggtcggccactcggcacgcgcgcgcgggaaacaacgggcggcgcggctgggcacgcgcgctggctcgcggggccgagcggctgcaggcgcggcagagcagcggggccgggcgacgcggacggcgcagacgacgcggctcgggcggggaaccacgcgggcgcgcgcgcgaacgacggcgtgcgggggccgtcttcgcgagcggggagctcgccagggagaggagaaggagagcgaggggaaggggcgctcggcgcggtgcttgcgcacgcgcgggcagagcgaggggaaagggagggggcgctcggcgcggcgctcgcgcacacgcgcgcgcggcgcgcgggcggggcggagcggagcggagggagagggggagagggagcgcgccgggggaggggagggggctagagagagagagagagagagagagggagagcgggagcgcgccgggggagaggagagggccgggggagaggggaagatgggccgagagaaattcggcccatcgaccccgggggaggcaaaatagacttttgcggaggaattgatttgggaagggtttggattcgggattgaactcgacgatagatcggggatttgagatctgagatggcacggacactagacaacaagcaaataaacaaatttcgcaattagggtttttagagataattttcccgctaggcgccacgacggaacgggcgctacagctcgtttgcttttttttttataatttgtgtttcactggatgtatattttttttagattttgtgattcattgcatcgcatggatttgagatgtataatcttgagatgtataatcttgtataatctatgatgtatttaatttatgtgtagtttttttaggatttgtgatgtatttgatctgtgtgtaggatttgtgatgtatttgatgcgtgtataagtaacttaatatttaggatgctgatttagggatgtgcatcccactcgatttgggagaaaatataaggattaactctagccattagcaaatcaacaatgaaaaaacaatgaaaaaaaagggcctcgagggactgccgctaccctattgggactaaagattccccctctttactctcggttggtgttaccaacccggactaaagatcgatctttagtcccggattcgtagtcccggttgaaaaaccgggactacaaagggttctgaactgggagtaaagagcatttctccaccagtgccagccggtctctggacaaagtattgatgtatatatcgtttatatatcgtagtaaagaactaaatgttcatgaagatatatatgtagtttctaaaaactatgctatgtcagtttatatatttcaaatttgtaatttgcagttgtgctagcataaaactccattttcagtgactagagggagagagtagtaaaaactctggatgcagacataaatacataataattagcccaagttcaaatgtaagaaatcttgcaagagctggcaaatagacctgaatataacttggtttgacgatgcagtttaatatattgtcttgtgccttgatcgtttttgttaatcaaaataaaccgagttgatgatagttatttatcttagttcacaggcatcaaagattgagagcaacttgaggatttttccgcgtggctagctagctactcatcaggctatctgattgaattaatcaaaataaattgatcaatcttccttgatctgtcctgcacgtcaggcagatgtgtttatatacactcgtttcgtatgtttggtgttgcactactagaaaaagtatttttacaggcggccaaaagtgattttcccaggcagggggaggactgcctgcagcccacaatcggggcagtggcccgcctacaaaaatccattgaacgagcaaaaaaaaaaaaattgcgggtgcgccttgccgccgccgcccacccctggcccgatctaggcggggaggggaggggagccgccaccccgcgccgtcttcgccgccgccgccgcagccgcagccgagccatcgtcgttgccgccccgcaccccaccgcccttcccaggcctccctctggccggatctgggaggggaggggaggggagtcgccgcgccgcaccgggagccgcatcgtcatcgccgtccacgccgccgccgccggtagaggttggggaggggagggggacggcccggccggtggaaagtgttgagggagagagagagagagagttgagtgagggaaatgagtggtggggagggggtggagaagataagacttagatctttttggggtagatacgattttcgcaggcgcggcttaagtggtccgcctacgaaaatgattttcacaggcgtcgcttaagtggttcgcaggcggacagcgaacttcaacctgatttatatttttgtaggcggtcaattggcttcaagggtcatgtccgcctgtgaaaatcagacctccacgtcgagaaaaatgtatttttctagtagtgttattcacctgcattttcgtatgtatgtacttagacgtttgaatttgatcagcttgtggcatacagttgaaaactgtttaactctgtaatagctcttttttaaggtttaaaagccggactctacatccaaacaaaccggatgtacgtaccaacacctctgcaataactatgatcattgataagctgctgaacagtttaaataatcttcagtatttatgtaagtttagtcgaaagcagggatagttggttcaagatcagacaaattaagttttagcttagcttatcacttaacggcgctaattaagcatcaaattaattaaatcaatctttgttccggctgtgtcttgttcccaactcgatgaatcaatttcataccgtaattgagagtgaaactaaaatcatctcagtcaaattttggcagagattaaaaatttctagaatgctcttctcacatgtaatgtaagacagtaagagcagtacgttgagaacttgagattgagatatagatagatagaaacgatgctgcgtcatcgcatgccatggcgcttgcaaccgcttgtcgtcgtcatcctcggccaggccgattgactgctagtgctttcggcgtcagaccgcgtgtcgtcctccctcgcgcacgcacgcaccttgccatggcgtcacggcatctctcaccttcttcctcggttcctcctctttatatctatcgatcagtgccgatcacttcacctaactcgatcgcttaatttccagcaaccaggaaccagcactcgtcggagttcttcgttctgacctgagcaagcccctgatcaccatggccgagagtgttgtctctgtcgatgctgtcgacggcgagcaggagcagcagcagcggctgcagcaggaggagttgcagctggctgacctgcccaacgacgccttgcggagcatcctgctccgccttccgtcggagccggggtacttggctgtcgccgccgccgtcaccaagaactggcgccggcaggtcctcggcagcaacggcagcttcctccgcgccttccgcgcggcgcacggcggagtgcctcccctccttggcttcttctgcaacaggagaaatctgccctgtccgttcttcaccagcacggtggatgccggcgtggtggatctgtccccaccggccgggaaacagcggccgttcatccacgacgtgcgccatggccgcgtgctactcgacgacggggaggacggccagctcctggtctgggaccctctcgcccgccgccgggatatcatccccacgcccagatgctacttcaccaacgatgacagctgcggcgctgccataatctgcggctgcgatggcctggaacacgtcgtcggcgccagcgtcggtggtggtgactgccatttggcgccgtaccgtgtcatcgttgcattcaatgaccggcccaactatcgttcggacgagtggaaccatgaatgcatctgcactagagtctggatctcggagaccaaagagtggagtgaggtatactccatgagaggaagttgcgactttgatttcatgccgagcgccctcgtcgccggtgccatccactggctggtgggggacaccaatagtgttcttcagttcaatctcattaccaaaaag

SEQ ID NO: 7320 - DNA, 5849 bp, Oryza sativa
gagggccgcgggagaggggaagatgggccgagagaaattcggcccatcgaccccgggggaggcaaaatagacttttgcggaggaatttgatttggaaagatttggattcggatttgaacttgacgatagatcggggattgagatcttgagatggcacggaccctagacgacaagcgaagaaacaaatttcgcaattagggtttttaagagataatttttccgctaggcgccacgacggaacgggcgctacacctgcagggagaagcaaccagtacggaggctgctagtaacctgatgggtagccccctcatgagcaatggattgtctaagttggaattgtcgtggtatggggaatgccgcgacaattcatgacctgctcgctttagttaaatagcataattcccatattgcttttctccgtgaaactaggcaaaagttggatcgtgtttgccgtctctgtagtagattcttaatggtagccttgccttgttttggcatgaacaaggaaatcaaagctattaatgaaagatatattaatgcgtatgtgcgagtgtcccctgttgcgcatttatggagattaacttgtgtctatggagaactaaggggttgtttggtttgctcccaaagtttgctaaaggttgccacacctcatgttaggcaagtttgaacaagttagcatattatttggttcatagccatacttatagcaagattccttctcatctattagggccccacatatcatcaactcactaaagtgtggcacaatccaattttgctagctaaggtgtggctcactttttgtaagccacaacttagacaagtgtgacataaaaagtacggtgaatggtggcaaacttagtatagcatccaaacaacccctaagaacagagaatctctatcgtatgtggacgcaattaagcttcatgatacttacttctgatgatctgatctaccgtggattgctaattggcgattttaatgaggctctttggcaggaagaacatttgtctgctacctccagacccgctgcacagatgcaagcctttcgtgatactctacaggtctatgagattggtaatcataacccagcaaggaaggtgcagaataaagtgggtggcaaatctataatggtgtatgggatgaataaatgatacggaatatatattttcttgcctgccgatgctgatgttgtattgaaaatttgtacgtcacacctcgacaggaaggggatttcgtcctagcctggcacccagagaaaagagttcggcatataaattagcggtgagtacaaagattatggattcgggacatggggaatccagtggcagtagagacaaatgttctgcatgctgttcaaaaaaaaaatgtttcactttatatggattaaatgttgcagtgacttgaaatatttgctgaaacattgtttttatataaggtaaaacagctctgatttaaacgattaaaatattttcgatctacctagtgaaacaattccgatatacttggtgaaacaacgtgcaacatttaaaaataatttaataataagctaaaaattttttcaccagaatatatccatgtgtggtcttgttttaaagatttaattacaacggatttaaaagtgcaatcggatcatgatttggataaataatttaagagaaaaaatagtttaaatagtttttgcatgtatgcatgcttgatgacattggatggctgatggcgtgcgcgtggatcggacagctcatggatgcgtccgatttttcgtctcgcgccgtacttccgacacgtagcgttctccagaatactttccatgcgctctgccagtgtcttcatgcatatgatcggtggaatgcaatgagggaggtctggatgcttcctgcacatgaggatgtgaagtatacctggaaggattgtctccttttaattcttgcgaacctatctgagctagagcaggcttgtactttaatattgttgtggcacatatggcatgtacaaaatgatatcactcatggtaagtccctgccagtgaaagaggcgtcgaagaacttcttgatgagctctatgaactccttaatgctgatagatacagcaacatccagccgctgacttgaagaatgggaagcaaaagtggtggacacaacttacatagatgggacgaagaatggacatattcagtcaacaagagcaaacaaatacaagacatatcgtattaacagttcaatcgcataacaggctcgatcattgtttgcggagtgcttgcgttgtgaagagatggactaatctgttggatgattacacattgttatacctaatttttatggcctatgaccagagttaaacctatcggtttagccgatttgatagggcctcaccgaaatgccgaaatttcggtccgaaattttgaacaattaaaatttagttgaatttgaacaaatattatcaaaattcatgaaaaaattaaaaaattttggccgaagtaatatcgtatcggaggggactggaatttccaaccctgcctatgactactataagggagtagggggtcttggggatgtggagtgacacggatcgtagctgggtcaatcgacccactgcttaatgggtagatccgtccttggaagcaagtaattgatcaatcgagcatgcgccggaagttagctcctagtcacagacctaaatctgatttggagttgcactagaaccaacctatgaatgggtgggtaaagctgaacgtggatagctccttcagtccttggaatcgtcgtccgtgactgtagcggcaatgttatcttcatctcgcgcaaagccatcacccactgttttgatgcccttgaggtggaattgatggcatgttgggatgggttgtcgttaacgctacagtggaccttgttcccaattatagtggaatcggactgcgatgtagcaataagatccttgttaattagccaaggaagatgattactccaggtgggcattcttgatctgggatacaacatatttagtctctgaaaagagggccattaaattccagaagattagccgcaattagaatagaattagtcatgaattagcacagctctagggagattaggggtgcaatcaggcctaattgttaggccatgaaagcacttgtgtctcccagctcatccatgaggattgtactaattcctatcctgattaatgatatcctcttttccccgctaaacaaaagaaactgtctatagaaactaggaaggcatgtatatatattcaggagcttgtccagctaggaatacacatatactatacgaccatttttcgctgttacctatcttactgttagggttataaataccatatacctaatagtaatcgattaaacttggcggtgcccaccacatatcaagtcttatacagaatcatacctcgcatatagatggagttccggataagaaaggaaaagtagagttctatatggaaacgataaggactactcggattgtagccacattggtcttcctagttctacttggacaaggggcacctatgggtataaatacaagcccccctaggaggagaggggacaagccaacacacgccagatctcgacataagagattagcctagacataccccatccgatgcctacagaggttggcaagagggatctagcgccatctctgatctcgacgaattcatattcaaggaggaagactaccttgtcgtcgactacgagttggttatctatgctgccaagtcgacaacagttagatagctaggttaccctaattattgtactcgtgtgattcagatgaataaaaacaacaccggcttcggccaacaggatgtagggctattgcctgtcagataaggggcccgtatgtctccgtctctttaacctcaatctcgcatataccctggtaccgatgatccctataccatccaaataccgtagtcgcgatctcgaatgtcaaacagttagaatgatataaacagacaggaactggattagaagtgaagaaacagatgcccttacgttttctaaacgaacaaagaaaaaaacgagctgatttcatggtttgggcatttaacttgtgactggtatattgcaatcaagcagttcctagcaaaacctcctgttgctaatcgctatagatagcccaagattgacaccgaaggtacaaaacagtgttgaccaacaatttcatgtcatttgcctgcttaattttcactccttccaccaaaaaagaccaaagcaatgtcaagagctgagcagttgctcattgtgcttccccatcaaatgacttctgccaaaccgactgaataagcatgagcttcaagagaggatccaccagggccaccaaggctattcatacatcgcatttatcatggttatctgcaagaaggtatagtcagcttacagcaaataaaggccatctattcctcaaataatttctttcaaagatggaaatattcaacttaggggctttagattaacagaaaaataattaataagaccatcagaacaatctcaaacatcaaaatttgtattctttagcttcagatcgactaccaacttcccctgtaagcattcagaatggattaccatacccaaaaaaaacaacctccatagtccataaaggaaatgacaacagaaaacacatccatgggctacaacaaaaatgtgtttagcctgacataaattggttttggtgcactaacctggtcacaaactgggcaagtttcactccgctccatccactcaagtatgcagcaaagatgaaaatgatgctcacatttagtcatagagcggggattttcttcatcatattctggtgaataacgaaaaactgttattacaggaattcaattgagattgaagtgataatcggtgtattagaggatcatcacagcacatgtacatcagaaaaggaagcaaacaatttatagaagaactcataaaatgttccactatttcggattctctatctacaaaccagtcaagtgttcaagccatcgttagtgtcgataatcagtttatatgattacagactgctgcgtattgcgtgtaatgcacgaaaacaacaatcataggcccatagcactgccagttagacagttacatatttggcagactctaggcattcttttcagggatttatcattatttcctaaccatttgtcatcacacccaactgaatgcatcttatataagattatgttctcactaaagtgaactgacctattaagcaaacaacagtgggaaataagagcagtaaagcatgcgtataccaaccaagtaaacatagtttaattaagatcctttcaaattgaaagtaaattatcctatgctcaagagaaacagaaccttcaagacagattgggcaaacatcctcctcatcaggcttatcttcagagacacatttttgcaatgactcattatcatccatcattaaggactccttatgttcatgaattttcctcttgatgcctgtcttctccaaatctacataagaatgtggaactctaagcattgatccataacatggagatcattaagcattgctcattctcagagataatcaatttttaccagggttatctttcaacactagaccaacatcataaggcaaaggtgtaggtggtgctcggtaagtgtcaggagtggatgtatccagatttttgtctattgcaacaattgtagaggccggattttgttgatgctgacaacacaaggtgaagaatatcagtatccttgagctaacttacatgacaagccaaggatttacagtagaaaggctgacgagtaaaagaagccatccccatgtcaacatactaataaaccgtaattctttaaaaatgtatgcaat

SEQ ID NO: 7321 - DNA, 8775 bp, Oryza sativa
aatctgaacaggccccaaatctctcagccacctcctccaccacacattccctttcattctttcttctctcctcaaagtctctctcttctcaaagcctctacacaggagagttgcaagccatggcgaggcatcgtctccgatggccgcacggcggcttcgacaatggagcaaggtgacgcgtgataggaaagaggtgctcgacctcgccggaggccacatggcgacggcagggcaaggcggtgcgtggtagggaggaggcaatggacctcgtcagcggccacacggcgggatatacagcgcagtattgaggaggaggtgctggacctcgctggtagccacacggcggtggggtgtagacaacgtaggattgggcaggaggcgctgaacctcaccggcggccacacagcagcggcaacaatgtggcagaggtgctagatttggctgttggtgagaactggacagcgcggctggtcttaggtgaggtcgcccacctcgtgccgctattcttctcccaaaagcatcagttacttggttctagcagctatgggtagaagaagaagacgaatgtgggttcattgcattggagttttagtgatgttttagcatattgtttcattttgttgcactttattgtattaaggtgtttcattttgttttgattcagtgttgcattttactgattctttgtgttgcaaccagcctatttcaaattttgcatttgattgaaacaattttgttcaagtaatgaaacatttttcctcggtcgatgaaacatctgaaacatttttcatcgagtggtgcaacatgtgaaacactttgtgataatacagtgcaacaccatctgatcttttgcaatagatcggacgtctgatttgtagcagcctccgtacacatcgcttaagaaattgcccggttaatcctaccataagtgtgttcagcaaaaaaaaagatgtccattattagcataactaggaaaatggcccgcgcattcgcgcgggcatgtgtcgtaggctatgttaatttgaacatatgctatatacaatttctccataaattgtttccatcagcattgcttttataattttctaacctagctattagttagctttatagcaaataatatttaattaatccctacaagtaattatttataatcttcttcatcatctaaaaaaaaagaaggtagacttattttatgttagaaacatgtataccaaattaagtgtcatgtcaaaagtaaggtgttttttaattgaatataggttatcattgtttattgacggatgaattgatgtgatatgaggctcccctaaatgcatgtgtttatatagtctaatataattatgtagtttaagagacaatccatatgcgaatgttctgtgtagaatatgtgggaggctccaggcaacctagcgtgaatacagttggatgaagaaatatagttgcactatatatttttatatatttttttttgaacgtgatgcatcatgaatacacacttgtttttttaagatgagatagatgtaacggatgaaaataatgggttcatcggtttaaaaggcctaggagtatatgcggggtaatataaggcgcctttatactaaaaagcaaccatctaatcgacttaaataaagtttaggacactttggcagaagatcgtttggcttgtttgcattatttgagcatattaattgcaaaaaatatcatgaattaatcagattcttttatctaagtaaaagcaccaatttttagacaattagacttgagtagttatatttcttatataatgtatatctaatttaactctatttgcaaaacaatgcacatacaatcagtgtttgttgaattttttattcttttatggcaatttgggtgattatccctatgaattgttttctatgtagtcgcttgaaatattcatgtttcagctattttttgcgaactgaatgtctaatttagtcatgtagggttgcaaaataatatatgatggtgcaacttatgttgttgagttatttcatagtttttaatggaaatttgaataacatgtaaaaaggaagtgatgttgtgcatcattaaaaaggattgatgtataattacgaaatatatgttgttaatgttttttttatattccatcgctatttggataacctgcaaagtgcacggtagaatgtgaccaaatgtcatatttttatataacaaaatataggcacatggatcttgaattgtgctttaattataaataaagcaacaattatattagaaaattatatgcatagcttaaaactatggtattttcaatatttgtttatctctttattgtagtatctgaaaatagggaggaaattggagaggaccaatagctagagatgggttggcagtgtaatagtgttgtgcatatatgattggatagggtggtggaggggacattgtttttctaatgtttctaaataatgtaggtgagaatttgttgttttctcattctaaagatctttaagagatgatatatatgtggaggcttaagattgttgtatagagaaagaagatctaatagttaaaaataatgggtcattgatttaagtgaaaaccgacagatagatgtttttttcgttgaattctattttttctaacttttaaaatgtgatacattatgacttaatagcgctatagagcacgctaagttgatttttattatgtaaaacgattctaagactacataatatataatttcactttttttttaatgttttgttgttagtgggtgaggagattttgttttttatagaggtagatttaatgagttcgtcggttttaattatctatatgtgtcaatccaattgttaaattataggtcaccaatttaattgaaaattgttggtttaatatttcttctttataataacttttagaattaaaattgttagttaggaaataggaaggtgagagaaaggattaattattggagacagaggaagtgtacgaacgtatgtgcgtagagtggtgggaagggtgggccagtggtgagaggatagttgtgccggtggaagagaagagaggaatgtgggttgtattttttgtttttgaaaaaataaaatctaatagttaaaaatagaggtccaccgatttactataataccacgtggtagtttaggagtgttcataggtgtatcacgtgatagtatagtgcctttgtaggttaatggacttttactatagttttttttaaaatggtaattaggacaacatacaaagggtagaagtctagtccctagaaattattcctttacgtagaaatttacttacgtaaatttaccatggttgaatctatagttttttttaaagacaccatcgatctaattttgatgggtccgcaaatttgttgattatttaggatgcttgttgtttagcgagtaaaagaaaatagtgcacacctgcatttgttgaagacctaatgctaatttcattaatccctagctgattacaggttagcctatttggataaccaaattaggctgagttctttacctcacattcctaactttatctctattaaatggtgtcacaatcctaactcatctctattaaatcgtgtgtttttttaaaaaaaatctatataaaaattgctttaaaaatatcatattagtactttttcaaaaaaataactaataattaattaatcatgtgctaatgtacacgtcgttttacgtgccggatagacggggtttccaacccctccttctgaacacagcctaaagcaagcagcacgcatgttgaaagcctagctatttaatgttttgatttgtcggcacatcgttgtggtgttatcgtattactctaagtttctgtatgacagtacgaggttgtaagctagtacatgctccctctctactcataaaagaatagattttcaggatagtatttaagtcaaaccttaaaaatataaattatgaataactctcaagttgttgttgagtttgaaaatgtaaaaattatatgaatagatttgttttgaaaaataatttcataaaaatatacatatatcacttttcaataaatatttttatagaaacaagaagtcaaagttgtgttttggagatcatgtcgctatctaaaataacttccttttataaatatggaggaagtacagagaggggaagtaccaacacagagacagagaggagaaacgcacatgtgtgtatgtgcggcaggaggatacatacgtgtgcctttgttttgtttggaaatatattaatttggtccaatatccggagaagtagaggaagagtgtacgtatttaattaggtgggccagtgtggaagagaaaaataaggaggatcgtggagtctctttttttaagataaatctaatattaaaaatagtgggtttaccgatttattagattgacacttgtcagtttaagagcgtttgtaggaagccacgtggtggcttgagagcatttttaggaagtttaatagaactttagtagataatagatagatcttccgtggtcatttcgaccttggcgctttccgaacattgccataggcaaaagctaattccaagactttttttttaataatgcactatgaaaaaaacacgtgtgttgcaacatggaaaaaaatgaattatgttgtatgtactattaaatttgtaatcaaactaatttttctttggtaggtttaataataattttttatataattaggagattaattaaggtggggctgctaagtactttgaacttaggtattaaatttgtacattcctggacattcagatagagactgctcaaacaagataaaaggtgatgataggcccttcagattttcagaagagctccactgctcgccactacgtcagtttgaaaggtggatcaagaacagcatcttttatcccacgagtacaaaaagatgtggtgatgtaggtgggggataacaatcaaacacagcgagaagatcatccacacataagcgatatgatccctgcacttcgggaactaggatcctaactggaatccgttggtggctcgtcaggtggggatgaagtaatcatgtcacaccgtaaacgctcaacttgcctaacaggagaggtgcatttggaagtgcagaatccttagaaggccatagtactgtttgagggggtgactgaaggcaaatgttcaaacagtagcagtgcgtcgtgaaaatttgaggagcctcgtatgccacctgtgcaggagaacgcccaagaacaatactccacagtgcagacacatgattcacagtgcagattgtttttaagtggagccctccagtctttattcccttttacttttcatctatcctctctctcctctagtcctctattcgttcccaccgtcagaagagatatgactcaagcagcgacgcctgggcggcccaagcagcgagcagcagtgcggtcgtcctcgcgcggagccgggcggagcgccggcgcgagcgagctcgtcctcgtgcggagccggatggagcgcctttcgcggagccaggcggagtgacggcacggttggcgagccctggccggcgtagatcgaggggcagcgcccggccggcgcagatcggagggcggcatggccggtgccgccgctcctctttccccgtcggccccgccctcacctcctcctcctcctcctcgctcctctcccctttctcctctggcacgtgtgggtcccgccacctgagacgaggaactcgtagccaaaacttgctccgcgttcttgaggaggccgcgcggatggacgacatggcaacgaatattcggttttggggaggaaggctgaacaccacatcggcgcactgtaaacgctcttagaggtttgaaaagaataggacttatgtgccctgctgtcacgccccgaactagtcctgaccagaactagcccgtgacgctccaaattaagctgttaatcgataccagtcccaggaaatagtgctggtatcacaggaagacagaatatcacagcaacagcggtctctttattatagagtagaggtacagtcatgttgggctgcggatagatcccgagctcacaactgcattacaaaagggaaacggaagccaggacttggaccaatcaacacaggcgcgacttgggaactaggccgaaaccctaaaactcatcgtagctggcttgctcctggaagaactcctcatcaacaggatccgcttcatcttcttcagcaactgaggggggggatatttatatagagcaagggtgagtacgggagtactcagcaagccatgggaattaagtgtttaatgtaggcttcaaggaaaggctgttgtttttacaattgattttatttgaacacctttctgaaaacaactaagtgagtgcttctcaaacgacacggttgagacagtgcgtctcgtccggtcggagtttgtgcaatgtatcagtctttagaattgatcaagattggcacccggccaacaactttcaaacggccacccgggccaacaactttcaaacggccacccgggcctagctgatcccgtcagctgctgatttttcaaacatcgaacccctttccacaacagcaatttcacaagcagtagtcaaacaaaactacgctaggaatcacctcacatccgcccatgaccgtgggcacggctgttcgaacagtttgttaacctctgcagagggggtacactttacccacacgacattactaacccggatcacccagcccgtggggatcagccacgtcgggagacctccaagctttcatgacaaggcatttccaaagccgacacaggtttaccatatgccgacgagaggggtcccagaccaacaacaggttaggtcccagaccatactgtgccaggaagcccaggggtcctccccgacaccaccccggcgaatccacatgtctctcggcatcaaggctcccctgataagctagttactcagccaggggtgtcccattccacccatgtggtcgtacttgacttatgtttggatgaaattccaaggaatcggtccttaagtgcgagagcggggaaaccgtacacccggtacgttccccggtccgcggttttggaaattcatttagttcgcaagcaccgacccaggtgtcgggttttccaagtcttttgtaaaacccaagttttacccaagttgtttttcagattttaagtttgaaggcgtccgtcgatactcgcacagggtgcacgaatatcgagacgcatctggatggttacaaggggacatgatataacaattaacaaagggaggatcaatgcaacaaattaggtaggtccaccaaactgccttgcagacgggacaacagattaagtgcgatcctatcagtgcataatatttttcaagcaacataattaaatttcaaatataggctcaagatgttcaaaggtggcttgccttgctcgagatctggagcttgatcctcgaaatcctcgcacaacgggtcttcgggctccggaactacacgcgaaacgggacaactcaacaaacggcgaaaaaaaaataaagccctattaatgacctctaagcgtgccattagatagatctcgagatttgaggaattttggaagttgaacggagtcaaacggatttacggttgggaagatattgaatttctaagattattggatttttggtctaaaggaaaaggatttaattaaatcctttttggaaaagaaaagaaaagaaaagaaaagagggagggaaaatagacttttctcgggcggctagggcgcggcccaagagaattggggcggtctggccgagctaaatgggccggccggcccaagacggtcgcgcgcgcgggagggaggagagagagccggtggaccgggctcaccgtccgcggttccgggtgggacccgcttgtcagcggctcggctcaccgagcggagggagtacgtggcgcacgcgcgcgggcgggggaggaacgcggtgcatgtgcacggtctgtggaggaacggatgcggcgggcccacgcgcagcctcacggctcgcggtggaacgcgcgcacgggaggggctgaccggggtcggcccgtcccgacctcggctgagctggcgccgacgtggcgcctacgtggctgccacgtgggctggcgggaggtagacgacgacaccggccggaacggacggcggacaacagcggcgagcggcggagcgaaccacggcgataccggcgaaaatgagcacaccgggtggttgcacgagacgaggggagacgagccaacggctcggattcgccggaggaagcttgacggcggcgaatcgcggcggcggcaaccggcggggagggaagagggaaacggcgacgaggtcacgagcggccgattcccggcggtgagagcatctacgcggctacgggaatccgatgttagcgtcggattgggcggagctacgccgagcgaggctggcgacgagcgggtgctacggagctcgagcggcgatggcggcgagcacactgtgggggcggcgccggctagctacggggaggctactcgtgctaccaccgaaaactaagggggggagatggagcgaggaggaagaacggagagaggcactaccgtgcgggtcggggcgctgtgacgagaggccgacggcgcgggagtaatctctccggcctcgggccggggaagaggaaggagagggcgcggccgaagtccccttccgcgtccttgctcgtgccggctcctccgacacgcgcaacgacgaacggcgatggcgaaacagaggggcggcaatggcgcggaggtgaatgggagaggaaaggaaaaaagg

SEQ ID NO: 7322 - DNA, 989 bp, Oryza sativa
aagagatttaaaaaaaaaggtatttgaatctataggaaataggaagggatgtattcaggagcttgtccaactagaagtattatacaaatgaagcctagactgagagactacgaccaatttttctttttcacctatgttatgtatgatatacacagacactaactggattagaagtgaagtaacattcgtcctaagtttaaacaaaaaaagagctgatttttaatgtttggactttgaaccgaatgactgaatgatcatgtgaccggtatgtatatcgcatccaagcattttcctaatcctcctgttgctacttgctataaattagccaaagattggcaacaaaggtacaaaacagtgttggccagaacatttcatgtcatttgtctccttaatttcactccttccaccaaaaaagaccaaaccaatgtcgagagcagagcagttgctcattgtgcttccccatcaaatgacttctgccaaaccgactgaataagcatgagcttcaagagaggatccaccagggccaccaaggctattcatacatcgcatttatcatggttatctgcaagaaggtatagtcagcttacagcaaataaaggccatctattcctcaaataatttctttcaaagatggaaatattcaacttaggggctttagattaacagaaaaataattaataagaccatcagaacaatctcaaacatcaaaatttgtattctttagcttcagatcgactaccaacttcccctgtaagcattcagaatggattaccatacccaaaaaaaacaacctccatagtccataaaggaaatgacaacagaaaacacatccatgggctacaacaaaaatgtgtttagcctgacataaattggttttggtgcactaacctggtcacaaactgggcaagtttcactccgctccatccactcaagtatgcagcaaagatgaaaatgatgctcacatttagtcatagagcggggattttctt

SEQ ID NO: 7323 - DNA, 13102 bp, Oryza sativa
ctaccaccctcagccagcataatctgcagactccaattcggagccggaaaatacataagatctgggccagaaaccacattcacagccaagctcttggcatccatgttgaactcaaggatgcagttctccacgagcagccagtagagaacattcccaacaagaacaggaggcttcatgtcaatggcagaaatcttttcccccgagatggattcatcaagatgtctaagccctaatcccaaatccaaatcgtgggggatcaccgtcctcccacagaccacctcgccccattcgccggaaagcgaggagtagacgcaggcgcaggggcggcggcgctggtcgatgaaggcgaagaccacgcggaatggggtggggcggtggcactcgccagcgtcgcagagcaaggcggcgccgcggagcaaggctcgccggagagtgggtcccagaccatgaggaggcggcacaccgagaacggcgaggcgaggagcgcgcgcccgccgcggcagccgaggaagagccagcggccggggtggcggcggagggagaaggcctcggcggggacgcggtcgggggctcgcccggtggggacgaagcaggggacgttgaaggagttgtggaagaagccgaggaggggagctcggcggcggcgggcgtgggagtggaagcggcggtggaaggccgggtcggagacgaggcggcgccagcgcttgcagaccagggagaggcaggggagggaggaggggtcaggcgggaggatgtggaggatctcggccagtacgtcgtcggggaggatggacaccggcgatggctcgtcgccggcgtcgccgaggcggcggcggcggaatgggcttggcaccggcggcgggtccatgacaaacagttgtggactcgaatgggaagttctcttctttaggccgggtttagtccaaaataattctttaaactttcaatttttccatcacatctcaatttttctacacacataaactttcaacttttcaatttcaaacaaactttcaatttaatagaaaatgagtagaaaacgaaattagcttgagcaagtttggattccgccaaaattaaaggatcggagaaggctactgcttgtctgcttgagcgcgcgctcacgacggggacagttaaccaaggttgtcattatctgattcgtatagtagggtttgtttgggacggataatctggtaaaagctcgtggcttttagtttatcttatggtttttataacagaatctgaaaaaaaaaaatttagggagagcttataattgtgagagaagcggtagctacctgccttcactaaacaaacccgctgccagtcttcactaaacagacccttagtattttacgataataatatcctatcaagctgaaacataccgatcttacataatattctaacttttatagtatcccaatctccacacaattctataaaattttaggtagtatctcgatgttagattcctacaatcctataaaatattatttaaaataaggtgattgaaaatagtgtaaaaaatatgctcaaattcacataaaaaccgattaaatttatcaaaaccaatattatattatttaatttatacaacatattatatattttatataaaatatgtatttttaaaaatctgatagtatcttgaatcccgatcctatggtagtatctcgatcctatgatactacaaaggagaaagtccaaataccccccacctcaaaaaaaatttaataaaattggatggaagtccgtttagcattctgaactttgaaaccagatattgaaccccttaaattttacaataccgtttatataacccgctaagatggtttcgcatagtagtttttatctaatttgtatataagtttgatgagtttgatcacataacatacatattggacatatatattaaaattccgatctaaatctttctttttactccttgttagctaccatttacaaacaagtactaacataataattgtatggcataactatataaggataaatttgtgatttagaactgatgatatgcaaatatgttagattagttattcaaagttattcatttaagctttcaaaatatgcaaaccaccatccaaaaccatcttagggtaatatggatggtatggtaaagttcagggagttggatgtccagttttaatgtttttaatgtttagggtgctaaacggacttccattcaatgtttaggcgactatttggacttcttcctactacaaataacaaaacggtcttatataatatctcgatactgattaccttgcatttaaatgttcgctccgtccatacaaaacaaatataattacatgatatggcacaccttatgtgaagcctcacacttttaacactggagataaaaagtgccgaacttagattattatttaacaaactattattttgccaaataataactacactggagataaaagtcaggcaagtctctcttatgatcatgtttgtcgacgtttgatgtcgcaattccggtatttgcatagtatgggaatcgttggtactaggatatacgcgagattgaggtaaaagagatggagacaggatttttatacaggttcaggcccctgaattgtcaggtaataaccctacatcctgttgcccgaagccgatattactcttattcaccataatcaaaacagtataatatttggggtagcctatctaactgttgtcgatacggcggtctgaaggtctgactcgtagtcgacaacagggtagtcttcctcctcgagtccgtgcccgacgagatcagagatagcgctttcgtctctcttgacagtatccggagacaccgtaggggactagccgtgcttatccccgaagtcaatatccgacgtcttgtcttagcgtatgttggcttgtatgttgtgacttctgttgttccttgtatgttgattgtctcttctatggtgggtgtcttatatttatacccataggtgtccccttgtccaagtagaactatagaaaccaatatgaatacaatccaagtagtccttgtcgtttccatgtagaactctggttgtctttccttatccggaactccctccatatccgaagtcagttcccgtataagacatggtatgtggtgggtcctaccaagatttagtcaactactattaggtatgtggtatccataatcctgacaatgttgatagatgataattctatttcaacttaaaaacctatttcataaaaatatttctcctagtattgcatcaaaatatattttctagaatataataatatgaactatgatgatatgattgacaaaccgatgatgatagagatcattgggatactagtatggtgggtagggggagctcagggatatgatgattgatgatgatggccggtcagggctctccctacatacggtgtataaatataaggactaatcatcccctcactcgtatcagagaaccatatgtaccgtgtcgaccatagatccattttaagacgggctggacctagtaccttatcaagtttattatactctacatgggtacgtagtagtaggatgggagatgatataaacctcatgaatgccgatgatgtgcattctaggtgcatatagtagcgcggtggtatggagagctgataggctcaacacaaacatggagtgtaataaattgaagtaggggaaaagttctgtactcttagcatggtgccgcatctagtgaagtgagacagtcaaacatgttaagagtatctatgggtacaatgatacaagcctgcgcgatgcataaattgtgattcacgcctgtctcttggattggagcctaccgggagttgctacaaactctattcaatgttacgagtatactctagcttttatacgcttccttccgaaaactcttttacaaaacagaaatatactttacttttgatgacgatgaaggtgatgatgttacaaaagtatagtgttatagtatatagatttaggggctgctcagattgatgccattttcaatcatactatttttttttggcaaagttgcaaaaaaatgtctacatttggtttgttgcaaaatttgatatatacataagaaattctaccaaaattttggcaatattgccaaaatttggtaaggtttattttggctacaatctgaacagatcttatatattattattcatgcatatacattttgctttcaatgacttgctgagtacgaaagtgctcacccttgttgtataacccctttgtacaggtttgattccttgcaagtgtaagatggattagcgatggcctttaggactctcagggacgaattaaaaggtagttgtaactcactactagaaaaaagatttttcatagcgttacattatcattttcgctgacggtcatacacgaaaaccatcggcaaaaacataacgaggggtgggggggctacggaccgctagcgattttcgctagcggccgagttaagcggaccgccagcgaagatgtgctattttccctggcagtccactttggtaaagagcaccgctgcaaaaaatccaccgcccaccaatatttttcacgcttctccgcctctctccctcctctcaacgcctcgctaggcgggggtccaggggcagtgactcgcgaggcggggtgtccggcggcggcgactcgcgaggcagtggatccggcagcgccatgcctcgccgtcgccggatccgccgtcggcacgccttgttgccgccatatctcgtactaagtttagtttatagggacaatgggagtacacaaataaattattccatggtcaatactcctcaatatggtttgaggaggtactagggtccacttaaacactacagaaaaaaagtgtgaattaagagttgatggtaagtgttttttattactcactccgtttcaggttacaagacgttttaactttggtcaaaatcaaactacttcaaatttgattaagtttatgcacaattatggtaatatatataataccaaattagtttcattaaatcaacaattgaatatattttcataataaatttgtgttgagttgaaaatattttttttcctataaacttggtcaaacttgaagcagtttaactttgaccaaaatcaaaacgtcttataacctgaacgggagtataagcgtttcattatgtctccgtttagaaaaggtcaagcggttaccattggtattgtcttgcaaagagctttgccgtctaattctccgaaaaggattaatgcatcactggttatccaaaagctgattataagccataatagcttattagcagaaaaaaaaagtaatctacgtgtaaaactcttgtatatgtatttttagcgacttaaaatctaatgccaaaaaacaatgttgaaaatattttaaaatcaacttcaaaactaaattttggttttcacttattctttttagtaatcgatggggctgttagtcgaaatctactatgtaggtactatgttctatattcttattatgtatctccattctccactcgatgtggccgggaggcgcccccaacagatttgccccatgctggaaaatagataaaccacatctactcataggaacacgctctttgttcctaccatcacgattgtgcctagtgtcaacatcagcaaaataccttgagcaagcagtcaagcactcatttgcgacatatgcctctgcaatggagccctcaggccttgccatcttcctcacaaagcgtttcaaggtcaacaacctacgctctacagggtacatccatccatattgaactggaactcttaggattgcatcatcaattaaatgaatgcacaagtgcaccatcacatcaaaaaaggcaggcgggaaaatcttctcaagcttgcacaatattattgggatttcacctctcaaaggaaaatgccttagaaccttttctggaatctgccttcggctatctgcatccctccatcttgaagcaccacatattgggcatgcatccattttagccaactcctttcggaaaagaacacagttattcggacacacatgtattgactcatatccaagtcctaatgcacgaataaaattcttcgcttcagcataggatgcagggagagaacaatttggaaatgctgaacttaaaaggtccaaaaaagcactgaatgcaacattgctgattctgtaaaatgacttgatgtggagcaacttcaccacaaaagaaaacctagtatagggaccaccggggtgtagcacctgtttcatctcttctaatatggtggcaaactttgacttcgttcttggtccatgattttgatctgggtacagatcctgtaccatacggtacatttgatcatcttctgggtcatcctgaggctcattcgtctcaaattcaacattgcagctaacatcttcattcaaatgctcaacattttcagtgaccatgaccaatggttctccatgatgtatccaccgagtgtatgtgttagacatcccgtacataagtaagtcatcctccacacgtcctttatattgatgtaaccattcaaacacttacgacatgggcataatatcttctgactgccactcaaatttttagaaacaaagtccatgaactcggtgaccccctccggatgctccttgctaaacaacttacaattcatccaagttctttccatctgttacatattgaaataagacaagcatcgaatcaatgactgattattgcccagactactattttcctatttctatcacttcaagtctgtggtttcagttcaaaatttaaaaccaaaacataagttcttctcatatgtacctttcttcctaattgaaggggatggggcagtctctggtcgacctcacccgccgtctgaagtgatcccaggctagagctcttgggggcttcctagcggttgagcccgtgaagcccggcggccaggatctgcagccagccggcccagccgtcgagatcctagaggcgggggcgggctactgtcgtcggcgtcgggctcttgggggcgttcccagcagttgtgcccatgaagcccggcgtcctggagctgcagcaagctggcatcgagctcctggggacggggtggggcttgggatccagccggcggtgccgggctccagcagccgcgttgggcgaagggcgacagcgtcgagctccaacagccgggcgctacgttggggacagggtggggctacagcctgcgtcgtcgggctccagcaggagcaatgggaaagggcggcggcgtcgggtccatctggcgcgatggggaaagggcggtggcggcggcgtcgggtccagcagccgcgatggggaaagggcagcggcgtcggtccttgccagatgtgcgttgggattcttatgtctcccagcaatagtgtacaagatgaaaagaatcaaagattacatagcatcggaagagtagctcagtggtttgtttcattgtttgtacttgggaagccagaggacgtgggttcgattcctcctcattgcaagaagtgctacaatttttattcttttcaagttaatattacattttttattcttttcaagttaatattctaaggtcccacatgtccacctagacatgctcacgtggctgtgccaaggtgttccttttttttaaaaaaaaaatgatttttaaattatgacaatcatattcattcgcttttgtcatgaactattgtcacaaagaatgggaaaggcacatggtgacatttgtttatgactaaattacaacttagtcacaaacgcttgtcattcaaagaaaaattgtcataaacgcatcactactgtgactaaaatgtgttttgtcatatgaaatttgtcatagaaggccaaatttcttgtagtgcggtggaggtatgtttgaagtgtatagtggcaaagttgacattcggtgttatttagctatccaaattgctagtctattcgttgtgtacatttacacgattaatcaggcaaagaacttacatttctttagaggctacgacctcgaaatgattacacatcggttcacattgatgaagcccataaaatatatttcatagatgcatatatcatataaattttgaacggttggatcataatctaaaggctagattgcatccatgtttcctacattcttttaacgaaccggtatacgctggtggagaaaccctttgtagtcccggttcgtaacccccctttagtcccggtttccaaaccaggagtaccaatccgggactaaagatcgctatctttagtcccgggtgaaataaccgggagtaaagattgatctttagtcccggttggtgttaccaaccgggactaaagatcgagctgaccttttttttttttgcatggccctgttgctgcatggtttatatatatatatatatatatatatatatatatatatatatatatatatatgttatgcaaatgcatatgtatatagatatatatatgaccaaaatatatttacattatagaaaatgtgtacacatgcatatagaaacatatgtagtcatgtattaattacaatccattatatgtcctagctagctacgatttcgacgtagtagtactcgctgctagctcagaagctaaggaccggtgaattgtgtttccgtcatagtagaattcacccttgggatcaaggatttcttcgttgatgaatgccatgagttgttcttgaaccgccgcgataaattccttgtgtgtggtcaggttatccctcatgcgaataaactatatgaatgtatgaaattgattagtaattaaacaagaaatcgctacgtaatgaaattttgaatttatttgtacgtacatcgagctctcttgtggtgatgatttggtctgcaaggcagtggcaatactcgcacacgtaatagctgcacaagttagttcctgcttttgctttgcgcactacaaataaatgacaaacaacgagagatctaattaatataaacttgtatgtatttgaatcggagaaatataaatgtagagcatgtgtactcacaggaaatttgaacttccgcctaagtctttctctccatttgccgcggaccaaatgacggaaccgataccaagccctacatggagtttaaagctatgattcgtagtagcaattaacataacaagattttcttaattaacaaaggaacttatgacggtacctgtctataagttcgaaaaccttgtcaaacgtagactcttttttatccattgagtcatatacgttgacggtgcaggcctccaggtcgaagagtaaaagcacccagtggaatctgcaatgtgcgtgggatgcattacatatgaaacacttagcaagttcgtacgggaatgaaatttggtatgtaggaagacagtaaaattaaactaactctgtgttgtatggcaacagtatgaacgtcttgtaatgctgcgccttcaggagatggacgagattgtcctctgtttcttgtggatattggtcgagcattgcgacgtttactttccgagggtcgatgaatccagtatcgaaaaccctccgccgttgggccctttgaatctccattctacaacgataaaagggagtatattattttctatagtctacttatatacaaggacctaattaattaaaggagacgtatagtaagaaatctaactgaacgatatacttacaaaatccaacaactcataatagagacgtcgagggcgtccagctggtatagttcgtagattcccctgaaattgatccagagaatgtcatctccttgcaagaagtccgtgtccctgatcctcgctccgatcatctctctaccggtggcgctcatctccatgtacagctgatggaacttgtacatttgtgtgggtagggactgcaacagctcaggcttgacaagcggtttaccgagttcgtacatgtatttcacttccgccttttcgattggtgcgactcctagcaattgatccgtagttagaccggtgtcagtaataaattgttctatcgtcatttctttaccggtcaccaacggctcgatctcctggtttggttgctctccaagctgagggactggtttggactttccagaagatgctttcttcagcgttcgctcatagtccgatagcttgatggcctccttgacagatgcagacatacccctgaagaagttcctgacactggggtctataggaatcttcttttctggacttcgaggcttgaattgtctcttgacttctgatgcaacgtaagcgtcaagctcctcttgcgtgcaatcgtaccccgggtccttgttcttggcggcgtcaactttcgccttcttcgttgcccttgtgtgggcaggcggtggagctgggggggcccttgactttgaaggtgccggaagaggagcttgcgggggagtaggtgtaggagcacgaggaggagtcggtgcaggatccagaggaggagtcgatgctggagcctgaggtggagacggtgctggcggagcatgaggaggagacggtgcaggatcctgaggaggagatggcggagccggaggagatggtgcacgagacgccgcttgtcgcccagggaggatgatgtaccgcctgcgccatagaataatggcatggcatgtgtctcgtagatgcgtctcaccgtctcctccagggtaatccagctcgaggtcctcgtacgcgccttcgaccaactcaacttcgaccttcgagtatcctgctggaatcggcctgcagtggtaagtacctgaagggtccgttgggatggccatgcccgacgccaccttcatgttgtgagagattatttattagtaatcaacatatataagcagcaactagcggaatggctaaatcttacctttattgataagttcttgaaaggaatatgcagctcacatggtgtccgctgagtgatgtcatcaacgggacaggtcgattcgtcctgtgtttgcatggcgtccatgctctgtgatcctacctgccccgttgaggcacagctgctacggtttcctgacgggctcaccattgcaggaggaatggtcggctggggatcatgggaccgatgtgcggccatgcgttcatcaaccttccttgccacctcctcttgcatgttgagttcgtagctcgatacccgaaactctaggtctgcaatcttcgcctcggtatctctcttgctcctcatccgactccggtacgtgtggatgtcctccttgaaaccaatcttccaaggaatcacccctttccctcgtgttcgtcctggatgctctggagtctgcagggcgagtgtcagctcgtccttatctctgtctggtcggaacgtgccctgagaggaggcttccactgcatctgttagtcgtcgcgcagcctctcgtatctgatcgccgaagaccagtgagccatcggctgggttgagcgttccaccgtgagcatagtaccagaacttcgatcgtttcggccaattggctgttgccggttcgatacccctctcaatcaagctagcctccatctgctcccacttcggcatcgcgacgctatagcctcctgaccccaagtggtgatggtacttcttcttggcggcattttctttgtttctttccatcatcgcttgcccttgttcgcctgtcttatatgcaacgaactcgtcccagtgatcccttagctttgggaatgtgtcgaagttcagtgtctgccccttcagtatatacttctggtacatatctcccttgaacctctgaaactgttctaccattttcttcagagtccaccttttcactttgtcctctgtacccgcaggaagggtgaatgtctcgagcattgtggtccacagcatctctttctccgaatctgggacaaagctctcatgatctccgcgtgcccttgttcttcgccagtacaccatactgacaggcacgttatcccgcacaacccaaccgctgtgacgtacatagttcttggcggcttcggccggggcactaggacgtccatcttcttccacttccgttatgatgtgccgaccctcaagcttcttcgctgcacctcgttgcccgcgtgccctcttctgtccaacggagggttgactaccactagcctcctcctcctggttcccctccacatccctttccacgtgcccctgctggttcccctccgcatccctctccacgttcccttcctcgttcaagtactggtttggatcctcgttcccctcttcttcattccagtactggctgcttccctccgcgattgtatcgtacaatatctgttcctcatcgcggtcagccatctgttgatacaagaaacatctgctaagtcacgagacatttatgttttaacaatctaagtcatgtatgctaagtgtaaatgtcgtacattagaaccctacacaaccttacgtgctaagtctaattacaaatcgtgatataagctaagtctaggtgacgtatattatacaaccctagctagtaaataattatatactaagtctaattacaaataaaataatcttatattaaaactcaaataatattacatgctaagactaaaatagtcatgtgtatgctaagtgtttcgtgcgtatatgctaagtctaattaagactacaatagtcaattgctacttgtcgcaccaattccgtagtcaataattacatactaagtctaattacaaataaagtaatattatattaaaacttaaataatattacatgctaagactaaaatagtcatgtatgctaagtgtttcgtgcgtatatgctaagtctaattaagactacaatagtcaattgctaggagtcgcaccaattccgtagtcaataatgtcatactaagtctaatttgcaataaaataatcttatattaaaactcaaataacattagaacactacacaatcttatatgataagtctaattacaggtctaataatcttaattaattgcattacaaatataacgatcatttatattattacgtcacttgcctgctccaattccttctagggctagctcttccactcaggtttgacggacgactctgacaacacgtcttttctgcaagatacagaaagatgtattaggataaatgcgaagtaacatatatatatatatatatatatatatatatatatatatatatatatatatatatatat

SEQ ID NO: 7324 - DNA, 23488 bp, Oryza sativa
gcacggggcgacgccgacggcgtggagttcatggcgacggtggcagcagcagcttggtcgtcggcgacagcacggtggctggtcgatggcattgccggctgtcggctgcggtggctttggggttctcatggcagaggcagcggcgcggagctcgttgtgacagttgcggtagcggctggacgacggtgatggggctgcggctagccggcggcgaggtggcgtcggcagcagtggctgcagtggtggtgggaggtggcatggtggcctcggtgggctagccgagggcgtggcagacggctgcatttcgccagcgtgggagagtacggtggagaggtcggagaccggcttggcgcagagaggcgcagccaatggcagcggaggccggctcggcgcgagaggcgcggccgatggagggaggacagattggcgtgagaggtgcgtctggtggaggaggtcggtttggcgcgagaggcgcggccggcggtggaggaggcgaccctggtgcgaggaggagctgctggtgggtgtggcgcagtcttcggcgcacgaaggttggccggcagggggcgccggtgcgggggtcccacatgtcggcagaggatgagtggtggtggagcatcggtgcgtcagccgtggattcgcaggtggtgaacggcgggtgaaaacccagcccggccttggctgggccgacaacgatggttaattccccctcctgagggcgttgtcgtgttgtctcacccctcaagggcggttgccgggtgaaagcccagtcttggttcctttgagccccgacggacggcggcggcggttttccgtcactcctctttttggagacgtcgtttttggcacccccttgcgtagggcgatctcgtctgtgttcctttgttggtctagcggcggccggtccggtgctagcctcctcctggtcgtgtgtgttggcgttgtcggtttgtggggggatgtatattttttcctttttcctgattatgacccttcagggttgtaatcttgtaattttttcctgatttatcaatagaacttcgcaccgtcttgtgcgagtcgttaaaaaaaaatcgcaacggcttttataagttaaaagaaaaacgatgaaaagatagatctagaaattagtaaattcaaaaggaataaatgacaaacagttacgaacgaaccgaggaggtcgatgctgatcttgccgtcggagaacctgccggtggccttgccgccggggaagtctcggccgtagggagggaagttggagcggacgatggtcgggaggtagttgttgttgcccgtgtccacgatcgagtcgccgaacgccagcaccgccggcaccttcgccgccgacgtccccggagccggcggcgctcccagaatggcctccaccgccaccgctccggcgagtacgagcacgagcaggtaggagattatcacggtggccatggctggtaatgacagtactgatgaactgatcagaaatattcagatcgtgggttttacagcttaatgatgagtgatctgatcacaactctcagtgagtggagaggctttgtccaggtgagtagaggtagttgcatgcaaacgcaagagacccggccaatctgcacatttctgtgtcttttcgttttagagtatttgagttactatctccgttccatgttacttgtcgttttgatttttttcttgttttatcattcgttttatttaaaaagttagtgtaaatgtaaaagaggataagttatacttaaagtatatttgataataaaacaagttatagacaaaataaataataattcaatttttttgttaataagaaaaaatcaaacattagaaaaaaattcaaaggggcaaataatatgaaccgaggttaggcatcgctcaccaacccataaatagccataaaattcataagtacagatctaggctagacatgagacaaccaatcgttgtttaatcttccaatttcactattatgcaccccttcgtcctgagcacttgaccgtttatttttgttacttttcgcttgacactcatccccttccttgtgtaagggtgtgtttagttcacgtcaaaattaaaagtttcattaaaattgaaacgatgtgatggaattatgtgtgtagaaaatttttttatgtgacggaaatgtaggatcgaatcacaataactaagccaaccagagggggtgaatggttggtatacccaaaaaccgaaaacttttagcggaaataaaagttaccctcgaaatcgacggatcgcagttgtcctgccggtctgaccacctggttgccatcggtctgaccgagattagatctccggtctaaccgccgagatcagctgccgctcgctgtcgcggccaccggtctgaccgcctcgccaccaccggtatatcgccagttagaccgccgaaacccgatgaaacataaatcgaagaactcttaaagtggatgacgactttattgattttctctgtgtttacaaagtgcaccaacagcactccttacaaaaatttcgactaaactcaaaaccctaactcaaaactctactcaattgctctcaaaagcgataccgggaagcctcacgctccctctctatttatatccgaggtagtcagcctaaagccacgaaccaaactcatactagaagtcctaaacaccttaggaaaccctttagtacaaaaaaacaaactttacataaccaatcgtaccaaatttagactccttgcaaattcgactccgcatcccatacgcacacaatacctccatcgtatgccatatggaatcttcaccaaccacgtacatcaactctagcctaagtatcccgcatgatctctgaccaccatggacgtcgtcttatccccaagccgactcctggtccatcaccgcaaatactctcccgaggcatcaagtcacctacacatgaaataaacaaagaaataatattccgagactaagctatctccaacttgactcattagtagcaaataatagtattacatacgtatagtatccatctagaagccataatcatgaaacaatcatggatatccaaacaaacaacccgaaaccgaaaccgacacagagtcggccggtcagaccgcgggcaaaccgacacagagtcggccggtcagaccgcgggctggtcggtctgaccgcgcgcataccgccggtctgaccggtataccctgcccggtctgaccggtcctgacaaacaacagtccctgtcaatcacctataaattccaatcatctccaaaactacttcgtgaataaattccaaataacaaaaccaataatctctaatgccaatttttcatcacagaataacaatcaaaaacacctttgattttacatgaaaagttagaggtttgaagaaaaagtttggaactaaattcggcctaagtgattttgccggttgctagagccagtttgtgtgccgacatggtgtcatgcgtgggtccatgggcacaccggcggactgctgtcggtttgccctgtgatgtgatgtgatagatgtctacttgacgccttagggtgagttcgctggttctgttcccatccagcacgtagtgaacacgaaaaacggagcaattcattagcgcgtaattaattaagtattggttaatttttttcaaaaatagattagtttgatttttgaagcaactttcgtatagaaattttttgtaaaaaacataccgtttagcagtttgaaaaacgtgcgcgcagaaaacaaaggagaggggttgcgaaaaggggcatccgaacacacccagccagcattcagcaatgcatactccttgcgttcaaagaaaaatcaacttctggaatttgaattttgttcacgaaaaaccaaattctaccatcccacatatcttcagcacataaaagtataaaatgagaaattttaccccttaaataccatttacctacatatcacgtaccattactacttttcgaataatgtgatacattttgggtatttttactccccactaattttacattggcatgttagaatggatcttttttgggacggattttacattgggatgttaggatggatcttttttgggacggagggagtaggtgacttaaaaaattatactccattttgtttttttggttcttcgaggcctaaatatattgattgattgattattacaacatatttggtatggtatgcgtcgattatctttgtcgttcacccagctactattattttatagctacgttcgccactgttggaagctaactaatgtgaagactcaccaaggcacgcacaaattatcgcatgaatcaagataatatttgcaacatcaggggagcaacaagaatattttcctttatttcatttgctggaagcacttattattctcttattaccagttaccgacagcaacatcatcctcagataaatccaggcaactatccaaattaagcctttccctcacagcaaaagagagaagaataaaaggccaaaacaaccgcagttcagaatttcagcaagaatgtgcgtatctccatcggtccaagctcaacaacaagggcgtggctgtcaactgggccacccttcaatggtgcaggatcagttttgctctccccggttactctccaattgagcttcttcatctctgacttcttttggtttgcagataggctagtctcagtcaaatctttgatctgtacaatggatttgagcaaacataattaaattaatgttaggtctcatctctttatgcttataattattttacagaaacaatttctgttaatgcagaaaaacaagggctgtgtgagtgtgacacatcacttactatcctctttccaaacagctttctcaattcaacctttgccattactgaatattgtgtgtcctcttgagcctgcaagtccaccaatataataatgagtatcatggagaaatatagaaagaaatttcatatgaactaaatgtatacctgaaaaagatgcgccaatcgaaggagtgtggtgccatcatcaagactctgaaatgttgagagatgattttaaatgaatttatcaccaatataatgctagaatttaagaggcaagaaggaatttttgtgataacctgcaaggtgatgattgcaacattatcaggaagactatagtttccttctaccgtacttgcttttgcaatattgttggatttccaactgcgttcgtcctgtcagagaaatataggccgagtttagttccaaacttttttttcaaacttccaacttttccatcacatcaaaactttcctgcacacacaaactttcaacttttccgtcacatcgtttcaatttcaaccaaactttcaattttaacgtgaactaaacacaccctatagctgctaattgtagaatctgtaacatgattttttaaaagaactgatacaaaaatggtataaatgtacctcatgtgcaaaagcaacaaggaacggtgaataaacttgttggctatatgttcggcgccaatgagctccatgtcctttcttattgacattgatatagtaagttgccctggcctgtaaaagtttctaccagtcagttgcaagatctatagagaatgtgatatcaagttgtatatcatgaataaaagagagagaaattgttttaaatgaatgtcgtataccactagcccatcgcacttttgatccacacatactacttcattaagtggttccccaactcctctgccatcgtctgcagaaagacgcctgacacaaattattcatggttagatgtataatgtgcgagggagctaggaatataatttttcattccacgaaattatcgctaaatttcaagatgttgtaaattagaaacctacgcagttaaacaatatagtgaacgaacctgggtaggttccaaaaatgatttttcaaaacttgggttgtcacatgaaaggattatttaggatgaaagggtggtgaaaggaaatagattggattataaaagtaacatgaatgaccctggaccttgacggcgcgacggagtaagatcacatcccgagaaggcagagccggtggagactaagataaatcttaatcaaatacctaatgaccagggatatgatctctccttatataaatggaggactccttcacctaatccacctgactctatccaaatgagctacgtacttatcgtgaggtcgtgaggggtgaggatatcgttcccattgggcctaggactcctgtcccaatgcccatgacataggttggatagaaaaggccctttttcatttttgctttggccagctcctctaaattcaagctgtattttggtttaaaaataacagtaccacattaagatataaaagacaacacaattagattggtgtcaacaggtaacagaaggaatatgatatcgagaccctaatggaaaatggtctggtgctagattcagtcatccagaactagatcaggatactccagccaatacctgtggagcataacttcaatctgaccatcttgaatactcgaagctccaacagcatgatccacaaggacagatagttcatatttcccatctgctacatatattccttgattgacctgcagagttaatgcataagaattagcaacaacagtaaacaatgttaatattgttcagaagcatagaagaaactgattgatacatgcaactcaatctatactactcaactggaatatatttcctcagatgggcatcatgctatttaaggaaaacagagagctaaaaggaaaaatgatactctattgatcttcaatgaaacctacccataacagtcaacatttgtaattttttttcttttgaaatagcattaagcacatatcgatccagtttgcacagctagcatagcttcaaaaagtgtcatccacaggcatagggataaaaacactgcattaatatgcatcaatttgcgatggtacctcattatgtgaaggttcaaaaaaaggctgtagttaaagagttatggtggtatctagaaaacctaagatgaatccactatgaaaattttaatattgtacataccgggtagtaatttcctgcaacaggttgagacaaattaaggtcccaatcatccctgtggtttctcacctgaaaatgaacgatgctttctgtgaactttggtataagagtacaaaaattttaaaacatccataccacatgttcaatatgactattaactgtttcccataaaaaaacaatttcgatataaattatgagaccactcgaaataaatatatggagtgcaaattatatagatattcaccctttcgaggaaatctcttccattagaatctgtataaaatattttgttggtggccatatttgttgtcagtctggtaacaacctcctttcctatgtcatcatcatcatcaacaggtattggtccaatctttcacataagagagaattgcagccaattagatgcatgttaaaatatggaatatcattgttcatcccaaacatttatttttgaggtggaagattttactaacagtatattcaacttcagcgtgctccttattcttgtagagtctcgtgacctaaaaagatcaagtgaaccacactatagttacaatcctgatggacgaacgtaaatttgagtcagtttttttttataacctgataaatccatgagctgaactgttggtggacttcgtcaacaagaggtccatggataactttcaatggcgcctaacaggaaataaaatacagaactgtatttataatatagataataaagaggtgcaattattttagtaaatgttttatttattatttatgtacttgagtgctctcttagtagcaaccggagagactacatgcgtaaaagcaacttgatagacaatacaagattatttgtttgattgtcccctgaaatactatactatgctattttagtttatatcttttgaagtgatttgatgttaggtgataatatgaaaacacaaaatattaggttccatgtacgccaccactgattcagcagtaattacttgctgttattcgaaattttaccctcatagaatctaggggaactaatgtcacaggacagtatatggatgataaataaaagaaaaccaaatgcaaatatgagatgggaaattctgttaccattcctgaaactatagtcggtgtagtcctatttggtctgaaaatatatgctccggatgcctgtaattaaccgtagataactgaaacggtcgaatatgtgaataatatgttttgcaattgagaaagttttagtttcacataaaacctgtgaatcttcagaatctcccgtgcttgaagcataccaaagaaagctctgttgaattggcaaatccacctgaaagaaactcactagttgtggtatcgcattggtagatgccatagacaatacaaacatataacaagtttatcactacaaacaaaatgaattcatatggcaaacttgatctattttataattatttcctaggaatggatctcgtagaataatttattatgccatcattttatttatcatgcaagttaagcaaaggagaaaccagtactagctaaatctaattttctaatgtaacattctgcatcaaaataattagacacgcatggataagaataataaattatatgcataatgcatttaaaaagatatatgttgctgcataaaattattgagaaatccccaaaaaatgggcaaatactacaagctcaaataggtttaaataataggcaaaatttgctacagaacactcaaaaaacgtgtaattggctgggagacactgcaaaaccatgatacggctgatggacactacaaaaattgtgtaattggctataggacactggaggcaatattttataatttccggctcaaaataggtgagaaacttttcgaaatagcgagattacccctggcgccgctcctctccagctcgctcgccctgtcacctagctagcgtcgtcgccaccttgctcgcggccgcctcctggtcgtgctccacgcgtgccctgagctcccacagcttctccttggtgcgcgccagcttggtacgcacgtcgttgagctccgatgcctgcgcctcctccaggcgatgattctcctcctgcagcgaggcgaccttcagctccagcagccgcgcctccacggcggtggcgggctgctcaagctcacgcgctgtggcatccggctcccagagctcatcgagctccgccagcaggagctgcagcagctgctcctgctccatgagcgacagccagagctccttcaacctctccacctcctcatcctcctcccgctctttctcctttgatcggtcatcgtcgcgcgtcatctcaccgccggtgcagccaccgtcagcatttcctctggccatgttggcagcggcgggaggcatcacgactctcgccacaatttttggctcgtcgtccccggctccaactaacgtgccgtgaataacgttctccaaactttatcctttcatgccaaagaagaggaagaattaagtgctccatcgcccatcgtcgccatcatcgtctttgtcggcgcctcttcttccgccaccaccaccgccgctgccgccgccgatgaccaacctaaggttagcatttggggatttcgagtgggagaagatggcgactgggtctggttctaccgtacccagtcgtgcatagatgttgcggcaccaggggcaatcccgccatttcaaaaaatttctcacctattttgacccggaaattataaaatattgtctccgatgtcctacagccaattacatattttttgtagtatccatcagccgtgttacgtttttatagtgtctcctaactaattacataatttttgagtgtcctgtagcaaattttacctaaataattttatataaatgaatgatgccaaaatcttgttgagatagatcaaatctatgcaggaattggtttacccaatggtcatcaaatcttatgttgtgtcacattttgatgtaacagccataaatttcattgtgggtgctacaaatattagaggaagattccttcaattttgtaaatagatcttctttttttcagaaataaatgaattttagactcactgcagagatagaattgaacattctcttgagttgtccagattttgatgaataggacatcttcagaggccctggtccaatttctattgtgtcattacttggagaaaccatggttgagacataccccattccattagatcctggataattcgaaggttaatgatgtaaatcaacagactaataacaacaaagttgaatacaacaggtatttgctggccgtgtacatccgacttttagtcttttagaggcgggttttacccattttcttaaaaaaaaaagataaaagaaggtattttgagcacccccactggaaaatgatacaatgtcccgccttatcaacaaaataattatgtttatctgaccaaaaagaataagcagcacttgcgacaggacaattcgataaacctaattatgtcaagattatgaagtttcacctgttccagtagattttgatatgaagtaggtgttccagccgagtggtggtacagaagcttgaaaaactagccaatactttgggggtttatcggacgtgattccaagataagcctttatgtataacttccttaaacgtgctgtcacgatatcaacttcaactagttgtgactccagagaagttccatcagaggtttttacaattaagttggcatcatttacctgcaaaatagttaaaataattatggaatacgggttagtcaaagaagctagatctagtaaaaagagcacatggtttatcggaaatttcgttctatgtgtttacaaagtatattgaagtattttgattaaattgaggtatatttttctccatatggatcattaagaactcttaatctataagttcttgtgtagaccatcagaaactactgaacagaacggttgagcagagctttgaaaaacttactggaactcttacaaagtcactacgttcccatccaagaggattataaacaactataacctgcataggatcatgtcaatatatgaaaaacttaactggcatttcttgtaatagaacagattactaatttgtacttactaaactctttgcggatgaaattccttcctcagttgaagggcagtagctaatattgagaagttggcactaaaaaagttgattgaacaagacaaatagtcacaccagggaaatatgttccaaaattgcatatggaaattttaaaatgttatttctgaaactgttgtgcaaaaacagtcttaacaattaatattaatgattggccaccttttacctttagttgtagaatcgtaatgctgatggaaaatctagaagaaactaatggtaaagagaaatgtgacaaagtactagaatcactaatatttattctttgtgaaaatgtaagcatcataaacaaaatcaagtacatatttatcttacctgactaaattttgttgctgtacatgttcctttggaacttgtgagacaacttagagcagtattaacacctttctcaacctgaaaagataggaatagatattttgctctattataaattatttgattaaataatagtacatcatgataaatcacggcaacaatttctgtagtaaatattatgaacctgagaaaccccaatcgcaaggcgtttcgaataatcatcagttgtgtgttgctttgccgttcctgagactgcatcatgatgttgggcaatccccagtggatcttccaagctagaagtaaacaatcctaaggaacttctacccaccaaaaattccaattgacgcgcagcctgcaggaaaacacatgtcctaaagttaagttattttagagcttctaaatgtctagtttaggattattatttttttaaataaaagtactattttaggcatcatcataattcctgtagttttcgacttgcattgcagaaatatcataccaggtaatatccactgatcattcgaatatatcgcttgaaagttggacggcttgtaaaatatccagtccagtaagcattttttgcatcagcatacctgcaatatgcaatagaatgagggcatgaaggataactcttcttactgatttgcgaagttcggtaacttacgggaaataatcatcgtatttgagtggccatgattcattcgacgcatgttttgcatctgtgtaaatagatggagtagagtacagtgcatgcacacggccatcctgcgttttcagcacactaagctttctttttcaagaagagaaaattacccagcggcttagttattaaaaccagatccagggcctagtcattctggttttgctaaacgaccatccatatgcttgaaccgtcgaaaaccgataaaacagctgttaaaccagggttcaatattttggttcaaaatgttcgaaacctcggaaccccaccccacccccacccccaccactatttctcaagaaaatttcatttcttttgaattcagtataattaattcaaattcgccgattcatattcttctgattaaattgcagaaagttaaaaatgatcagaagagaacataaacggcacacagacagtctgatcgatagtctgaagttaaatttgtgaatcagcaataccttgttcacataattgataagcctgtccatgttccggaaccaagactcagcatactggtaattaaaatcgtcccccatagtccacattatgtggtttgtgcgcgtaacatttgcctgtcacataaaaaaaaaagaaggcagaatccaaatctgggtttctgttcaatgctgatttttaactgggaagaaataaaccaagaaatggaaatttacctgttttaaggctgcagcaacaaaatcattcacacgttctttaagattgtagtcaaacagcaacatgtcatcctatatcgaaatggttgaacaatcaattgaaatttgtgtatctggggataactgaaactgctgatctgcaaccatgcatatacctgtacaggtacaaaatcatcgaaaatttcgaagccgaagccatctggagggctataatggacaggaaatgcatttgtgaagatctgcagtttaatcagatgtttaaatgaacagtgataatagaatcaacaacttaacaacacatgataagttactaatgaatagatatgaaactatttgcaagaaaaaagaacaatagtaacctgagaagatgaaccaaatgttcttgagccgcgccatataacctctaggcctttgtctcctttacgctttgctctatcttggtaatcgattctcgcaaaatgcatagaatcgaaaccaagctagaattgcaatgtaaacaaatgtaaaatctccacactctagcaccgatattatgaggaaaaaagaattctatgacacagtgaacttcttgaacatccagcaaaatgatacatctggcaaaatctaaactttgatatgaagataacttaaaacaacaaaaggactttaggtacatttgcacaaatacacataaatagatttgcaaggctttcagaaaatggaatagtatgtaggagcatgagattatagcggtccaatagttctataaggactcgacatgcatggtgctcaaatgtgatgttaatattacctctgccccaagcaaataaccttgaactgcagaatgaccaaaaggatcaatttgccagccagctcttgggatcttgttaaactgtttcttgattacccgatgaccaagtgtggtctgatcaatcatgtcaatataatggacggcggcttcatcatgcatacaccacccaccatttctgaatttaaaatttccaaattttctcaaacttctaaagacaaaatccaatatagcaatgagattgaatcccatacatgaactctagctgaccagaatcaactagcttgtggactatggcctggatttttgggcttttctctgcccaccatctttggaagaaagcctggaaggaaaagacatatgtcagtctctacagttgatgtggtccaacaccaacaattcttggcaggtagtatacatataggacttttattcttattactccctccattccaaaatataaggatttctaggatgtttagcggagattaaggttatgaagagaagacttcagtaccctcaacaaatatgggatgggtgggggtgggagggtaggcgagagtaagacggaaagaaatttaaatgggatatgattgatgggacaactattgttgtgaataatgttaaaagtccttatattttgaataaaattcaaatcctaaaagttcttatattttggaaaggagggagtatcaatctatgagttagatccattaagacatttgagatttcattttcatttcttaacttcagtcatatttttatgaacaatttccctgtgatctattgagactccaggaacttacaggagggatgccacctattagtctgtccaacatgtcggtgacatagaaagttgttttgaattttggacttgctatgaaaatttcaaagcatgaaatttgactttccaaaaaagtttcaaggcctcttcagaatcgattcagttgaaagacaagaaatgatttcttttcctcatggaaacaagttcaataagaaacagtttcttctctgaatgtagcagtttgtactttgaaaatacaaaaaagtaatttaaaaattcatacttttttgacaaggaaatttaaaattcccgtttgatatgtcaccagtcaccacatgcacctacgaaacgattcgtcctccataaaagttatcattgtctcgccataaaaaaaaggaagtaggaagtcagcgatttactgatattttttaagccatgtgttttgaaatgtcaattttctacttctctgaattctcaaatccgaatactacctctgattggtacagacaatcatagagaggcaattgtaggatgaaagttcgattgagtgagacactgaattatgggcatgcttatccagaacaggagcgaggtctggtatggtccatgggccattgcttgtcctctccctatactaaaatataagcacttctgattttttttttcagaagatcaaaacgagggatgaaattaaatgggagaaagttttgattggttgagatgaaaaagtagatgaagaaattaaatgggagacgattatgattggttgagataaaagagtagatagagttgcagtattttgaaccgaattttgaatgttggaaattgctatattttttggatggagggaatatcctccaaaggataaagtaaagcagacaagagacacttccccacaggccacagctaagctagaatatggtatcattggaacatagtacagtacaaagtagggattgatgcacatgtactactaatttatcaagcacattaaaatatttgcttctgattgtcgtggcaaagttgatgcaaaacacgaagccactgacagaaacgcaggaacagaccataatcacggatgtagaaacagaatagcctctcaaaaaggaaaaaaaaaaagaggaaacgattatgaagtatatctggagtatgttttgctttcatagtgaaagaatattatgagtgtgacgagcatctttgtaaacaatatgtgaagaattcctcatgaagccccagcaaagctcaaccaccttagcttctttcctaaattccaagcacaagatggcaacacgaaagtagcaccttttttggggttgctttctcttatctgatttagtccttgtactcattctacacttgtcatgcaattttgcagcactgatttcccaaaagaaaaaaaaactcataaattttgggtttatttagagctgaggcgaggtgttgaaaaagcaaacccaggaatcagtaactagtgagacatcatcaaacgagaaaatttagttacacgtagtaaaaattcagataatttagttacacctagtaaaaaatcaggcaatctagttacccaaatcatttctagcagaggtagcagataattagttacccatggtaaaatcatttctaccagaggtagcagaggatgttggtgaaatcatttctaccagaggtagcagaggatgttggtgtttgtaacagaaaacaatatcacagagagaaattaatcgagaaggaagaagaaggcgaatcgggcggagcattggtacgagcacctcacctgctctgcgaagacgaacttgcgcgcggggtccaggatgagcgcgtccaccacggagtcgagcgtgttcatcacgcacgcgccctgcaaatccccccatccccaaaccccaaccacaattaagcagcgcaccacggagcagaacagagcacgccgggcggcggcggcggcgacgcggacgaacacctagccgcgctggtgtgaacgcggcgaggctcggcgaggggagggggaaattacgttacctggatggagttgttggtgccgacgaagtactggtcgatggtcttgagccacccgacgtcgtcgtgggagtgcggcaccaggtgcacgttcagcttcccggccaccgccccggcgctcgtgttgtaccccgagaacgccaccgccgcctccgccaacgcaagaaccgccaccaccaccaccagcgccgacgacgacgacgccatgtcgtgtcggaagtgatcgatgcgttagaaactaggaggaagcatcagaagatgggggtggtggtttccacgaggaggatgaggatgaggaggaggtcacgggacggaggccggtggccggaaggtccaaagcggagggcggcccggcggccggagaagagacaagatcggtggcaggatggatcaacagggactgcaggatatggtcctatgtgaattttcctttgaaccctcaaaaaaagggggaaattggttgtatgtatcaataataagagataagtttttgtttttcctattgatgaagtatggccttgtttagttttcaactttttcttcaaactttcaacttttccatcacatcaaaaactttcctacacacacaaactttcaacttttttacacaaactttcaattttagtcaaaacttccaattttagtgtggaactaaacacagcctatatattgtagcgttggcaattttgactgaagatgttaattaatgggtttggtaattttgaataacggttttatgagtactaggtgaatgcatttgctttattatgggtaaaagaaaacgtattataatatcatataaataaaatatgtttccccatgcgatgttgtaacctgtcttttttactgtatagggaatatccgcttgtatgtggctatccattttgatttaattatctttaatatgaagaagttcatgggactaatctgctaaattcacaacaagaacaggtgaggactaatttgtaaaatttacaattataatacattgtttgttttaaaggagtatagaaatggtgactaagcgtgaggagaagattaatgcggagaaaaagcagagctagtggtaaaatgatgacatcagttgatggaaaaataggagaagaaaagaaaatggattaagttagaaaaaatgttaaaagagtattgtatgcgaaatatggggcaaaattaccaagtctgttaactgtgtggaaaatccaagtacattcatcactgacttcaccgaattcctggaggagaagcaatgaacaattttctctgcttttcgccatagaattttcgcacaacgtacactttttgcacaacatttaatcattcgccttattcaaaaatttagtataaatacgtaaaagtatgagttaggattatattttatttgatgataaacaagtcacaataaaataaatgatattcgtataatttttttaatattataagactttcatattataagaatttctagtattgtccacatttatatagatgttaatgaatataaacatgtatgtatgtctagattcattaacatatatatgaatgtggacaatactagaaagtcttataatataaaacggaggaagtaaaacattatgcggaaaagtcaatggtggcatatatattttgaaatttgaaatgaagagggtataaagtcaagagcgttactctctttactggaagtactatatgtcttgagtatgtaatcgtggcgcattattgtatttcatctaacgtaattaatccgtatatatgatgactaaattaattgagtgtgtttccatgtgatgcgtgcactacacctcgtccctgatctaccctacgacgacgacgtcatttatgaacgcacacagtcatacgctgcgggcggaaataaacaagccagccggctcatgtttatcaattaagaagatcatgatccattcatcgacttgtacaaggcgacgatgcctcctccatttctaaaatatgattgatgtcttgacactataaataaatctggataagagacgactattctgattcggaagatgaaataaaaaaagaaaacagtgtagcagagagagacccggcctggtcgatcagtaactgcatcttcgggtgggaagtcgccgtagcgcttgtcggccacatctccgacgccgactgcgtccacatctacttcctccgttttatattataagactttctagcattatccatattcgtatatatgttaataaatctagacatatatgtgtacctagattcattaacatctactccctcctccaaaaaatataacaacttttagctcttaagattgtcctaaaatataacaacttctcaccaacattctcttcccaaccaatcacaatcctccaccatctcattcacttttcccacctatctccactattcattcaatcacaatcctccaccactcacttctacctactttttttaataaccgtgtccaactctaaaacttcttatattctgggacggagagaatatattaatatggacaatgctaaaagttcaatcgtccacaattattgcatgcatgcatggttgcatgttgctccgtccaggtggcatctatgcagtcatgcagagacccagctcagctagtttatccacactccttaactaattaagcactgatcagaatatggacacgacacgaataattggggaattgttctccaatctctttcctgttatttttgtacgagcaatacattcttataagtcgatttttttaagatagtggaagccgattccacaagatgatcggaattgggtcaatcaaatcaccttctcaatgtataaacaacatctttggttctttgctattgggcgcacgcctgagcgaatgcttcaccttcacgtgtttcaggtgtttctttttttcgaattttatttatttatttatttaaaatttaaataataaattaccgtttcgaagttccatagaaatgtactcctacctaaccgtaggacggagcatataaatcgccctatgctaaagtgagtaatatgacgtgacagactgagaattttgcaggagctccttttttttcttctgttggacgatttattgtcgagagagggccacatgcaaaaatttcctaataggttgtcctaacaaagggcaatttatcaagcagctccctggtcttattttgcaggcgacctcttcccgacaataaatcaccctatgagaaggcgagaaggggatgcctgcaaaattgccacgatgcgctcctcctatcatccatcacgtcatatttctcaccctacggtagaacaatttatatatgacccgccgtacgatagggcgggaagagtatatttctttaaaaaaccaaaatggtaatttattttttaaaatcttttaaaaaataaaaataaaaaattctttctttttcttctttttgtgcgttatcacacgctagaagctgcacagacaagacctttgtctccttcatctcttgttcgcatcccttgtaacggcaaaatcgggtataatacctcttctaactttaaaaatcggtgtaaattgacttctttcaatggttttaaaaacggttttttgatgacgtgacagaatgatttggtccaagtatactgacgtggcaacccagccatcaaaggaagtgaaaacagatatggatcccacgtgtaaatgacagagataaaaataaaaaatggtggctcacttgtcagccccacttctccttatcttcttcttcctctcacaggcaaagctggcacgcacggcgacggtgacaagcggcacggaggaaataagttttggaggtaaagaagaacaatagcttggatccaaatgcgaacgtttgctccaagaaggagctacactttgaaaaatgtttgcagcttaattgagacaaaactgaagcttcgattcttgtcaaaccaggttttgtttgaactaattaagaacacaactgaggtcaggcctgctgtatcacgctagctcatggtgatgatcagatcagcaggaggcaaaccgcaacggcggcgcgttacaggagcggttcgaacaggcgctcaactacgtacgtacatgtcgctgttcgaaaaagaagtagcgctgacaagtagaagccccatttttttattacacgatagatccacatgtattttcaatttctttcatgactggattgtcacgtcagtgtatttggattaagtcaacctatcacgttaacaaaaactgctatcagaaccaccaatgagattaatttgcatcaaattttgaagttggaaattgcattatacccgattcaggatgaccaacggcaatagctgaaagaggcaaaataggcttattccgtttttaatgtctgtgtaccgggcttttgaagacaaatgggccatgtgggctatatgacatgtagatgccatgtatattcttttcagtgtcaatataaagttagtatcaataatttgtgttggtagttgtacaaatttgaattgaaaatcttctaaagtctatattgaaaattttttatattgaaagttataaatgttgtgttggccacggtggcgatcgaccagcttagccggagggaaaaagtacacctaaggtacctcaacttgtcatcgagatacaaaattgtcccacaatagcaaaaccacataccgggcgtccctcaactaacaaagccatccgctttaggtccatcggtggttttgaccccggttttgtccgacgtggcggctaagtcagtgtgggaccaacgtgggccccacatgtcagacaatccacgtcagcctcctctctctttcccctattctctccattcctcctctctctcactcactcactcttctcttctcttctggggtggcggctagagcgacaaggcagcaagctggccggcggctgaggcggaggccgccgaggcgaggcgagagaggaggaggcggcgggtgacaaggcggcggcggcggctgcgacgtgggaaaaggcgagggttgcagccggtcacgaatggcgttgacggcgttgggcgcggaggcggaggtggggccggacgccgcaacccacggcggtgggcacagaggtggaggcgtgcgcctgccgcgaggtaggtgagctagctccaaccctgccgtgcagccgagccgagcaggcgactcgtcgtcgacctcccactcggggagatctaggcgaggctcccaacgatggaggcggcggtgcgcctgatccacaccccgcaggacgcgctcaagggcgccggggagtacatcaaccacgccttggggccggccgccgccgtgcacagcctcaagccgccgctcctcgcggcctccgccgtcgccgatgacctccccggatacctcaacgtgctgtcccgcttcgaggaggcgctccacttcctctccgacaactgcggcatcgcctcccagtggctcactgacatcgtagagtacctcgaggaccgtagcctcgccgccgccctcgccttttcacacctcacaactgccgccgccaccgcctactcctctcccgcctcgtccccgcggcctacaaatcgtgaaggaggaggatgtacatgcaggacaatagtcgtggaaggagcggccatcggtgcggggccagttggcgtcctcagcgaggtggcatcgcagctcctccttcctctcccgacgcttttcccccgtggcagtagccggacagtaggtcccagcggtagcagccaccaacatcgccgggaacagggtgtatgtcgtcaccatcacctgctcgagctaccaaccaaaccttagcaggatcggattgggtctctgagctcggcgtgcggctcgagagagatggaaggccggcgaactatgtagttcggagaggagacgggagtccaagtccgagaagacgcgacggcgcaggcagaacaagagatggatgtaggggagagcatgctgtggtcgatgaggaggccggcgaggaaggcgtcgacggaggagacggtggcggtggtgccggcgaaaagcgtggccgcgtcggccttcctctacggcgccgctttcggtggagcgatttggggaagggttggagataggagtggctaggagtagccagcaagcaccaccactctgtgccggccctcctcccctgtcggcatcaccttgatgctcggtggcagcgtcgccctagatgcggccgtcacctgccatgacaagtacgagcacgtccgggaggtgagcgcggccatggcgagcgagcgcgggccggggcaagggggcggaggcgacggctaggcagcggcacaagagaagagagagaggggaggggaagagagggtgctgacatggcatcctgacatgtgggcccttcgtgggtcccacgctgactcagccgccacgtaggataaaaccggggcaaaaaccacctaagcatctattgtgaccggttttgattagttaaaggacgtcggatatctggttttgtggttggggacgattttgtaactcgatgacaagttgagggaccttcggtgtactttttcctagccagagacaacatgtgacgcgggcgctctgttgggccaagccgtgacgcgtgaccacgagctgcggagctgtaacaccctgcaaatttgaccaaaaaaaatcaaaactccaaaaatatgggcctgcaaaaactttttgaataaattgcatcatgccgattttgttcgatgattttattggattttgattttggagttcatcaatcgcgaataaggaataattaattaggaataaaccctaaaattaaattggtaaaataaatgattaaaatataatttaaaataaagatttggtgaggttggaaataaataaaatattatcgcaaccatattaataacaattgaattctagtgcgactgaataaaaattagcctaattaaaaattcaaataaattatataaataaaatatgggtaatattaatctagggtggatccattggttggaataacacaaatattgagtaaacttcatttatgcaaaatttaggatttatagaatcaaatttacacaagaaataggctaacatggggattaaataggaaaagacactat

SEQ ID NO: 7325 - DNA, 38349 bp, Oryza sativa
gttggtgttaccaaccgggactaaagatccggggggggcctgacaggccctgacagcattcgaatcgggactaaagatgatctttagtcccggttggtaacacaaaccgggactaaagatcaaatatgcccgttacccttttgaaccgggactaaagatcatctttagccccggtttttattgcatccgggactattgtggaaatcggccgaccgacgaaagatggtttctccaccagtgtatgtattcagaccctatttagatgggactaaaacttctaagtctcagtcacatcggatgtttggacactaattataaatactaaacgtagactattaataaaacccatccataatcttgcactaattcacgagatgaatctattgagcctaattaatacatgattagcctatgtgatgctacagtaaacattctctaattatggattagttaggcttaaaaatttatctcgtgaattagttttcatttatgtaattagttttataagtagtctatatttaatactttaaattagtgtctaaatataaaaactaaagttaagtccctaatccaaacaccacctcactctctctattctttcctgattaagggtttccattagaacgcttttgacaccaataaccggtgcccgttgaaaaactttatatatatatagattgcactaaaatatcaaataaatctatttttttagtttataataactaatactcaattaaaatgatatttttgttttaggtgcccttagttaattttagtgctgatctttccattaaaggccgagtttagttctaaactttttttcaaacttttaactttttcatcgcataaaaaatttcctacacacacaaacttacaacttttctgtcatattgtttcaatttcaaccaaacttttaattttatcgtgaactacacacactgaaaaaaagaaatctaaatcctcatcaatctcgaacgggatgcgaatttcatccgatttataaccgctccaaaacccttctagaacgtctcgtcgttcaaatcgtccgcaccaaaaacccacacctccttttccttcttcctctgcaagcaaagcaacccggtcgaacaccacacgccgcgccccctcctccactcctcctctctcctccgccgccgcggccatggtgctcgagctcgaggtccgtatgccctccacccctcccctcccctcccctccccatttcgtccctcctctcgcttccccccattccgcgaggcgagctctagccgcggcgagcccggccgctacggcgattgaatttctgacgggttttggaatcgcgcgcggtgcaggcgacggtgatatgcgtggacgactccgagtggatgcggaacggcgactacccgccgacgcggctccaggcgcaggaggacgccgccaacctcgtcgtcggcactaaaatgacggttcgtttgcttgcttcgctgcctccgcttacgcggcgttggattggattggattggatcttttttctttttgggtggggttttgattccgggattttgggggcgtcgtgtgcattgcagtcgaacccggagaacacggtcggggtgctggccatggctggggacagagtgcgcgtgctcctcgcgcccaccagcgaccccgtcaagttcctcgcctgcatgcacggtgcgtgacttgccccctaattgccatctaattctgtgattttgcctgtttctccaacgatccagaatgtggggtagttcattggtcaatccatgatcactttggtttggtttgttgtgtttcaggattatcagttcagataaaatgattgttggttaatggttgagatgatatattgatcaatccatgatgttgtttgccgaaaatgtaataacgattccagaatgtgggcattgatcaatcctcttttgtttggtttgttgtgctccatcaggattatcagttcagatagaatgatggttggttggttagagtgcagatagtttattgatcaatccatgatgttgttacttgtttgccaaaaatgtaataaggaattaaggacactgatcacattttttgttagtagagtagcacgaaggaaccattaacttagcttatcctcctggaattcaattatgaatatatagtcctgtcttaagaaatatacacaccttctgatcggcgagtcttctccaggatgatcagtttagatagaaatgatgttggttagcgcgcagtcgtagtttactgatcaatccatcatgttatttgccaaaatgtgacaagcacactgatctctttattttctaaggtagtgctaagaacactctaaggaagcattaaattagcttatcctcatggaatgcaactctgaacatatgttgtcaggatcactgagtctaatgtgttcagtgttcaacgaataggtaagaagaaccacgacgagttgtcgtttctgtgttgcttatggaatatgttaatcgcattttgttgtacgatttggctaaattcatgcaaagaaacaatgcttagacatatctggtgtctcccctgtatggtccacttgtttgtaaaggaattgtggtaataattgtgcatttgtactgtcataaactcatcacctatatttgctttcattttgatatgccattctaaaagtattatctatattacaaggaagagatgatatggatgtaatgagaaccacaaaatgttaaatcttgttgtgatcgatcaaatacttgatagttgttaacactgctgctttaaagaaatcatgtgtcacatattcctataactgaaacactttttatggcagggctggaagctagtggtgaagcaaatttgactgctactctaaatattgctgaactggtacttaaaaatcgtcccgacaaaagactgagtcagaggatagttgtttttgttggcaggtaccgcaaaaaagttgcatgatagattctgttccaaacttctcctatcacaagtctatgttgatgtgaattggatgccgtgtatttgtgactggagggagcaataacaatctgaaatttttatttgagctgaaattatgctacattgtcccttgcagccctgtaaaagatgaaaagttagagacaattggaaaaaagctgaagaagtataatgtttctcttgatgttgttgaatttggcgaatctgacgatgaaaagcctgagaaactagaagctcttgttgctgcagttggtggcagcagccacatagttcacatcccacctggggaagatcttcgtgccgtccttgccaagtgaacatctattatgttatctgcaggatcttacccaaatacctagtgctagagtatgctatcactaataagtaataatcctattcctttcacagtacaccgataattactggagatgaaggagggggtgctgcagccggtggagcatctagatatgaatacaatgttgacccaaatgtggatccagagtttgcagaagcacttcgtttatcagagatagcaaggcaagaagctgcagccgatggagcatctagatatgaatacagtgttgacccaaatgcggatccagagttagcagaaacatttcgtttggctgcaggggaaccttcaacctcaaacactgatactgttctcttggaatctgactcagacacttatgttccttttcatgagttcatacaaaataatccttttgtgactggagcggaatctgcctcagatagacctgctgacgatgagagggcaacggtatgctactacgtgtctatgttacagtgttactatccttattgagatcactggctttctttgtgcacaagtccaactactatcaaaccatgaactctatggctgcagaattccatcaagcatatatttgtatttgcggtgatgtctatcagtttattgcctcggagcactcatccctcaaaacatcaaaaatcactgtgcacccatgtgtgctagtgcgtatagcaacaccctatgaacttaactgcccttgggaagtgcttgttctgtcccgtgtagtattctccagaaaaaaaaaacataactctagcaacaatctgtttccaaatcagtttttagtaaacagtaatctgattatatgaatatgaataaacaggaactacatttagacttctaatcttggatctgtttagaattttaaatattccctttttcttatttgggaaccttattttcttttgaagcgccttgaatgtgttgctagaatcttgagccacttcctcatttgttgtgcttaccttctaaagatgcaaattgccctgaaaaaagattgaaatggtcatgattattaatcatcatcatttgatttctttggtgctattttactggcaggataacattaacaatataattggtgagataattatagatgctattatcaatgatttaagatttgaaatatatatcctatggttatcagcatatgcaaaatgtagctacaatataagtcaggattacttttctgggttccttgcgttttatttgggaccttttgtgttttacattcatgttcaattgatgatgtttgaagttttccatttccgtcgcagcaacttttattggggtgttgttgttgggggggggggggggttccaattttgttttatcttctatggaacattacaatgttatcagacaagctagttatttatgtcattcaggaagaagggttccgtatgatacgagaagctcttgcaaggtctgcaaatgcagcacatgctgaaatatcaggcaattcctcatctgggcaggagttggaattaggttaagcgagaagattaactacatattgttaacatgtgtccattgtttttgccatatggaggttggcaggttgcgcttctggtttttttaagtcatttctttgttaataatactggcattaaacaatgtgagtttcatcaattgtgtactttttacaacctaagattattttatttagttgtataattgatcatatttttttgctatccacatcagaaggtttattttcaacagaagaatacctgttccaactggtaaggtactgttatatgatgtcaaaaattgtgaccagctagagtaatctgaatgaaaaacataagcaaacttgttcttcacaattagcagatagagggatccaaaataaaatcataaaaacatgccatattacaaactatatatgctgatgatatctttgtgcattgtttatccaacttaggtaaggctgaattccattatcgacaatgagtaaactatgtttgtgcagacccatatccatccattgctcttgcactgcattcaaactgagtcactagtatgttttgtgaattgatacttgtttctcagaagaattgaaaggagatctatttttggttgggatggctctatatatttgttgatattctcgtcgtatgatctattagtctctcaaatgtgctgtgatgtggtgcagatccgcaaaggactggagagatatgctttcagtttgaagtggaagatatcatcaatttggtgagacatgaagcttgacgttttctcagcagccatgattgtcccatactctccacaatccttacaccagtctcaattatattgatttactaatgaacgtttatttctaaaaacaaattgcgtacagatatgctggcaagggtggcagcaatgcaaatacaggaggtatgctttttgtatgacagtttctgcttgttaacatatggtttgctattatgttcatcttaaagttaaaaaggtatatgatgcagacctgcaattttgacccacttacacatctctcacctctcaaatatcccatcaagtattgcttcgctagcttggctgtgttcccaactcatctccctcgttttccgcgtgtacacttttcaaactgctaaatggtatgcgttttgcgaaaaatttatataggaaagttgttttaaaaagtcatattaattccattcttcaagttttttatagctaatacttaattaatcacatgttaatctattgctccgtttttcgtgcggaggggaggggttcccaacccctccaagagaacagtgtgtttgaactctttgaagcacacctattttgcacttgataggagcgaagagtcaagagcttaccttttttttatatatataattcaagaaacaactgaattccgtgcattgatcttttacagttaattgtttcaacacactcccaaaaccacattaacgatgttatatttctctttgactgtttgtttcaagggttcatctaaattttctctatacctgtctgtgtaaattcatttatttccacattggcccatgcatctgaatactggtggagtgatgctgttgctttgtttgctcagcaagaggaggaagaggagggagacgagcaagacgaggcagatgatgacgtgtaaatgtcgtcaggtggttctgtttccttcgagctcctttgttagctctggaccggatttgtagtcagatgaatcgatcatagcatacataggaatatacgattggtatagccatcttcttattgtggttctctgtaactatcgattgaaccaccatattgcgtagtcaaaggaagaagtagagaaagagctgagcctgttagaagtagtaaaatactttgtacattgctgtacatgttggatcttggatttccctggttttgttacgtcgtggtagagggaggtccagtacttgcgggtatgttgtgaaaaacgttcatgtgtacccagaaacattgaggttttgagcttttttatctgctatagcctatacattggaattccttataatctgtttgttctgcttttacagggcgatgtctaattttctatgttcaccgtgagaaatgaacaatttctcataaaattcatgtgcttttatgtgtctcaaataattctcaaataatacgggaggaggagaaaacgtgcggaattggaaaatcatacgggagaataatttgttttgctgccaccaaatggaaatgtatacatattaaagggttaattggatatatgccattgcaactttgctaaattaaaaaaaataccaccactattcattatatcaactatatgacactggaaatttctaaaattggaaccatgccactcccgtcgctttttcatctcctctctcacgccatttcaggtcctgtcctagcacacgcacgcggaagctagggcacccgcggagcagggctgaggatgcgcgcgcggcgcttgtcggggataggagccgcggaggcggcggagccgcgccgggccggctgaggtggctgaggtgcgcggaggcgcgtggagccatggaggcggcggatgcgcgcatggccggtgggggcggcggggccacgcgggggcgggcggggctggtggaggcgcgtggggccggcagaggcggcagagtcgcgcgtggcctcgcgctcgtccaccggctcgtcgccaacggcgacccgcgctctaccccatggtcaaggagagcacgcagctctcctctgatgtcgccgtcgtgctcgccgtcctccttgaccgcttcttcgacatggagcaccgccaagcaaatcgacgacctcctcgccttctacggctggtgcgatgacgtcggcctcgcgcggtaggctgacttcgccgatgtcaagcgcatcaacgacagaaggcatccataggcggcgggctggacccgctgttgctactgctgcggcggcggagccgcgtgtagccgtggataggggatgaggacgggaatagagacggcgtgagcgagaaggacggaaaatatgactggagtggcatggttctaattttagaaaattttagtggcatgtagcatatatatcgaatagtagtgatattttttcaatttggcaaagttgcaatggcatagatctaattagcactattaattaacgtgaaattacttcctccattcattaatatatgatagttttaacactagtttaagtgtagttttagcatcgaaaaacgttgtctattaatgactgagggattataattcatttaaggaaaaaaaagttcattttgctcccctaaaagatttggcctttgtctcctaaataaattttcgactcattttacacctgagctattagcattattttttttactttatataagttgtattttgctataaagtttggtaggattggtagatgcattgtaaccttaccatttaatattttctcgaatttgttatcattgtttacgttggaagtatatgtaaaactatctctagcgcttccgcacattgtatggctatactcaaccttttgtccaaatagacgggaacattactgccatgtgggttctcgcaaagggttccattagagacatactcaaagaccataattggagcatttttctctgtacaacatccaattagcctaactacattcttatggttgacttggctgtggacaattacttctttggcaaactcttcttctgaatctatgcgggaatatcttttcaccgcaactgcagtgttatcatcaatgattccgttgtaaacttttccgaatgaaccatttccaaggctagtgctgtagttgctggtagttcttttgatctcatcttctgtaaaatactttatgttatgattattcttagctatccattttgccttgtcagctccttggataaaatctctaagcttattttctggaagacctagtttatcttccattttgtgatgtgaataattaaagatctttctttgaatgaaatgctgatcacctttcaccacagaaataagttgttaacatagcttgtacaagagcaactcatttatttcctgttgtagtataccttaatttgtgtcccattaccatattggatttgtttcacctgtatatttgatcatttttgtaatgcatcttagtagtgagctgtggttaggggtgtgagtaaatctcacaaaactaaagatatgttggtaaaattagcttacaacagtttaaagtgtgacaaaactagaggcttttttcttgaatttatcactaagccacagattttcaaggtgaaccagaaatgttttcttattctaatgagtggatcccacctgcagttgatagacaagctgatgacttctggtgttgcctttttttttctttcagaaaatggattaaaccagcctctacatccgaaatggatgtgcatggccattctggtaccctctagcatgcacagttttgatttatgaaaacagtacaagtaaaatggacaataagatgttatgggttaggattcatagggggtaaacaccatcgggaggatagccgggcggcgacggctgctagggatgagagggggacttaggttgggagagactaatcttgattcattgcttaattagaataacggtacaatctatccttatatagatggagggaggacccaatctaatcttatcgaaccgactctagctatccttatccctagggcctcgacccatcggcccactacttatgacaaatatgtaggagtaaaatgggatcctgttggctttaaatattcaaatcctaattttctagttactgaaatactgaagggagcagctagattatagatggtaacctgtaattgaatttacagttaagatccaatctatgctggcaggacatttgtgtaagtatttagtaagacaccctgttttgtgaaaactttccaacggtcgttgaaaacttataatctgtaatagtacttttattcttgtgaaaaaatgagaatacaactaaatcgagaaattatcagatactactatactagagaggaactctagaagtaggaaactaggaaagaaatcgagagagatgagttgataataccaggcctgaacagaacaactgaagggtcagccgagattcatccagcttcgcttcggctggtgctgatttgatttcaagctactattattttgccatggctgcttgcatcctagcttagcttgttcaagctaatgcttctcccatgaatgcatgatatgcaggcaaagcccaggatgatgagacgacgacgacgacactgccattgtatacaatacatgtctctgtcgggcagctggtgaacgaactcgacgaaagagtggagttggaattgactagcttgtcagcctacgcgcctgttgttctcatggtttacttctcgcactgtcgtagaaacatcgatacaaatctcttaattcatcgctgacggttgttagaattcacagtgatattggcaagttggcagctataaccaattagtacccccccttcttttttatccaaaaatgtaagcattttttttggagttaggtagtacagtactaagtaggatttaggtagtatatgcattattaaaaattttaaaagtaggtgtaattaaacaaggtaattttgtgattggttcataagagtagtcatagaaattacatttgagatacttatgattggttgaaataagaggctaggtgaaaaaataattacatttttggactaaatttaaattatcaccatcaatttaaattttaaattaaactagaaaaggtgcccgtgcgttgcaatggatgaagtctattttaattttattattgttatagcaacaggaaaaaaataaaattataataattactatatgattagatatagtttttataatatcagctctttaagaaaaatatattcttcaaatagacctagtaatcttatgtgcaattcataatttaccataataataataagaatataaaaaagtcttcaccctaaaaagtggaagaaaaatcataagatgaaaccaagaattgagcacaatctcataacggaaaatgaataagagtggagaattattgttttaagggtaactggagtctagtttaatttttcattatgaggacgatataaaaaaaacgtgcataacgtgtaacgaaagcacttcggtttttagtagtgtgtgatctccaactgctctttgttagacgaaaccaggcatagtcgggacggttacttcaatcctgagaccagtcattaaaacaaagagttatcatggtccaagaataaaaaagacgttttctcaaatattttatttagtgggatataggattagaaatattaatatcaacgttaacagaaagtcgagtcaatcttctgttagttattaatttctctatcgaacaattgagtatgatatcacagaagcatgagttctccttgaaagccaagcattattttgtgcattaaaatatttccggttaattatccgccttgcaccctcgctgattagtttttttttacggacccttgctgtttagttgctctggacggaaacggattcgatttacatggcggggttgtttgacgcgggaaacgctttgtagacgatatcagtacgaatcgaaaacggacgacgtacgaaaacttgtggcaaaaatatcttaaacttttacaataggtaaagatagttagaaatatctatattttatgatgggagggaataattatcaccatcagttcttattgttcatcaattcttattgttagtttccttgtagactctgatattgtcatcttggggccagcggactcgtaggacgccatcatctcggtccgtgtggcattggcaattggttatggtaaatgaagtggacatggtgtacatctctaccattataagtcatttatgtttgagtcggtttttaaaatttgttttattttggaaatataagtccgtgtttgagtcagattttaagtttgtttgtttttaaaaatacaaaagaagtcatataagaaatctatttaaaaaagctcgcatactaatttgagatgaaagtcgtactcctaattacagctcatgattatttttaaaaaaaattcaagcgaatttacagtcatatgttgaggaaagcctgcaattgtttcaggctttgggtattactatttactcactgactgcatcaaactaaaactgagtatgcatcgtaccgaacatagattgtttgtcaacaataaaatttcttaagaaaccaaacagtcatggtcaaaacgactatgactatcactacatgtagatggaggtaaaaaggggcagcctattgactacagtaactgcttttgctagtgagcctgagggtttaaaagatacatcacactaactctcagaaaatacataatagcacacctggttactggtgttccagattaaatacaaataaaagtaagttcagttctgaaaacgattacacacaacatggaaataataatcaagcagattgctctgacaggttactttgctcctcacgcattcctccaacagtttttaccttgcccctgctcctaggcctttagcatcactcattcttcttctgtaaatgtcgtcaattatatacatcacgcaagacatttctgaatgatgctgtagactacaataactacacaatagagagattcttgaaaaccagccttattgaaacatgacttacaataatttaaactcaccttcatcactactaggatagggcagattgtgcctataattaaaactcatcttcatcacaggttcacaactagagtatgacgcactatcatataaattggacgaactgggattgggtggttcatcgatgtcgatggtgccctgaagcatctcaacaaccttctgcatggagggtcgatggtctgcactgaattgcatacaccacaaggccgttttcaccatgtgctctgctgtggccatgcttctggcagaatcataggcctctgcctggataatgcatggatccaggcagtccacaattcgttgctttagataaacttcctgatagactatattgacgaagtcaaatgactttctgcccaccaactcctcccagaacatggtgtcacggataccaaagacgatatccagcagcagctgaccgaagctgtagacgtcagcctttgccgtgatgaatccccgagagaaaaataacctctctggtgccatatacatgtagttacctggtactacttcagtagtcatgatggtactctcattaataattataggtgttggcttggacaacttggagcagaagttaccatccaggagaatatcccacggcgtgatgctgccattcagtgtgtccagccacttctcgtgcaagcatgctatcgcgttcgccacccccaacgcaataaagtgacgtgtattcatatccaagagtgacctttcccctgtttcttcacccttctccacaactaggtaattgcaaagggcaccattgggcacatactcacacactgaaatcggatgatccatctccaggcaacaaccaaagagcttgacaatgttctgatgttgcacttgagattggatgatcagttgcaaaacaaactcctcacgagattcactcacgttagtgaaaaccttcactgccactctggtattgtcatcaatgtctcccaagtaaacatcgctgctagagcttttactcagagcagttgagaagttctgtgtgatattaagtatttcctcatttgtgtaaatccttatgttgtagatgtcttttagtatatgtccaccattcttcttaaagttattggttgcgccaatccagttgaaaatgccaagactcttcctcctatagagaaccgtgttggagttggaattgcttctttcatgctggttctcttttttcaaatcattctgacctccagaaaagaattgccaacctgtcttttcccccctagttcaagagttttcctgagctctcggagacgtgcagcgacatcattcatttctggacgtttatcaatgtcctcttttatgcaatcttttgctattttccaaataccctcaagaattttcatgttgctctcctttgcaatgtccacatcaaacaactcctttgcacccttccgtttttgaggagcttgaataaatcttctagtgacatttttctccatgtttgttggctttgtttttgtaatgagttcaataagaacaactccaaagctatacacatcactttttggtgtgaggcgcgcccctcccatgcaaatgttggatccatgtagccgatactccctcgcacattcacagttagatttgtgttatctgttgacagaatccttgatattccaaaatcagaatttgtgttatctgttgacagaatccttgatattccaaaatcagatatttttgcatgaaagttctcatccacaagaatattggacagcttaaaatcataatgaacaatgggattgtacatggagtgcatgcaccctaatgcttccgcacattgtataacaatgctcaatcttgtgcccaaagagattggagtatcaccacaataaagaagatcactcaagtttccattagcagcatactcaaatacaatcattggagcattgttgtctttacaacacccaaccagccttactacattcttatggttgacttgagtatgaacaattacctctttagcaaactcatctagtttatctactctgataaatttcttcacagctacgaaacggttatccccaataacccctttataaacctctccataagcaccctttccaagcttagtgctgtaattgtttgttattcttttgatatcatcttctgtgaagtaagttatgttgtgattgttgtccggtatccattttaccttgtcaacatctgggatataatctctaagaatgttttctgggaggtctattttgtctcccattgtatgttgatactgaacacaaaagagctctggctaggaatctgaaattccaataatatgatcttcttttctcttctttttttctaaaaggaacaatatgatctgacagactggaaacacacaaaagcaatttgttaaaatctacgtaaacctgtgaacatgatttagatcacagataatgttaaaacagtggcttcatcatgcatgttttggggagagtggatgaattttcctaaatttatcactaagctacaggttctcaaggttttgaagcaatagcttctgtcctgatgagtggccccattcgcagcttctgtcctgaattctgattttctgaaaatgatatagggaaatactttcataatacttatgtagacatgcaacaataatccttttggcatccagtttgcaggatgtaaaatgggatcctgttggctttgaatccttaatcctttgatactgaaagttgcagtcagactataggtagtttcttgtgttcattattctggttggacctaacctatgcatgatatttgtggaagtaggacagcctagtatttttctaaaaacttatcagtccgcatgtactaatccatgcgtaaacagatcctctgcagtatgtagtattgccctctaacttttagttgataacaggtaggccccatgaccagcaggcccacatgtcagtgatcccatgccaaagggcaatactgtagaggagactcatccaatccatgatgtattttattcttgtgaaaaaaaggtaatacaagttaagaaaccattagatctagagcagctccagaattaggcagctcgagagagggaaagaaagagtaaagatacgtgaagatcaatcgaggtgcagcttggcttgggcttgtgatgagatttgatttcaagctactctgccgtccaacgtgatggctatggctgctttgcaacctagcttaaatagcttgtactaccaactaattcctctaaaaaaaagaggtcattttcagccctcgtgccgctcagccctgggacggcacgggcggcgaccaccgagcgccaccgccaaccacttctcctcctcccctccgcctcgccgctgcccaagatggtggcggcagggctccttgcctcctctctcgggcatggcggctcggggcgctgccaagatggagggaggatcccaagtggtggtcgtcggcgaccagcttcgacgacggtggggacagatctgggcctctcatggccggatccggcgtcccaactagtgtgtaggcggaggtggtcgttgtgcgcatggagaaggccggcgacgcacggggaggaggtcgacgacgtgtcgggaaggccgcggcgatggtggccctcggcccgctgatggggatggccggttctggcgccccttggccagatccgccgcctggatgacgatggtgagctgccaatgcgaggtgggggccagcgtagcctcgcgcggcgcgggaatggctacgggaggtcagccaaggagggagtcgggcgcgcgtgacagaggcgggggcctggtgctacgacggagggggcgggtgcgccattggcagttgcaggaggccctcgtcggtgtggagacaatggcagccacctgctgcgcccaccggcggttgtggtggcgacggtggcagcggtgcagcggcgtgtgggcgctcacggtgacgttggcttgccgtgcttcgatagtcagatccatggccgccttggccagatctggtcggtgcagcagaggtggcggcaggttggcagcacggccgactcgcgaggctgcctaagttgtgggtggtgggctaggcttggtggctaaagggacgatgtggcggttcggcaacgtacgttgtgcaggtgggttgtgtgtttttggatgacgcttgcgaaagccttggctggcctttggttggcttgacgacggcggcgccattaggcatcgttcccctccttggaggcgtcattatgtcgtctccctcactaccaagaaccttttccatgcaaggatggtcgttcatggaccccccatgtcgaagctctatgagcccagctatttggtgaggccttcatctcctgggtgccgctcttggatgtggcaagcgtccaactttctccgttttcttctaggtgaagtcggagctgatttattagggtgcgatgaagcttggcaatgataacacgttgcagttttcgagggaggttggtgttagctgtgcacaagtagtagtgctcaagtggcttgggctgatgttcaaagtggacagtcggtgtcttgctcgttttctgcgatgcctttgtcaacgatgatgtgatagctgtggagtcgaagctactgtgtcgctaggtgacaagctcggcaacgataacacttgcctcgcgaagtcgaagcctttgtgtcgctttcaataagctctttatcgatggttgttttgggctccgccattttttcttttttcgcggtgttggtagcttaggttagagtgttgtggttttcatccagttttccataattaactgcgcattgtaagttgcgcaaggtttagtctcgttttctacttaaaatgagacaccttcttctttatataaaacatcggaaatggcctcatcgttcgaaaaaaaaactaactcctctcgcatggttaattatgcagacacttgcagttccaggaagatgagacgacgctgcaatttgtgcactacaacacaaaattaataggagtatatgtatctatcgtgcaggaaaacagatggacaagagagtgggcttgactaattaacttcttctccacatactatacgcggcaacttgattaattaacttgacgtacgtccaatgattattagatcatatattccaccagtgtacgcgttcaaggctcacacgtgctcgtatatttcttttaatttgcttcaggattaaatcttgaacgagtcattgcgcaccatgcatcttagaacgggatgcacaaatttagatgatgctgctcagggctggtactatgattttgagggccctagacaaactcaatgatccctctaagctatatataaaattttatgatatatatatatctatctctatctcttctctaatacttaaaaaattttatgatatgatatatatatatatatatatatatatatatatatatatatctcttctctaatacttaaaaaataagaggtacttccatcgtccgttaataagtatttggttcggacaaaaaagtcatgtccgatttcagaaaaaaaattacgtgaaaactaaatccgttacatgaaaacaaaatcccgtcggtttccagggaaaaaaaaacaaaattgctgttgggccatacctacagaatgcctattgggccatacaatcagtttgagatttcctgtagcccaaactaatatgttttagcccaaagccatatttactaatatgtttcagcccaaagccatattttagcccaataggacttggccactattacaaaaaatgaaatgaagatgtttccgttggaattttggtacgtcattcatattttagttggttttctaattttcatgttatccgtatgtgagttagttttctaatccatcaaatccttgtcattcgtaattgtacgtctggcatcatcatcacgtcagtcgtatgttagttgcagtctgtttcacacatgcaagtccctttttcatacgacaattgcgtgcgacatgtgtgtgccttttttttatccgagatgcacgtgctcgagttcctttttcatgtgccccttgccgcgcgccgtgattggacctgtgacggctcgcgcgatttgtttcctctgcggtgcagccattgggcccacagttgcataaaattgtatcaaattctctatactgcacattttttacgcatcaacatgatctctgtttcccattttatatatacgtaataagtagccagtgtaaccagtttgtctcacttgggaaaccgaaaactcttgaagtgactaaaactcttcaagtgcactagaaattgatgtatgtacctaaaaaaatataaaaagattgaaagttttgtttctcatgcgcataatcggcttattaggctagaaaatcagttttttttaatctctaacaaaatcccattccctctcgctctagcatatgtcacctcccttgctaagttgctgtagaataaccacactatctctccttccacattgccatcttactaggttgtttgatgatcatgcctctctatctatatactcaactttttcgtattttcttcctgttgcaacgcacgagcactttatgtatatatatatatatatatatatatatatgtatatgtatatacgtacatgtatacatacatatatatacatatatacctacatatatacatacgtacatacatacgtatacacacacacacacacacacacacacacacacacacacacacacacacacacacatatatatatatatatatatatatatatatatatatatatatatatatatatatatatatatatatatataggacactcatatggggcaccatggtgcccgggcaccatggtatctaatgcacaaaattactcaaatttttcaaaattttcaaattgtgagtatatacctagttataataatttgattcatacctatacttatcaacaaaacaactcaaatttaactttatttcccaatccataattacatacctaactaattatatgtatggatgctatatacctagaatcaaaatctaacaaaaacaagttcaaattcagttcaaacttgctttaaactagttagtaaagtagttaatgttaatacctaagtaattgaaaaagtttcatactcatttgaattgggtatatactcaatttcaacaatggtgcccgggcatataaaccatgtagcaacagggccatgccaaaaaaaaaaggtcagctcgatctttagtcccggttggcaagccgggtaacaccaaccgggactaaagatcgatctttactcccggttatttcacccgggactaaagatagcgatctttagtcccggattggtactcccggtttggaaaccgggactaaagggggttacgaaccgggactacaaagggtttctccaccagtgtcagtatcaggtttatgacagcttggttaactatgcaaaattgcacataattaaacatcaccatatcagtctcaaaggtatgcatgacagctattttaactcttatcactgaactatacgccagaatgcacgtgtacaaaagccaataggcttgtttggtcgtggactcgtggtcagcttaaaaattaacagtgggataattttgtaagcctagctatgcccaaaacgaagggttcgaaaagacagtaattagttataatctctccgtctctagcctaaaaatttatcctaaaagagtgtaattaaatttgtctgtaaaatagtttagttatagagtggttcattaggcctctttaatattagattattttttttcgtttttagctattgtaagtcattgaacagatgtagggagtactttgacaccagaagtttttttttaggtatttttgtttaatttggtgagtgtgcgtgtatgcatcctccgacctcaaccacacttcagtcatatttcacgcagaattatgagcccagattggcttattatggcctcgatcgaagaaaagaaaagctcaaataaaattttaattacaattgcgtgctcctacgtgaacctcgtgatactgtagtaatataatccaatatagtatttgctgtgtttcattttatttcttcagaccgatggtcccgttatgccggccagccaatgcttatactgtattcttcatttcctcctttaagagttgtccacatgaccgaatggactgtcctgtgatcgaacaagacgacatcaacctcaggttcatccgcattggatttgaagtttgtatgttatgtattaaaggtttaaaattttatattttatttaaaatagaaacaaaatttttaatctaaatgtttcaaagatttagattatggatttgtagagatggaaatatttagtttaaaagaaatttcgaaaacggagttgtgccaatcagagtacttaaaacaataagttcactttaggtctctcaatttgtcgttgaatccgaacttcgtccctaaaccgaaatatcccatcccggcatcttccaacgaacaataccatgtaaattttggtctctcagcagtttaattgccgattttggttgacgtggcgagtgggacccatgtgggtcctacatgttagtggccaattcttctccctcttctccatcttctcttgaggacatgaaggaggggaggttgacggcttcgccgacggagcggtactgatcagactcggtggaagaggcactggacgagctctcggggagatgcctcctcactgacccagccatgccgggccaccccatcgtttacgcctccaagagcctcatcttgctcacagggtactcacctagggaggtgcttggccgcaacacgagactattctagggtgcgaacacccaccatgttgtcgtgcccagggtatgggaggccatgcagggtgcacacatcagaggaagacaagcatgattgtagtgtcgagcataaacagccagtagcacatgcccggagacgggcgttgagccagccccacccttgcagtaccggcgccatgccgcacgcgtgtgccagcacaggcggcctctgggtagcaacaccaatatgtgaccccgtcagcgccgcagaccgggtccaggcggaagcgtcgcacggggcacagcggggccttgttccccctgtctgacacggggtatgtagcctagtgattggagacctcggcctccgaggccgtgcggatgaggccagggtttgggtgaaaggagtgagagggccgcgaggaagaggacgaggcggcgaaggcgggcggtgggggtgtaggagggtggcatggtgacgaagacagtgtcgccgacgactgattgtcgccaacgaaaggcttggaggggatcatgatgccggcctttgtagtggtgggtgaaggaaaggggagggtgcgacgatggttaggtttggaagttaacaacacagtggtggaacgggtcgacgtttagagaggaataagagttggccactggtatgtgaggcctacgtgggtcccacactccacatcagtcaaaaccgacaactatactaccgagaggccaaagttaacacggtattttgagttgggggttgtgctatattagttatttcggttcagggacgaatttcagactcggcgacaattaaatcgaaagacataaattgaacttattcccttattaaaaaaagaattgaagaagaggagctagggcctagggatatgggtcggctactgtgggcctaatgggccggtatttaaatacggatggcaatgatatgttgccttctcaaaatcaagtgaggccggccaattagtacttgctagcgacaggcctgctaaggtaagaggcccaaacttagtccaatccacgttctagcaaaggaataagttcaccagccattcctcaactttacaccgagtttatttgacatctcttatcctcgataccagaaatctctaccattaaactatacgaaaccgtgcaatttaggtcccatagcagtatagatgtccggtttcgctaacgtgtcatcctagttagaaaaaaaagtaaatgccactttggtccatgtatatttaccaaagtggcaacttgcaccagggcaaagtctaagttttcatatcacaccatctttttttaccatcctttacagattgcaccagggtttaccgtttaattgggcgaccaagctaatctttggcccaatccgcgtgaacaatagcgttttggctcgtgcggcggcgacgagtcacgcgcctcgacagtgatggggatcgacgacatgcatctctcgacgtcgatgacgcctccgcaagtccacatacatcgaccgaccgccccgccacaccatcgtgtaggattaaacatggtgggattcacgaagcagccaccgtcggtcgctgctgaagatcatcgacggcgacgagagccagttgtttgcttcgctgcagcagtatgcggcgccgctgatccgggtgagccccgagtgcagcgtcgtcgtcaaggatagcgagagccgagagctcgttgccgccaccgtctgaaggtagcagataaacaagcatgcatccatcaagtgggtagctaattaacaagataatgcctgtagactttagtgatggagctataccctatacctcgtaatagacacgccttgtgatcatcatcacgacgaggtccagcagcctgggcgtgtccgacggtgcagcatatcatgtctggcaccgtccgcagcagcggcggcaagaggggtctcctccggcgccatgggcggataagctactgacctccggcgccggatgctagcttggccctccaacagcgatgctgtactgcaggccggggggagcactctcgctatacgcgaaggcgttgtcgatgtcgagcgagccctcacgtcattgctgtcgctgctctccatcactaccgaaaacgaatctaaatgtatctatatgcatgggacatttatcatggccatatccgggcgcgatatatactgcgggttgatgtcatatattcgtggtgcgtagcaggcgaaaagatctgtccgatatacaagaatctatttaatctatgacaaaaaaaattcgtcatagatccctgaaaattcgtcacataaatttgtccgtgacgattctacttatcgtcatccattgagagtcacagattaaatctgccgacgttttctctgaaatcgtcacggatcagcacaatctatgatgtttttttaaccgtcataaacacttttgggctcatgtagtccagccccggcccaacctttgtgacaaaattaaacgtcacagatagttgagacatggcggccaacatggcagatgacgtggtcgttgacacatgtgtgatgacatgtcactgatgacgtggcaggtaacgtcaacaaatatttttaaacggcccattatttttttgacggcccattaatttttttgacagcccattaattttccagtgtaaaatttggtatctcagtacctccacgttagaaggtaccaaaatttacactaaaaatattagtacctcctggtacctgtaaaagaccttacaaacttcaaatctaccatggattttggatttgaagctgtgctaaatggaaccataatttcttaatgaggttgaagatgaagattaagtgttttatgcaaaacgatgttgtaataacgtatggttaattgagttttaattattccaaacttgaaaatagattaatctgatattttagaacaacttttatatagaaagttttcacacgaaacataccgtttagcagtttgaaaagcgtgtcacgagtatccaaaattcaatccaacttttgttggagaaaagaacatggcctaagggcaagatattgcaaagcacatgggacagatgaatcaaccagggtgatcacataattaataagcatataaaataccccaatttatcgatcaatatatcttgataaaaggtcataaaaaacacaccccatcaagaacttttcactaattccagtgaatattactactatgtaaacccttaattagccttaggccttagccattaccaagatgggtttacttaattgcctcacaacccctcaaaatgatagaaaataaattcaagaaaaaatacacactttttttttcaccatttcttccatccaaagaaaaaaaagtcttggagaaagaaatggaaaaatagagagacaccagaaattaaaaacatgaataatagtaaaaaccaccaccgccggcaaatctcgcatgcataaatatcggtgcgaatgaggcggcggcggcggcggcggtcaacgccggcgtggacgtccttccctcgccgacggcgttctacacggcgcaggaggcggcggcctttgcggcggcggccctgacgagggagaaggtgggcagcggcaggctgctgggcggcggcgccagcgcgtgcaggaggtcctccacgaacccccgcgtcacctcccgctccaggtcgtcgagcgcctccgccaccgccgccggcggcggcagcggcgccgccctctccagcggcctcctccgctgcggcgccctcgcctgcccctcccccgacctcggcgtcctcggcttcttaatcctcctcctcacaaccgtggctgacggcggcagaggcggcagcatgcgagggaggagaggtgttgccgtcgccggagccgacgccgccgccgccgccgcgtagtaggtgtaaggcaggtgtagtgggagagagagcgaggagtacagcgacgccgcctcgtaagtcgtgtactgaaacggaggaggagatggagcagcaaaagtgaagctgccctggatgcttctacgaggcggtggcggcggcgccacggcgagccgccggccgaagtagtcgtcgaagccgccgccggtgacttggccgatgaggaggacgttctccatcgatggatggatcgatctgaagccaagaaatcaagaggcaaagctagttgtggaaactctgcatcaagaacgtgttgatatgatcacttgatgatgaacagagcaaaaacacttgcaaaaaagaagaaaaaattgcaggagaggagatcaaaggatgtggattgtttgatcaaaataaaaggtgattattagtgatggaaatttctcaaactttgatctgatggaaaggcgctagagaggaagagagaagagtagggtaattaaaaaggcagaggggaatttaattagtagctaattaattaagaagctgctaattaacccgcctctcacaggcctccggggcaagggcaagggctcgggctcggaggaggtgatgcctttgctgcctatttatgtagagatcttagaggagggtggtacagttgactttccaagtcgacatcttgcttaattttatgctaatttattggtattagcaagtgctttgcacatgtgattctctaatcccaagttgttattcttttcttctgcacccgctgtactagcctaattattttttgacgcatcaatggcataggttcattaggaattcttctcttcaaaactaattatttaaagatattttttcgataaacacactacaaatgcggacactaaaaagttctgctcttcaaaattaattatattgatgaactaaaactgcagaacggtttttttttacgcaaattaacagatatattgtttctaaggaaacagctggagtctcttaaactcgagatggtttgattacacatatatttaggtgaaaagaaagccatgatatgatagacatcatgattaatatcatgcaaacaaattcacttgtaaatttatattaatatctttattttcaaataattgttaattttgcatatggccagctcactttgaccacaaattacttccatatgattatattataatgaattaaaattgtttggctagatttgtttacgacaccacatacttcaatagtacgacatattctaagcacatgaagtttttttttttgggaaaatattaaagttttaacttgaatagcgaatattgattatttgagatcggagatgatattattttacaagataaaaaataggaaaataaaatctaatccaaatgcacaaatttgagtaatcaaatgaagaaaaacattcatgggtctccatgcagaaacaacttgtcccaacttgcagcagttgcacatatacatattctccattttttccgatcaaaaaaccaataagagcaccgaccaagtacggcctgtcatcacgtcaccctctggacccgaccgcccatgaccaccatccaacccccaatcatatgatcgcacgacagcgacgccgccactgacagtgggacccacataacccgatggccccacatggaattgacacgggtggctcaaccacgccgcgatctctcgtgtggctgccgcgatttcccgggcgtggcgggaatctctctctctctcgctgcgggcatgtgcgaggcgaccaaccgccaaagcgatggtggccgtcggatcggggatcgaggcacatctggccgtccgttgctgcgtctggcactgctccccacatgctgcccgtattcgtctacttgtccttttcttttagattttgtcgagctgctgtctaggtcaccacccggtcattgtacatgtacatcaatatcttaactagccagattaataataattgtgcgtttttgctatatattcttaaataaaatagttttacagaattacggtatttaagaaagtacctggatatatactcaggtaccctaaaatttgtcttttaagtaacacaccgtggtgattttgccacaataaaacgcttttttattcaattgagactcactatgttgtccaaccgttattaccaaacactttttatatttaaactttgaccacttagattttttaaaagattataaatacttaaaaagcttccatttcaatcaccatagtctaactatggtcgaagtttaaaaatgcttgtcaacaacgtttttgccggggttacgactatatcacagctaaccagaatagtccaacaagcataaagataggagcggctgcagccctcgtctgccgaacaggcccaatatttctgaacatgtggaattataatttgtaggttttatatttaaaaaaattactcttaggtttttagattattgaacatgcttgctatatttatccttttttctaaaacagtattcctgatgtaattaacactagtgcacacgcgcatatatgcatccagtgcattttttttaaccagtgagatgcgcagtggaccggatcgatccgtacgtaggattggcgaagacggaaaaggatgaaatataattctccctccgtttcaaaatgtttgacaccgttgacattttaggacatgtttaaccgttcgtcttattcaaaaacttttgtgaaatatgtaaaattatatgcctacataaaaatatatttaacaatgaatcaaatgataggaaaagaattaataactacttaaattttttgaataaaacgaacggtcaaacatgtactaaaaagtcaacggcgtcagacatttcgaaacggaggtagtagtaatttgttcatcattagtggtggtgagcacgtgtactgcacatgaagattcggcaagcaccgaccatgtccaaattaaccgaaagaagaacgatcgatctatacatgcatgcatatataataaaagaaaagaaaagaagaaaacgaaggaagaagaatctcacgcgctcttagcttagctaacgatggtcgatgcgccggcccgatcgtacggcgcccgtacttcatctcacaaaatgtcaatcgcacgatcggagcaggttaatcgaactcgttcaggatttaggccccgtatgattgaaatttttatctcggtttctcttagtactactaaatggtgtcgtgcgaaaacttataagttactttaaaatacgaaataaatatactttttaagtttgtactacctctggctctgtcccatagtaattgtatttctaggatttgaatttgttttaaaataattatcacaatagagtactaatggtcctattaatcacttattgtccaactttctttctcttttacccttaactatcattccacttttaactttacatcatttaataaggagcattataatctttcttctcaaccttaatatatgctaaacaacctacaaatacaatttatatgggatggaggtagtaataattaaaactcaattaatgatacgctaatgatttttttttcgtgccttaacttcattaccatctttattagaaatgaacacgggatggttgacattaatgaagattaagattaagtaagggcacacaaaacaagaaaatcattatatcaatattaattatttttaattattacaaacttaaaaatgtattgatattttagagcaagttttatactataaaaagttttcgcactaacacacgttctaaaagtttgaaaattaactatgctaatgaaaactgaggtagaatcggtatcctaatcagtaataaataaataggcctagtagccggccacttgctaaattgtttatacaatattatgagtatatattattgataagtgtagtggtggaatcctgacctagcatacaagggttatatatcctattctaacggtgaaaataactgtgcgagtttacagttggcgtgtagagacaacaattatttttaaactttttaattaactaagctatgtaatttttttaatatataggtatgtttctaagatgtggtttgcctattcttattttaatttgttagatatatatggagccattaggcctgccaccactgtaccgaggcctgtcgcagccggtggcatggttgagggctggaggctagctagggcggtcagatcccgatggcacgagctcatggcagtggtggtagcaataccgttgcactgactggggtggtgtttgtgtaggggtctacggcgctgtcactggctaggagagagtgttggccgggtggagcagatggacatgagaccgtgcagtgctggggaggagatggggatcggtggtctctctaaggacatggaggtgatgttaggagaatgcagctaggatgggacttatacacatcaaccgttgatttttattatatcacctatttttcaccacaagttcaaaagaagaccatctacaaaaatagctaaataggagctctcttataggaaactgtatgtaaaaatcatgtttttcataggaggtcacctaagaaaagcacataaaaaataaccttattttcacatgcatttcacatgcagttctcttatacaacaattagtcagaatcaaatttctcgagtgttttaaaagcataggaccaccttgtaagtattattagtggaatttcttaacccatcctgtaaaattaaaacaagggtgtctacaaaaattactttttactactaatatatttttatctctattagctagtgatattttattgtcactactgcaaaaattgacaacgacgaccttccaaacgaaccgccaagttgagccaaactcacccgtggcttgcagctccctcttagtcgctctctcgctatctgcccttatgtgttgccctcaatctcgccacctccatcatctctctctcgagcttaattagggttactagatcaatctaggcctctcatatagtacgacagcacagtcggtgccggcttctagctccgtgcggctataactaatttggactacgactagcaacataatttgggtcaacggtcaaactaatgccttcatgcaccggccgtggcctgcttacggtttatacatacgtgattttagtcagtcgatcattcgaaagcagattctggaaaatcgtctagtcaaaaagctagctgcaagctagcctgcaaatcgcgttcacaattttggacatgaatttccgaaattttgggtctactaataatgggtcgtggaagcgactcgtgtaaagtatgtgtgttattttaattttttatttttctgaatttagcaaaaacttgctcaaattgtagtttatttgaatttgtagatattcggattttccatctcctgaattatttgtgcttacccatcaaaagtggtaggtacgtaatttaattaggcatgttggtggccaccgcccatttgaacacgtccacatatcggctcctatgtacacgtccggccttccagacttccagtgcaacggatggtacgctgataaaagctagctaaccggcacagctagcaagcacactagttcttgacaccgaatactatcaggtagtgtttgcttggtgggatgggatgggacgggacgggacgggacgaatctatttttagaggtgtttggtttagaggtgagtgggatgggttggtccctagagaggaatattcctctcaaatccgggaccaaagccatccggaaaaatctggcggacgaactcgtctcacctaggatgagtgcacggcgtgaggcgccgcttcgccccgctcgcttgctcgcgtcgtgctctgctcctctgcccatcgtgcttgctcgcttgacgacgacggcgtgctcaagcgacggccacggcggatccggtggtggggaaggcggcagcggcgaatccggaggcgagctcgggcgacggctgcgaatccagtggtggggagggcagtggcggtgaatccggaggcggggagggcgacggcggcgaatccagcggtggcggcggcgaatccaaaggtggggagggcggggatggctcggtggcagcggcgaatccggaggcgggctcgggcgacggcgacagatccggtggtggggagggcggcggtggaggggaaggcggcggcgatggcgacggcgggcgagggtgagtgctgcggccaccacccacgtccacatcgtcggtgtctctaatgtcagcgccacttctccttccgcctgcgccactggtcgccgctccttcttacgctcacgccgccggttgccgctcatccttctgccgctccgctccttttttttgctgggagtaacgtggtgctaacgtcactccctacaacgaatttacttctaatgttgtaataacttacttccattttgtgctaagttattcttatgatttatgtaaattaattttatactttattgaatttacattcataaatgtatttacttaaaaatcttctctacactctgcttgtgaattttctctacatagttgtcaggattatggataccacatacctaatagtagttgactaaatcttggcaggatccactacataccatgtcttatacagaaactgacctcaagggagttccggataaggaaagacaaccagagttctacatggaaacgacaaggactacttggactgtatccatattggtttccctagttctacttagacaaggggacacctatgggtataaatacaagccccctaggaggacagggggacaaccatgacgagacgatcaacacccaccatgggacagagaaccaccatgaaagacacccatgacaattaacatatgcccaccagaagccacaacatacaagccaacatacgccaagacaagccgccggatatcgacatcagagatacgcctggatcgaccctatccggtaccttcagaggccggccgtagggatctagcattgaatctgattccatcgggtgcgagctcgaggaggaaggctaccctgttgtcgactatgagtcagatcatcagaccgctatgtcgacaacagttagataggctaccctacatattgtactagtgtgattatggtgaataaaaagcaacatcggctccagccaacaggatgtagggctattacctgatagctcaggggtccgaacctgtataaaaatcctcgtctccatctcttttaccttagtctcgcgtataccctagcaccgatgatccccatactgtccaaataccgtagtcgagacatcaaacgtcgacagtggcgcgccaggtagggggattttggtgcttcaggatttcgacgagatgggttcaaaagatggattctccgacaacaagctactcgacgaattcagctgagggagagatccaacctaaccagatcagaaccatcatcatcatcgacaacttggtctattgagatcatccaagcctcaagccccgcggcgtaccaaaagatgtcagattgcatgatatcaaacgagtacgcaacaaggtaattggtagattggttttttaaattgatctactaatttcgtaaatacatctggcatgtatctacaaaggtacgcaatattttatctgcaatttatcatacctattcagatcatacagtattgtcagatctataatttattatgtatacccagagcatgttctttatacaataatatctgttgcgcgggtgtccccgatgttaaattgactacgatctaacactgggggctcgctctgtcttcttctgtataaatcatgcttgtttacggtttacataatgccctgacatttacatctgctcgttatgtcctgataatactagaagatccatgcagttttttgagtacatactcgatattatctgctatatgtcttgccttctagaaaatatttttcaggaacaattgagcactcgagtaggttgtggtcgagtacgctctattatcaagaacattcttgacaaatgcggagttatcgcacccaacctaccaacgaagaccggcgacctatctcatagcatcggccatggctggactactcgagaaaaggttgttaacggataattcctcgcgaacgccgtcggcttgatcacccgacatgattgcgaacggacatccggatatgctaccagttgggtgtgtgagtcatgctggccacatgagacacacatgtaataaaccaactctagcacctccattggtattcgagagataattctacatgctcgcttgtcctcgaaccagtacgtagcaatctctcgcaccgcagcttccattggtgttcgagagataattctactcgtccgctggtcctcgaactagtacgtagcaatctcttgcaccgcaacctcagatggtcgaggtacgactatagcaataacgcagcggtccttgcaccacgacttcaaatgatcgagagacacctactcactggttctcaaccagtcaatcgtagcgatctctcgtacaattacttctagtggtcgagttagcgtttctcccactatctccatttcaagtggtcgagttacgactactgcctggtgctcgaccagcgatgtagtgtttctcccactacttccactttaagtggtcgagttacgactactgcctggtccttgaccagcggtgtagcgattctcctactacctctacttcaacaaagttgatatcaggtatacaatatcgccaagtgttttacccagaaatcccttaccacgacgacacctagtgttgaaacctatcctactgtccctttacgccatcttgacaaggccttcgaggaacctaagagaactttggctggggacgcccagagccgataaggccttgtcggatcctgtagagacaaaagaccatgtaagatctggtcgtgtaagagttctcactgtgcgtattaaccaggccatgtaatcggaaattgagttttccaacttcacggctgggggctaggattagtgcttgttcaaccaaggcaggtcaagggtccaagagccttatcctccgagaacgattctccgacgacaaggctgggggctagggagagtgtatgactctacaaactgactgatcggagtcggtaagagagaagacgctcatatacaaaacattggtctgtaaatttaattcatttacagttttccatacatattataacatgtcaccctttgagcattcgctcgggggctatttctatttgatattcttttctgagtattgatttcaggaaaattctattcgacattgacgaagactccatgtctctatggttctacacctagatcgactaaggcgagtacgacaaatgttgacaaagctccgtcgcacactctacgccttctcgatcgctcgagaacggttgctggatttcgacaaggaatacgaaatgaagagatggtgtacccgccgagataaaatttcttgacttcaatccaaattctcgattacagcaagacgtgagatttagtcgtacgctctatactttctcggtcgacatcagagattgacttagacaaaccctttcggtgcccgcacgaggctgataaaggaagtctaacgttatctctagactcaccgagaatggtcacgtgagctcaataacagttcctccgaagtctgcggttgagaatatgaactcgttcatttgcattgaagtcgggggctactgtcagggttatagataccacatacctaatagtagttgactaaatctcggcaggatcgaccacataccatgtcttatacggaaactgacctcgagggagttccggataaggaaagacaaccagaattctacatggaaacgacaaggactactcggattgtatctatattggtttccctagttctacttagacaaggggacacctatgggtataaatacaagcccctctaggaggacagggggacaaccatgatgagacgatcaacacgatcaacacccaccatgggacaaagaaccaccatagaagacacccatgacaatcaatatacgcccactagaagccacaacatacaagccaaaatacgccaagacaagccaccggatatcgacatcagagatacgcctggatcgaccctatccggtaccttcagaggccggccgtagggatctaacactgtctctgattcagtcgggcgcgagctcgaggaggaaggctaccctgttgtcgactacgagtcagatcgtcagaccgctatgtcgacaacagttagataggctaccccacatattgtactgatgtgattatggtgaataaaaagcaacatcggctccggccaacaggatgtagggctattacctgatagctcaagggcccgaacctgtataagaatcctcgtctctatctcttttacctcagtctcgcgtataccctagtatcgacgatccccatactgtccaaataccgtagtcgagacatcaaacgtcgacaatagttttttttatttcaacttagtcataacgtaattatttctactgttatagagagttagttctagtgcatagctaagttacttcttcaattttaataagttacttttaaattaataaaaatgtttgaatatattcaacatagatcttgttttgtcatatattttacgtagaatacaatgatacaaataaatcttgaaaataatatacaatttaaaagatataagtcattaaagagattaaaaaaaagacatgcatcataggctaaaggggtttaaacattccatatgcatatcttgtttattagttcctacttaattagtatacccttgttccctcaatagatagatggagtgatgagagctagaatatatagcatacaaaattgtgtacaaataaataattattgcgagctgaaaaagggaaaaataaaggaaaaaaagctagctagatgatcgatcgagagccggccagtaggtaggtggctagctatagaaatcggaggtaacgtttgatgacttcatcgaccatgagcttgtaggccctctccgtggggtggtagctgtcgaagaacacgtactgcggtgggtcgttgcacagcgggctcgcgaagttgcagagcacgctggctgccaacccgatgtatccacagcacgcatccttcccgttcttgaacccttcatttttcattagtgaattttatagtatgaaatagaaggaataaatggtaacaaaaataacaaataaaacttaaattagtatacatatacttgcagttaagtttgttatttttttacaactaatacgtagaagttaaatttgaacttccatgtttgtggagtgatatactacatattaatttatcttgtaaatttttttaaaaaaatttaaaaaatttattcataactatttgattgacatgtaataaacaggtggacgtccactcgggtaattaaaaatcgtctccaaagtttgagtgctatccgtgtggatgcaaaaagtgcatcatgatgttagaatagattatggatcgttcgtcgtacctagggcttggtatcggtgcatgacgtcggctaggatgttgtagaggtcgacgaggacgatcttgacgccggcgagcttcgcgttgagccggccgatctcctgcccgagcttgcggttgtacagcagcgccacctggttgcggggggtggcgcactgccgccgcacgccgccggcgatgatccgctgcgccgggacgcacccgacgggcggcgcgccgacgacgacgagcaggcgcgccccgcgggcgacgagcccgcggacggcggcgaccgcccgcgccgccatgaagtcggcgtactccggctccgtcatgccgtcggagacggtgaagtgctggatgacgtcgttggtgccccagcagaggaggtagagcgcccggtcggggacggcggcgccggcgaggcgggccttgtactcgtcgaacagctgcagctgccgctccaccgtgagcggcgtcatcatggtccggcaggtggcgttgtcgtagccgctccccgccgacgcgaagctcacgccggtcttcagctcctccgtgctcaggctcttgttcaggtacggcggcaccatctccttcacccccagcgctgacgctgctcgccattgttggatccatacatgcatgcaaatgatcgaattaacatgtatagaatttatttggcacatggttcggggtgtgtcctctggagcacatccttccacgatagccagttgtaggtatcgatgaaaaactttataacattttctttctatcttaataacatttggataaccttcttctgtcatcccggcaaagaaagtgacaacaatatcatctagacgaattacatgtactataaaattgatattttaaaactattttgaggacgagatcttaccatatatactctctgttttcaagagttgagtcgaaatatcccaagaaatatcagtggtcaaagtttaacgcattttttaaggggaagtttaaaccaattgactgcacgcatttaaaaaatcatccattttgtaacagggacatgtaaagccgtaaaaatatgaattaagataaaaaaatattatggataaaacttttatatctatgttatacacggtttaaaaataaatacttcaaaataaaatacatgaaaaacccaaatcaacactaaaattaaatacttacatttaaattttcgcaacgcaaagagcctccgagttgttactgtccctaggacatcgcagctaagctctcgcgtcgccctccccacgggcgacacgagaggagacgctgccgccgtcttcttcctcctcccctcctccatctttgcctcgccgccgcttgagcgggcgccggcaaagccgcacgcccgcggggatggcggcggcggggcttcgcccattaagcactcgggtggcccgggagctggcacggcggcgatggtggcaaacgtccggatccgcgcccgcccggccggatccggcggggacgcagttggcggcggggcggagtggtggcggcggcatctggcggtgtgtggtggcggcggacagggctggcggcggtggaaacccgctcagatccacgccgttttggccggatcttgcggggctgacgccgagcgacggcgggcggcggggaagcgggcgtgctggtggcggggaagaggcggtggcggggaagaggcggtggcggcgacggttgcgcgggcggcgcagctggccgcgggtgaggccgggcgcgggcggcgcggccgggcgcgtcgg

SEQ ID NO: 7326 - DNA, 26560 bp, Oryza sativa
caagtttcgaaatttaacctctatgagtaattaatttgcggtaggaatttagatttatttaagaactaactaaatgtgttgaattcttagtaatttatttaggagacataaaatatcttaggttgagggatagtcctctttcgcgaataatatagttgatgtaaaaaaaattcgcccctcgcgctcgcttttcgatttggactttattggattttattcgaattctaatggaattcaaatcaattcttcgcacgtaattttagagtccaagggagttgcggatccgagcgagggtcaagacctgcaggactatgagcaaggcaagtcatcactattctttgaacatgttgatcccaattgcgaaattgttttgtttaaaaataaaattgcatgcaatgatgaacatcctacttgtgattatgccatgccttgattattgtttacccttaaatctttgtaaccatgattacgtatgagtccctagtcaactatgaccattgtttagaaatgctatgctagaatcatgcatactcatatttatcaaatgctttatgcttgggcaattacctttgggaaggtaattgagatgcggcatgtggagacatgagcgccacattgccatgatattgatgacatgatttgtgaaaggaaaataaagtgaaacaactgttttcgactggggcggacggaggatttgggtggtatccggaaaaggctagtaccgtccctggtcaattaaggaccgagccatgaagttaagcatgaaacgaccctcgtacaaccgcacttctcgtatgggtatagacctagcggagtagatagctgagcggaggcagtatccatgcataatggtttcttgatgtgtgaggctggggctctacggtggggcagccattggtaggaccgcgaggcgggtgtctacaatggtgtcgccatcggtaggactgccatgtgagaatctaaacataattataacttaatgcatgtgtgagtcttcccttcccgggtgcgccagaactcctctcactgctagaaaccgtgtacgcctagagtgcatgaggatgtaaagttcatggagtgggtactgccaatgcgaggttatcgaaaagctttgccgtgacgcgtctcatgtgttgggacgaggctcatgtgttgggcagtcgcggagtgtgggtaaagtgtacatccactgcagtgtgagtaaaccaaatctattcgaatagccgtgctcgcggttactgagcaccgggacgtgtattacacttggttagactctaaattcttaacttgtgtgggatgggatattgcatgatgatttttatgctgttggagccatttcctgggaggcgggaaggtggacgtcctcagaaaaccatgacgactcaatggcgggaagctatccttgggattacaatggatggtggacagaaccatcgttatttaaatgtgaacactggtactaaaatttgatcagtcaatgctaggtcttaggcttatgaaaagaattacaaaactgactttgcgcaaagaaccatagccatcctttgaatacccctatcatgtgcattgttgctatgatggcttgctgagtacggttggtactcactcttgcaatatataaacttaatcagaggccggagacgaagcttcagaggatccctatgcatactatgaggagggtgatgaagacgatggcgctcagtaggtcttagttacggtcgttgcctgtggcaatggcgtaccgttgtcttatctacttctgcttttggaatgtattccggaccgctcggtccgatgatctaagactatgcctgcgggcttatgatgtaataattcgcactagactttcgtgtatgtgcatttggtatttcagctatgaactcatgtgtaccagactacttgatctagggaaatggtactgtttacacgattgattcctgttataaaaacgggggtccacaggagttactgggctaggctcggacaagcaggctgtcctgaccactgatcagtccatctatatttacccgttgtactaccaaaggaattattagtaacgctaaatccccaaattcataaccagctgtagtaccaaactagaaaataggagtgccaattggcgcacctattaataaagcctatggtgatattgttattcatgttcgagatacataaagctatagtaccaaactagaaaataggagtgccttttggcgcgcctattaataaagcctgtggtgatattgttattcatgttcgagatacataaattgatcattttttttcttgagatttgaagactctatacaaacgaacggaagcaaagagactaaaaaggaaaatattagaatgaaattcacctccagaacacatagttatatagttatagtacccaccggaaaacatttagttagacacattccacaaagtcaagttagggtgagtagtgtaaaataagtcattaagtcatatgcaaatatatgtgaaattcatatacttaagagctagggagattaaatatatggggttatctacataaatagttttatttttattgattaattctaaaacatatatgaaatggaatatttgttatattcctatttgaaaaaaataatatgcaaatgtataattctaacaatatatgtaataaagtggcaacaaatcctaagtgatttttacagttggatcactcttccaaataaaaaaaagcttagggtctttaagtaaatacctctctatgcaagttttaagtggatcagcatatgagggggaggggggttacatccatttaatccaatctaatcgaaatgttctggatgctgagtttgtcagggttatggataccatatacctaatagtagttgactaaatctcggcaggacccaccacataccatgttttatacggaaacaaccttcgaatataggaggagttccgcataaggaaggatgaatagagttctacgtagaaacgacaaggactactcggattgtatccatatttgtttccctagttctacttcgataaggggacacctatgggtataaatacaaggccccctaggaggagaggggacacggaacaatagatcaggacacaagatcaatatacaagccaacatacgccaagacaagacgccggatatcgactttagagataagcatggctagtcccctacggtgtctacggatactgtcaggagagacatagcgctgtctttgatctcgccggatgcggattcaaggaggaaggctaccctgttgtcgactacgagtcagtacgacagaccgtcaagtcgataatagttagataggctaccccaaatattgtactggtgtgattatggtaaataagagcaacgtccggctttggccaacaggagtagggttattacctgacaattcaggggcccgaacctatataaaaattctcgtcctcatctcttttactacaatcttgcatatatcctagtactaacgatccccatactacgcaaataccggaatcgcgacatcaatcatcgacagagttgttaaggtactactttttctttaaaaaactgttaaggtactacttgcttctagaattatcacagaacttgtagttttctatttttcttgatcttctgtatttttttccttagacaaaatccaagatttatttgataagttaggggtgccacgtggcccaatcaaaagacggcataaccgccggctttagattagtacattagaagtagcaatattttgtttataaaaaaattagcaagattttaccttaataatatacgtctcaattggttgtctcttttgtacatgtcctttgattatttcttaagcaggattagggccagccctgggtctatgtagccaagatgagcgccgcgggcccatgattgtaggggcccatgatggtggggggcaatacctaatactagtagccgtagtacatgtctatggcctacctaaaagcggaaacgcccgagagatgagaggaggtgcagcatcgctgcatcgttgcctcagcaacttggcagacggcatcgcatcgcacaggcaggcgcacagcaccgtcgactcgtcgccggcatcgcatcgcacagcacacaagtcaccactcagctgcctggcgccagcccgccggccgccagccgacagccgcctgcccacctcccgcctggagcggtggagccctggacgcaatcagccaatcggcaacttggcaagagtgcaagaccagccatccaggtgtccagccgcctgctcatccgcttcctgtgacttgtgacttgtgaggtatatttttagtttaatttactaatttaatagttcatattcttgcactaagatgatttcttgtttttatgattaggtctgagatgttgcccaagaagcatttgttaggttctgagaaaaggaaaaagagaaaacatggtgatcaattggttgaaccgcaaaggggtgctttacataagttttttttgttggttcaagtaatgttaattttgcatcaagaaatgccccaagaagtatcttttcatgagaagcaatggatatgatgggttctattctttattaaggtaatgatattcgtactaaggtacaaatatatcgatattttggtcgactttatttctcgataattaccagatatgttaaatttaatatatggatgtatttgctttcgttctgcaagtaaattaaattagcgtgtgtgtgtatatatatatatatatatatatatatatatatatatatatatataaaccatgcatatatatgtttcaatacatatatatgcatacatatatatatgtatatatatatatattatattatattatatgtatatacatgcataatatatatgtatttatacatatatatgttatgcaaatgcatatgtatatagatatatatatgaccaaaatatatttacattatagaaaaatgtgtacacatgcatatagaaacatatgtagtcatgtattaattacaatctattatatgtcctagctagctacgatttcgacgtagtagtactcgctgctagctcagaagctaaggaccggtaaattgtgtttccgtcgtagtagaattcacccttgggatcaaggatttcttcgttgatgaatcccatgagttgttcttgaaccgccgcgataaattctttgtgtgtggtcaggttatccctcatgcgaataaactatatgaatgtatgaaattgattagtaattaaacaagaaatcgctacgtaatgaaattttgaatttatttgtacgtacatcgagctctcttgtggtgatgatttggtctgcaaggcagtggcaatactcgcacacgtaatagccgtacaagttagttccctgcttttgctttgcgcactacaaataaatgacaaacaacgagagatctaattaatatacacttgtatgtatttgaatcggagaaatataaatgtagagcatgtgtactcacaggaaatttgaacttccgcctaagtctttctctccatttgccgcggaccaaatgacggaaccgataccaagccctacatggagtttaaagctatgattcgcagtagcagttaacataccaagattttcttaattaacaaaggaacttatgacggtacctgtctataagttcgaaaaccttgtcaaacgtagactcttttttatccattgagtcatatacgttgacggtgcaggcctccaggtcgaagagtaaaagcacccagtggaatctgcaatgtgcgtgggatgcattacatatgaaacacttagcaagttcgtacgggaatgaaatttggtatgtaggaagacagtaaaattaaactaactctgtgttgtatggcaacagtatgaacgtcttgtaatgctgcgccttcaggagatggacgagattgtcctctgtttcttgtggatattggtcgagcattgcgacgtttactttccgagggtcgatgaatccagtatcgaaaaccctccgccgtcgggccctttgaatctcctttctcctttggttccgggtgaaggtcgccgcgttgttccatatgcttcagatcattacgtgcttccagtgtatctttcgactttccgtatacacctaggaagccaagaaggtttacgcaaaggttcttagtgaggtgcatcacgtcgattgcgtggcgtacgtccaagaattcccaatatggtaactcccaaaatatagagttctttttccacatcgccgcgtgaccatcttcgctctctatatgctggcttccaggcccctttccgaacactactttaagatctttaaccatagcaaacactgtttttccgctgcgatgtttaggcttcgtacggtggtcggccttatgttcgaagtgcttgcctttcttccgtaccgggtggtttgctgcaaggaatcgacgatgacccatgtatacaaccttcctacagtgcttaagatacatactttctgtttcatccatacagtgagtgcaagccttgtaccccttgttggactgtccggataagttgctaagtgcaggccaatcgttgatggttacgaacagcagcgctcgtaggttaaactcctcctgtttgtcctcgtcccacacggggacaccttccttcttccacaactgtttaagatcttcgaccagtggtcttaggtacacgtcgatgtcgttaccaggttgcttggggccttgaataataatcggcatcattatgtacttcctcttcatgcatagccagggggggagggtgtagatacacatcgtaacgggccaagtgctatggccgctgctcatctctccaaaaggattcatgccatccgtactcaaaccaaaccgtatgtttcgtgcgtcctttccaaattctttaaattttctgtcaatgtttcgccactgcgaaccatcggcggggtgtctcagcatcccgtcctgttgacgctcttcagcgtgccatcgcaacattctagcattccccttgttcctgaacaaacgccttagccgtggtattatagggaaataccacatcaccttagcaggaattctcttctttgttagctgcccgtcaacttctcctggatcgtcccgtctaatcttgtatcgtagtgctttgcaaacagggcatgcttctaggttctcatactcctcaccgcgatataggatacaatcgttcggacatgcgtgaatcttatgaacttccagtcctaacgggcagactatcttcttagcctcgtacgttgtctcgggcaatttgtttcccccaggaagaatgttcttgacgagtttcaataaatcgccaaatgccttgtcactaacccatttcttgccttccattgcaacaactccagagtggtatccaactttttgtgcccctgctcgcaacctgggtacaacgaagttctgtggtcctccaacatcttgtccaatttatgggcctccttttcactttcgcagtcctccctggcgtcctgcaacatctgaccaagatcatccgcaacgtcgttaccatcagcagctatttcctcctcgcccgtttgatttccttcaaatccaacatactgagcaaagtccggaatattgtcgtcttccacttcatcttcttccatttcaacaccttgctctccgtgggatgtccaataattatagcttggaatgaaccccgactcaaacaagtggaaatgaatagtcctggatgcagaatactccttctgattcttacacttattgcatggacaacaaataaaacccctttgcctactagcttcggccactttcaaaaaatagtgcacgccgtcaataaactctttggaccgccggtcagcgtacatccattgccgatccatctacatgagtcaaaaaaaccgtacacaaataattattcttacaataatgacagtcatacaataattataagatatctttattcatacaaaaatcataaaatattacaccaaataattcttaaaaactatttgtaaagttttaaactaattttaatgtgttttacttcttttaatttttattttagtttgttttctattatttaagattaactttcactagagttttccttctcaactattttataaaaccttgtttagcaaatgaactaaatttctatatattctttcttccccacacacattttctctctcatcaacttacaactaaattttggagacaaaaaaagtgtgcaaaacataggtgcaaatgtagtatgacaaaaaaaaatattggaggatgaagttgcaaaccttttaggcacctctgatttgtatgtaatcaccaaaataaattcaatagaaattttggcatgacctcccctcttttttgaagaaattttgaagcttgctcgggcagctggaggaggaagaagacatatatataggggtgggactttagtcagggttggtagcattaacgggggataaagatcaccgggatctttagtcgaggttggtgttatcgataggcattaaagctaagatcttcagccccggttggtgttaccaaccgggactaaagatccggggggggcctgacaggccctgacagcattcgaactgggactaaagatgatctttagtcccggttggtaacacaaaccgggactaaagatcaaatatgcccgttacccttttgaaccgggactaaagatcatatttagccccggtttttattgcatccgggactattgtggaaatcggccgaccgacgaaagatggtttctccaccagtgtgatattactcacttttcaacatttttactttgaacatatgtatgcactgatacggcatggcttgtttttcttaaaagtaatctatgtacgtaaaagtatgcaaccgtaactcttactgatcattttttcttgtcatatagattaagtgcttaaaacctattaatagttaaagggataagtccatgcttccccccataactttgcctatgtctaaaacacaacgaaaactacaaaaccgggtaaatgacgtaccctccatttatcaataccggacactttaccaaaccaaggcaggttttgcctacgtggcagcatagtcagcaaaaaaaaaataaaaacaatggaagcagctcatcagtacaagtcattgtcttcccctgctttctctctcaatgccagtgagacgccactgcccaatccacccacattgggcacccaccagtcgctgccgccgccgctagtgtaatgtccgcctttcccaggccgggctcgcttacatctggcagcttttataggttatagactgccctcacagactaacacaagtattttctgcacactttgtcctcactaagcttttataggttatagactgccctcacagaccaacacaagtcttttctgcacactttgtcctcagtagtgcgcacccgggaagaatttcccggtcggtcacacatcccaaattgctccaggccaaacacgcttaaccctggagttctttggagatcggctttcggaaaagaagttgcaacaagacctaggccgggatgttacagctaggctcctcaagccctcgagggacacctccactggtcgacctcctcctcccaagcccattgccgactgccaccgacaccttcatttgggagcttgctagcaacactggctcctcgagcttcaagcatcttgcttttacatgctgttggtattttttacgaccacagataaatccgcaagcccatggaataccgctgaagcacttcaccttcgggtgaccccaaaaggatatcgaactcagggaacatgtgtaatctatctaaggctaagactattcaaggacaacaactgacgataggcaggctaggctagagaggtctttctatgggttttaattatctaagctaagcaaaggtaattccctatttgttgcttcaggcaccgacccctgctggtctgctagcgtggttccggctatagctctatgatgtacccgaacatggaggattattaggacggaattcagggttgtcaccacctgccgcctacctctgacaaatccgtgggatacacaacaaacaaaggtaatctctactctagacaccacgcctaagttattaattactactctaatacttgcgtaggaactttcttctctatctggagtcctagtactagagcacttagtatgaatactaaacaatgaacccgcaaagatagaaatatatcttactcagacaaagtaattaaataacataagaaaggagcatgaatgcttactttatataagaagtttctctgaacccgaagcagagtgtactgacagctccggtactcctccagaattcctcctaggaagctacactcgttgaggtagaagtcggatgagtgccaaacttccagacactcctacatagctttctctcactccctaccttattataatgtacaaaagatacaatagagcctcttgtaattcagctcaaagttgtgtgtgttggaatgagagtgagctcctccttttataggctccaaatgacggttaggggtatggggaatgaccaaaacaccatgcaaccgcctctgggaaggaatccaagccatccacgtggaagcagatggcaggaagcggcaggaagggttcagccgaactggtgggttcggccgaacccaaaaacactcctcccggcctctccttcggccgagaggttgtttaatgggtctccaacaacctaggctaagttttggcccaattctaaatggtttttattgacttattgggcctctaatccgtgtaaacgcgtcctgaatgcgcggaggtgcattttgccacatgacggatgtgttttctcctcaaattacctgcatacacatatttcaccaacactagtggaaatgattagtaataatccctaccactaagtttgataccatgttttatttcattatatgcaggtattgacggtcagatattatgatttaaggaccgtcaacacatgctcaacaaagccaaggtcgacctctagcatttcaaaaagctcctccgccgagattcatgtcccaagcgtttctgtcttgttgagctcctccatcctaccatctcatcgagctcctccatcatcgccgcctggttgttgagctctagatccaatccttctcctcgtacagctccttcatcgccaccaccttgcgagcacagcatccacctccacctccaccaagcagctcttccatctccacatcgttggtggcaatatgagaaaatggtggctcttcatcctccatgcattggtgaggtcaaggtcgagctccgcctcctcaccacctctgatcagagcacctcctccatgcacaggccaactggcgagctcaagctccgcctcttccccccgcctctagctatagctcttccaccgcctccattgaactcatgctccccaacctcgccgccctggtcttggagatgggtcgcatgagcaggagaagtagtggtgttcacggaggcgcgacacagagtcctgacggcatctggcctctcccctttaaccgtggttgctgtttggatctctttatgagatgattctaacgggggcgagtcggcgatccttgggggagctcggcggcggtgctccatagtgaggtagcgactactctcgaggaggagctcggcagtgacactccacatggaggactcagtggcggtgctcctgtgtgttgccgtcgcgagaagggagaagaaagatcgatagagaatggaagaaagaggataagaccttgactgacagatgggccctagagttttttaaatattatcttttctgaatgaactgccatgttagttgccacgtaggccaaaattgcctgacctaaaacaagggtgttgggggggtgtaagttggacggttttgatagttcgagggtggtgaatactcggttttagagtttgagggaaaattttagacaaaggtatgacttgaggggtatcaattggacttatcgcatattgaaatttgaaacacaaatgtttagtggtgacgagtaaagaaggacggggaagtatgacttcgtattgcaacattaatattctctatatatcacctttgtacctttgtttataatatatgatgtcgttagttttggatctgacagtttacaatccgtcttctgaaaaaccaactatgtatatcacttgttctacttcaatattttaaacatgacttgtatttttttatatttgcaccaaaattttaaataagacggaaatatattatgttcaaaagtgaacaacgccgtaaactcaaaaataaagggcgtacaagtttatgtgttacgtaccgtggtgcaacttaatttaattattaatagtgcgtcatgaacgactaattaagaaaagatcaaaattaatcatatttttttcgtcagcgcagaactactgcacgttattgatttagtcaatcccttctttctattattgtccactaaacacctaaaacttaatatataatattagtatttattagtactcctaaaatttacatacaagcatgtcacatcaacccattaagcaaacaaaactcaacatgcaatcatacagtaattatatctacaactacaatttattttgttttaaaactaaacatacacatgctaaatcatttttataatatttctatccaaattattttatcacttttcgaatatctaacatatatttcgcagcacagcgttgggcattatcccgttaataaagatccaaaccaacactagtatatatagaactttctttccgtacctccgttagttagctgcctcgcagtttcggtcttttaattgcttgctcaccaagcagataacaagtcaagatcggacatatgcagtctctccaataatttgtcaattacttgctcccaagttctctctttcatcaaagtataattaataaaatatcttcatttcatttggtttcataacctgattcatgttgggtcaactccatttttaacccctttctcccttcttaatttatcggcattgctcttttccttagaaaaataactttataatttctcttcctctatactttgatcccttttattcgaattacatattacctgatatattacaaatgtgtttatcatatattataaattatttttttttcatattggtagggatacaccaaggtactattaatttttagtaagcatgtcttgttctcacccagagaacaaacgaatgtgtaaattattagatgttgatctagtccgaaagtgattgatcgatagtctcggtttattcaaatggtctcaatgtaaacacacggaaatttagcccacaaaaagatttaaagatacgtatattctaggacaagtacgcacgtacgtacgctgactgagcttatatacgtgtgtacgtacatggaaaattgttctaaactcttaagatatgtcctcccatcttttacatgccgttcgtctaaatagttgcaaaaaaaacttttaaaaaattacaagataattagtactccttccgtctcataaaaaatcaatctagtactggatatgacacatcttattgaatgtgtcacattaaatcttatatttacttttttagggacggagagaatatatagtaatatcactctgcatgtttaaatatgacttgtaacaaaaacaaatatatatgtggatatactcataggtttgttttttttcacaactcatagaaaggcatatttaaaactgtatatttctcatattaaaataatatgtttttaactatttagatggtatatgagagacggtgaaatatcgtcgagagttttagaatcctctcccgcgtgtacgccagaatagtaaatttacgtcgttgttgatggatggctacagctaattttttactattcaactacagctatcaacttttaattggtctccatgatttcctcctaattaaatacattcttctccaatgattcagctataaaaccttaccaaatccacaaagttaatcaccatatttaggtggataaatctcatcagatcgagctaagcttggaggcaagcacaaatggagctcacatggcttctactcctcgctactctcctcctctccaccactctcctcgtcttcctcttccatggcggtagcagcgccaccggcggcgagaagcgccgccgcctgccgccggggccggccaccgtgccggtgctcggcaacctgctgtgggcgaccaactccgggatggacatcatgcgcgccgtgcgccgcctccacgcgcgccatggcccgatgctcggcctccgcatgggctcccggctcgaggtcatcgtggcggaccggcggctcgcccacgccgcgctcgtcgagagcggcgccgccatggccgaccgcccggagttcgcgtcgcgcgcgctcctcggcctcgacaccgccaccatctccaactccagctacggcccgctctggcgcctcttccgccgcaacttcgtcgccgaggtcgcgcacccggctcgcctccggcagttcgcgccggcgagggcggcggtgctcgaagagctcacggacaagctgcgtcgccggcaggaggacgccggcgcgggcaccatcctggagacgttccagtacgcgatgttcttcctcctcgtggccatgtgcttcggcgagctgctcgacgagcgcgccgtgcgcgacatcgccgccgcgcagcgcgacctgctgctccactcctccaagaagctcagggtcttcgccttcctcccggccatcacgacgcgcctcttcgccggccggatgaaggccatgatcgccatgcgccagcggctgaaggggatgttcatgccgctgatcgacgcgcgcagggcgcgcaagaacctggtcgacgaccatggcgacgccacggcgccaccaccgccggcggcgagcgccacgacgttgccgcactcgtacgtcgacacgctgctcaacctcaggatcaacgacaacggcggcgagcgcgcgctcaccgacgacgagatggtggcgctctgctccgagttcctcaacggcggcacggacaccacctcgacggcgctggagtggatcatggcggagctggtcaagaacccaaccatccaggacaagctccacggcgagatcaagggcgccatcacctccaactccggcaaggtgtcggaggaggacgtgcagaagatgccgtacctgaaggcggtggtcatggagggtctacggcgacacccgccggggcacttcgtgctcccgcacgcgccggcggaggacatggagctcggcgggtacacgatccccaagggcacactggtgaacttcacggtggccgacatgggcatggacggggcggcgtgggacaggccgagggagttcctgccggagaggttcatggccggcggcgacggcgagggggtggacatcaccgggacgagggagatcaggatgatgccgttcggcgccgggcggaggatctgcccggggctgggcgtggcgacgctgcacctggagtacttcgtggcgaacatggtggcggcgttcgagtggcgggcggcggagggggaggcggtggacgtcgacggcgagaagctcgagttcaccgtcgtcatggagaagcctctccgggcgcgcctcctgccaagagccgtcactgtttgactctgggtgagctttgacatttgggggggtttattagacatttgacactctctcgctaatgtagtttcatgctttgtaataatggtattattattagtttccttttgatgaataaaagaattccaatctattttgtcatagcacttgacttactataaaccatcatttgactcgttctatcccatgacaactttatgtattggtaaactctaatttgtgtgtgcgcttattagtcttgttgcgtgacgggtttcaatgtcgtctaatcagacgaggtgacgtgtagacataatgacttctattatacgatcattgcttattagttactctctccatcccaaaatataagaacctagcaccggacgtaacatttactactacaatggtaaatgtcatgtttgttcctaggttcttatattttgggacggagggagtactctctttatccataaatataagaaattttgattggatgtaatgcattttagaaccatgaatctagatagagggtttgtagaactagaatacgtcatatattcactcaaagtcacttatattttgggccttatattttgggacgaagggttagtttagtttgaaagattcttaacctatctagacgcctctgaaacattatggaaaattacaaaaccaacccttaagtcacttaaagtttgatattctatttcataagttattttgttataaatatccactcacctactcagtatttttgaaaaatcatcgcaatacgcacgtgcttaacttaatcaatatgttttcataaagtatattcttgatatatatttttttaaagatttcacaaatagaattgttgatgagagattaaatgttgtcacagtgagtttagctatatatgtgctcaaaaaagttcaatcaaacattttaatgcaagaaaagaaagaaaagagaagagatgagagaagaaaaagaaagaaagaagatatgtgggtccgataatttttttcttttcatttacatgtgggtcctatcatttttttattttatattttgctgactaggataccacgttagcgaaacgagagatccataccgtcatagaaccgaaattgcatggttttgtataatttaggagtgaagatttctggtattggagattagcgatgtcatacaaatttgacgtaaagttgaaggacggctggtgaacttattccttatcattactcctaaacctacctagttgcaaaggcccatccaccaacatgtcttctgcgcttgtcgatcgtgaacggattagttatccgtttccgctgacgtgaaaatttaaaatttgtcttttgctttgacttattaggtcaaccgttgggctcctagttgcgctcgtccagcatggctaggctacgttgtttggttgcatccccgacccaagactgacatccagttccagtcatcttccaaagcgccggtggccggtgcgagaaaggagctcagtagcaggcacggcaatgggaagatgatgtcctagttgctgtgttcttcccaatctccattccgttattgcttatgtttctactccctccgtctctaaatatttgatgccgttaactttttatttaaacatgtttgaccgtttatcttattcaaaaacttctgtgaaatatataaaactttatgtatatataaaagaatatttaacaataaattaaatgataggaaaagaattagtaattatttaaattttttgaatagaacgaacggtcaaacgtatttaaaaaagtcaatagcgtcaaatatttagcgacaaagtactagattttaggaacagctaagcatagttggatctgtagggattcgttcattatataacaactatttatgctttccgtaggagtatgggagtgccgtttacgaaaaaaaatatagaagtaacatttaaattttctattggacaagtttccagaaatttcaggattgagatagaaaataaagataatgctggctaattcatgtattgcagaacaagaaacagccgggtgtgcattatgaccattatactaactagcaaaatgcccgtgcttcgctacggataaattatttcttagactaagtattaattagaaattttaatgataattagaatggataaaaccaccattgcatattgatatactcatgttctcataatactcaagatggacgtggatgatccgacgatcaaatggtggtgaggactgtggtaggatgtatctcataattggactcatctattgatggtggacattggcaacgaagaaaaccagaacagcagaaatacgactgacaatattgttctgatagatagagaaagaaacgacaacggcgacctccggtctgatctgggttgctcatttttttccggtccaatctggtttttcttctaataatacacatggtttttgccgagttttttttggcccggtctgattttttaataatacacacaggtcgcttattttttttcgtctaatctggtttttgcccgtatgttgtaacgggtgaaggctattttaattatattattgttatgctagaaaaatgcacatgcttcgttacgggtaaaggaacagttaaatgctataaagtctagagttaacatgtatatagtaatgtttcaagatagataaattatttattaggctaatgataatcacgccggataaaaacacgctctctctctctctcaacccttatgtgataaactgtgatatcattgcactgggtaatgatgacttggtgaggtgaatgaaatttggcctcaatgatttatcgaagcaccttcatagttatcacaaatgtatatttgtgtttggataattaatccgctctacacgtgcagaatgtgaatgatgtccctaacacatggtcccgatgattgtagcattggagaaacggacgtccaagcaacgcacctttacgtataatataagtaaataatgaatttttggggagttcattaattattttaaactacattttttatgacacttttataatcttttttcataattgatgatcgctataacattgcattgattataatcacaatgcaacagtacagtgctatgttctaaccgacaaaacctgaacagtgccagccataccatgccgttcctttttctttttagaaaacctcttagcacatgattaattgagttttattataacaaaaattaagaaaaattatctagtattttatatcaacttgtatatagaaagttttaaaaacacgctaacaaaaatcgagatagaaggaacggagccatggtgtgaagtttcacgccatgcacatattcaattttcatgttttaaaaaaataccggttggttcacgtgtttatactaattttttaatataatataataatctttatttttcgaattaaaaaccggtatactataagattttagaatcactaaaaatctgttaaagaaagaggtgcagaacttttgatgtttcagccatcggatgtgcatggtccgtgctagtggttgagagaaagaaaaattacgcgcaaatatgatttgggacgagggagggaaagtagacttattctagggcctaggtcaacatatatttatattgatttttgtgaatataatttaattatttttaattttcgaattaaaaactgattcattataagataagatttcataatcaataaaaatctgttgaaaaaagagaaaaaaaatcgaaggcaaatataatttgatttgggggaggcaaagtagacttattttaagagaggcctatacacagtggaagtaataataggtgcaaaattgagaggaaagtgggacttgaacccaggtggccgaagtgaaaactttctcccttaaccaagttggcagactactacacatgagaggcaattacatgaaatatatatataccgtatcagacgcggttttggagtagataagaaaagcccgatccggctgttaaccggattaaatctggattttagcgaagcgcatggtaacgacggacggaatttttcacggaagccttgcgtattttttaattattaggtagaaattcacaaaatattcacaaatcaaaccaccatcacgccgaagaaaaccgccgtcggctcaacttcgaggatgtgaggggggcaaccagggaggaaagctgtcgccgccgctgcggccacaccggggagggggagggggagtagcagccgccgttggctccacatcgggaggggagggggcagccgctgccactacgccgggaggggaggagcagccgccatcacgccggggaggggagcagccgccgtcacgccggggaggggagcagccgccgccgcttaggatttgaggagacggagaggaggcgagagaggatggtggcgagagaggaggtgtagaaaaagaggtgccgccggccagggggaggcgccgtggggtgtggctgagggggtggggggaggggaggggagggggagcggtggagagggacggtgttgctggctgaggggaggcgcagtggagaaggagagaagaagatacgggcgggcggaggagagaaaaagaggaacaaaagcggagcggaagaagaagagataaggcgggcggaaagatcgagacgcgagcgcgcagctctctcgcattctcggctccgctcgggtccacgctctgatgggcgattttttttttcgtccgtgcgaaaaaaattggacaaaaaaaccggacgaaaaaaatcagacagaaaaaaccaggcgaaaaaaacgaatccgattccagtggtaaaaaagggtgcgaaaaaaataataaaaaagaatctgcccgattccaaaactggcctaaaaaacaatttgagcccggtttttttcgtctttttttctgagtgggtcatgattttatttggttgcggtttttttggcccggttttttacaccgctgtttctgatcagttttttcttggcgcgcacgaaaggattgaatcccaaatagagtaacctaatatttatctttaactattataaaaattgaggatgattccgtcctcaccttaattttcatccgtcatatgtgttagacacgtataaaaccaaattggacaaaaaaaaaaacaaccaactggcaacacaaccaaatgcccagatcgaacaaaaaaaaccatccactggtgatccgacaaaaactaccagatcagaccagaaaaaactcgacgacctggatcgtagcataaaaaccatctgtattattaaaaaaacagaccaactatatgtattactagcaaaatgcccgtgcttcgttacggataaattatttcttagactaagtattaattagaaattttaatgataattaggatggataaaaccaccattgcatattgatatactcatgttctcataatactcaagatgggcgtggatggtccaatgatcaaatggtggtgaggactgtggtaggatgtatctcataattggactcatctattgatggtggacattggcaacgaagaaaaccagaacagcagaaatgcgactaacaatattgttctgatagataagagaaagaaacgataagcaactaactagtgaatatgctccccactccactctaacctgaatcaaattccatcagacagtactgtcatttccagtattgagcaatgagcacttccaattccaatgcttgtttagctagctatatcgagaaagtctagttcccatgctctgttcagtttatgcagtgcagtgatatgtaaatcatttctaactaaatgtgtaaaacacaattcctgtgctaggtgtaagctgataggcacagtaagcatggtggtgttcagtgatccaatttgaactggaacaataaaaaccacctatttttttttcagaatctaaacaaatgaatctaggctatagctagtactagcagaaaccaagaatgatcacaatcctctctgtgccatgcacttgtatacctactgcatcattcgttccaaatgggctgttagatctgttgaccctagtacaagcagcgagtaccagcacccaaaccaactatatgtttgattaacctcttgggcaaccaaaggacatgcaaagcattatcacaaatgacacattataccaaagtgaagtgattcttcagttttccttcaccagatagacaacatcgaatcacatgttcacagcaaacacaaaaggacacaaagctagcacctgcataaggaataaactaatgcggctaggttactactgataggtacttaattcaattaagcatgaccgaaccattagtttggatcgatctccacttgtaaagagcccacataaaaggtttgttttggatttatcttcttcttatgccttggaccagaattagtagcaactaatctctccaatatttgaaccatattcttcaatatcaggcaacgcaccagcaaatggaaccttaggcttcttggacatatcacatgggggcaacagttctgcggcttctgccatcaataagcaaacaaaagccaattagccacacaaatatgcaaatggaaacgtgactagatgagcgatgaatcactggaatccatgccaaataccccaaaatactgcatttccttcaatattagaaaaacagtcatatgatccaccaaaggccaaatcccccagattgcacgtcataaaacatctaactcaaatgaagaacatgtgtgatcacattatgtcacttacaagaagttatatagtcattctaaagtatgtacatatctggaaataaaactgacctatcaaataatactactcaaatgtacatagacaatcggaaagtaaagcaactccgggacaaaagtacaacttcatgaagaagcataaagaaaatacacaacacagtcaatacatataaaagtatcgggtaaaaatactgcactggcttcaagcttctaagaaggccaattgagttactagtttgatatttcaattggttcaggtaagtttttcatgcggttgttgctgattctcaaagtgatatcaacttatggtaaaaagatgtatactgaagccatgtcagtatgtacacgttagtactaccgcaaaacaagctgaacagagacctaaaatttggaatagcatgtcatatgcaggacagttcatctaggcatcaagcagttaaaaggaacaatgattttcaccgagcaaatagaaggcattcacaaataaccagctatagaaaacaacatgattttgctatcgtacagtgtaaaatggcatgggaagaaattacctttagtataaaagctagagaaaggataatacaggcctcctttcaggatttggggaatattcttgaattgcattgactgcatattgaccatgaagaaaccaacatgcgtgctcaaaaataccacatcatgttcctctgcaaagcacagaatcactggtgcccatgtctcaggtcctgttccgaaagaaaggagcctgtccaattcaatggttttctccagcacccatccagcaataccatcacgattggtcttacccttccatacatttagactgaaatgtgtcacagcaaggattacaagcccaccaccatcctctgctggtgcaatatggaagccgccatacgaattggtacgcaaatccggtggcgcgttaaccagagttgctgtctgtttaaccaaattgaactgaaggattgggcacccatgatttcccagcaaccagtagaggaaatccccatccaggatactggaaaatgacatgtaatccccaggactaatcggggctgagaccacatttccccaattgccggtcttggatgagtaaacgcagatgaacgccactgtcccgctcgtgtcagttcctaccacggccacctcgaatgggttggagtagcagccgtcgccgtcgacgcagcgcaccgacccatggtagacgaccatgtcccagcgatggaacagcgccgggatatccacggcgcggcggtcgccggtgaggggatcccacaccatgagtaggcgccgcctccggctgtagtgaaggacgcggccatggcggcatccgaacagctggtggtagtcctcgccgctgccgccggggacccgccatgagaagcgcgcgggcgggatgcggtccggcgagtccagcgtggggatgaagatggggtatactgaatcttccttgaagaggccgaggagtggtggccgccggtggcgggcgcggaagcggcggaggagaggaggcggcgccagcgggtgcagacgagggaggcgcgagggagggaggacggctgcggcgggaggcggaggaggatctccgagaggaggtcgtcgttgtcaagcggctgcggcggcgccggcgacggcgaggtggacatctccgtctgccggaaagtgggatttctgtctgtactgtaccgctgtaaggtaacaccgtaaaacacttggatgttggatcccataaaagaacaaaagaaaaaaaagacttggatcgaaagacaaaaaaataagttgattttttttaaggaattgctaacattatgtcgtcagaaaattcatccccaaatctggtaaattttactccctccgtccaaaaaaaagacaaaccctgatttccgtgtccaacgtttgaccgtctgtcttatttgaaaaaattatgaaaaaaattaaaaagacaagtcacgcataaaatattaatcatgctttattatctaacaacaatgaaaatacgaattataaaaaaaattcatataagatggacagtcaaagttggacacggaaacccagggtttgcctttttttgggacggagggagtaggtcactagatatgcttcgtgatttgtgctcaatgtgcttttttctccaattctggcgatctctttctcccgtgctggcgacaacccaagctgcgatggagggccaatgaattagggtcccgggttagggtgagggcgggagggataggatggggaggggggagaagagggaggtcgtcaggtccagtgggatggtcatgggagacaacggctcggtggtaggtggcggaacagacgggcaatgaggcgccagcagcagcaccgaagccgaaagggggatgggggagggcgatggactggcattggtggcgggtgcatagaaagcttgtggttaggaggtggtggtggatttggcggcgaggagccgtcggaggcaaggaagacagcggagcgagggcatctcgccaccgacggctcgaggaggaagaggggagggtggcaggaaggaggctggctggggaggtgttgacgaaaaaaatcaaacacaccggcttgggagatctgcttagctcttgtgcagatccaaatcttgatgagatgcgggcgtgccagccagtttgatcctgcaactgataagatatgcaaatagtagatcaaaacagccgatcggctgacaagccgatggagtagttccagccgatagccgataatagccgatgccgacactagccgatagcgatagggtttaagcaatcagctatatgtccaatgtagataatgatataaaggcaatcggctgatgatgatataataaaataacaatataatacagtataaaccaatcggcaaataatgatatgataaataagcatcgatccgaaggttaaagcatacaccggctggaggtctgatatcatgaaatccacaagattagattaaacagtgaaacctttgttgtcatcggccaaatccaacttatatgtatatgcaatccttatgagccgatgcaacgtccagataactcaccggctgaaacctcgatgaaacccttattggcaatcaagaagcaggctagagattatggttctaagtatgacttagtacatcaaacttaactgatgtagcactaagtatgaaaagaaacataatatctagacaatcaagccgttgactgagttttcagggtggtagatgtctaagctaatctaatctagcaacgcaatttagccgataccagcagaaaccctaaaacgagaagcagccgatagagctaaattgatatgctaagactagattaatagagacatatgttaaataggtaggcaaatatatcatccaaaccagagcaatccaagaggtcgaatgtactgatgcagccttgaacgacaccgacgtaaacgatacaattccctgggcaggcggaacattggacttaccccttagccggagatcgaacaccgatgcagccccgcgtcaggtgccaagtcccgccggacaataaaataaagtagaaaaggtaaaaggtggcgatgcgctgaattgtattgatcatgaagataaattacatagaccccaggtgtacatatttatacccatgggttgatacaagtccttgtcggacaagaaagaaactttcctaaaaataaaagaaaaagataaagtccttataggacactaaacacgctttcctaaagataaaaggaaactaacaaactattcctaattaatagataacttgccatgccgcattctctttgaactcggtctcttctggataagcttcctttagtagatcaatttccttaaccgaatatagcaagaatccgacaactaacgacttgacaactctcattggctaatctcaggacttcgaagccgatgctgactctaagccgatgactactccgggcttaccaaatttcactgttaccaggaggcctcgccgacactttttggctagctagtgaggccgagcgggtggagcgtgcgctcgtgcgtgagggaggggagcaaagcggctgtgggagtcaagattgaggtaagagggaattgaagaagatattagggttaggtgttcactacaagaatattaaagggatattagggttaggtgttttttttttcaaatgacatatatacagactctttttttatcaaacatagtgtagtttccatgaagattgcatatgttttttttt

SEQ ID NO: 7327 - DNA, 42522 bp, Oryza sativa
  unsure (1)..(42522): unsure at all n locations
aatagtacttactacatcttcctatattttctttaatttgatcagaccgtacaatttgtcgaaaataaaatgtatgtgtatatgaaattaaaagctagcacgccaaataataattttaagagagttttacatacgccattaaaactttgtaaatctttgcatatgccattatataatccaatttttttgtgccgtcgaaacaaaggagattggacctcctataccactagagaattagattgagaaggtgagcatgaaagagttaggggaaaaaacaaaatgccctacattccctacattcccatgtggtcctacatttagcacaaccaatctctcttcttcccaacctgagcctttgatgcatcagcatttacttacctaatgatgatgcaccaatttctcatctccgacaccagcacctgtccagattaactatttacaaatgcatataacaacctcaccactagggcaaggcatgcgcccattacgtgttcctagctagtttgagcgcaatcatcacgttcaactcgcatcagcatttacttacctaatgatgatgcaccaatttctcatctccgacaccaccgcctatacagattaactatttacaaatgcatataacaacctcaccactagggcgaggcgtgcgcccattacgtgttcctagctagtttgagcgcaatcatcaccttcaactcagcctaatagccatgttccattaaccactttatgggagaccaagatcactgaccgatcaccttgagccttaaagccagagcatcacaggcctctctaggcttaaccatgcactatcccctttagcctcctcatagcttgttagtcatcatcgaccttgtagagcattcctgttgccacctaactttgtttgtggacaatatgtcgattctttcctgtaagacctagctgtagatccccaccaaaaagaaaagaaaaactagtacaaataaccttgccattgcccattgcatgttccctaccaagtgaccctgcccatgtggtcatatggacatgaacaagggtagcaatggcaaaaacacgttgtcactaccgttgttaggaacattgtgggtcattgcagtttttatgtttcaagtgtgggatgatttccatgtagacaatgcctagttggtccagtagtgcttaagaattgaatagtcgaataagcatataacaaagataccaattttcagagttagttgttggctggatccaacaagtcaccagtgtcatggataagaacataagctattttgggtggaagcacaaaaatatagttttgaagatggcatgcaaaaaagaaaatgacacagccgctgccacatgcaaaattttctcaaattttagtgtcttacaaaaacataacaataggatgtggccacattctatattccaaactggtgttaaagcttaacttataggcataactgttgcactcccccataaaaatgagcaatcatgtttctcaagttgtcaacaagtattaagaataaatcaactcatgacaaaagttgactagtttatcctgagctgtttgtattttagtgccagttgcatgacacttgcttacaaaatgatagaccaatctgaacgaataacatatgggctaacgaattatgttaaaaaggttagaaaaacatgtgtacaaatggggatttaagttaatgatgaccgatgatcattgtccctttttatgaaaacatagaacttatttgaccatttaaatagccacaatgtcatgctagaaaaaataccttggcaatcatttaccgttccattagggttaaatttccaattattaacaccaatcagaacaacaaaacaagagtcaaacatcaataatcagttctgacctgaaattattattcgttattagacattgcacaccctaagcctgaggaaatgttctagttctgatttgttgttttaaattttaattatattgcctggataatcaagacagttgtattgctctaatagcagaccaggtcctcccaataccctaaagcataggaaaggaacacacagacaataagtctaaagagttacctgtgcagggaacctaaagcataggaaaggaacgcactgacaataagtctaaagagttacctgtgcagggaacctaaagcataggaaaggaacataaaacataggaaaggaacacacagactaaagagttacctgtgcagggaattttccatggaacgcgcctcgcacaagatctaaccctccctttgtcttggccttgtatatcccatagagcagcttcaggtcgaagtcatagaggaacagttttgcccctggctggatcttctccaccacatcgatcttccccttaggcaagccaaacacaccattctggaagcactccggctttgtcttagcactgcacatgaatataaacccagcttcacccttcctctccctcgctttatcgtccttcttttccttcccctttattctccccttcttatcctccttcatctggtccccctctttcatctttgtcttttcctttctgctcatcctctgtcctccattctccttggccaccgctgccgctgggctgacctcagccggcttcagagggggtgccgatgcagtctcagcagtggcggcggcttccgcagctgccaccttctgcatctctggatcggccttggccttcttcttaaacgccttaggcctcacccctctgggcgtggtcttgggtgacggaagaccagaggacgaagctgcggccttgcccttggcattcgggttggccgacgtcttcaccatggctgatcgaaacagccaaatcaaaaaaaaagtatatagaataccaatataccaccacagatgattctactcaaaccaaaccctgtacgggcataaatcgtttaattcgatccaattgaacaacggaaaaaacttgagggaaacccaaatccggacctggataaggggaggggtgcctgcgctttttattacctgaaaaagtaagagacgaccactcgtacgaccgcgcgtcgcgatgatattagcgttgggacttacgagagatgtccccaatctattatactcttattataaatcggattcagcggcgacggggacgactaataagatcggattcagcggcaacggggacgactaataagatcggattcagtggcaacagggacgaccccgagactgtgacagaccagtcaccgaagttttccacgtcgtcggtgcctgatttccgccgtcccgggccccgatgcggcggtcctagcagcgaggcgactacgctacacgagtggagcagttgcgcggcgcctaccagaggagaaggggagggacggagggagcacctggattcctggagttgtgcgcctccccgtccggactccggactcgcgaggggggagatcgagaggcgcccgcctgccgctcctccgagcgctcgaggagaccggttcaactgaccgacggagcggtggctacaaggaggcggatttcttctaggaataaattcatcaaaggtcccttaacttatcaacgaatccgattttcgtccttcaaccgcaaaaccagatacaacgggtcccttaactatcaaaaccggtgcatattaggtccctcggcggtttcgatggcggttttggctgacgtggcgcctgcgtggctaattttgactcggtcttgatctgacgtggtatgacgtggcgcttacgtggcaatttgacccgggaaaataataaaccccgtgggacccacatatcagtttcacataaaaaaattaataataatggtggaacccacgctgccccacatgtcagtctaactcacccctccttttctgcttcctctctctcctctcttcatctctctcttgcgctaggggatgcggccggcgacgacggcggcggaaatggataagagtgaccgctaggggcataggtgtgacatcgccgggggcgcttcgaggtggaagtagactcttacgacgtggccgtcggaggtgagcgaagtcatcatggactcacgggattggcggtgtcgtcggcagcggcggagcaggagttgtagttggagtcctcgtcgtcgacctcgagttcgtcaatgtgctcgagcatcacccaccattagtagtcgccggcagcggaaggtagcgccgccatctcctgttgggtttccatgggccacggcgagcggatcgatatgggttcctcgtcaatccggccggaacggtgttttcttgcccaaaacaatgatcattcattcattcatcaacctcgtcataacacaagcaaatgatgatgacgaagcaaaatatactccagtcaggtagtactagtcgctattgcttctacctttgtatgattaggcacataaacgcggagcggaggtcgtcggctctggtgccccagccaaggccgtggacgaagagcttcctgctcacgggatcggcctccgccgcgcgccgcacggtcgtcatcatcactggggtcgtctttgcagccggccgcctctcccctctcccgccggcgaggtggccccctcacccgcccacgtggacggccgcctccgaggatgcgcgcgtgtgtcggccggtcggcgggacacgttcatcccgccgccgagatgccgaggtcgacgtcgacgtcgtccgcagccacggccgcggcggcactgcctccgccgccgggctggttcccttctctccactagtttccctcccaccagccgccgcgccgcgccccttctcttagccggacaccgtcctctccccaccgcccgtgaaccgaagagaagagagagaggagaggggagagagatgaagacagagaagatggggaagaggagaatcagaatgacccagcgcaagagagagacgaagagggggaggaggagagagaggaagcagaagaggaggggttaattagactgacatgtggggtccgcgtgggtcccaccattattattattattgtgtgtgaaactgacatgtgggtcccacggggtttattatttttcggatcgaattgccacgtaagcgccacatcagtgccacgtcagatcaagaccgagtcaaaattagccacgtaggcgccacgtcagccaaaaccgccatcgaaaccgccgagggacctaatatgcaccggttttgatagttgagggaccaattgtatctggttttgtggttgaagggcgaaaatcggattcgttgacaatttaagagaccttagatgaacttattcctttcttctatacctgacacaggtgggctgcatggaccacttagcaagagtttttcgggcttccgacggtggtgaacgcgcaacgcccaggcccaacaggaatttttgcccatattattgctaaaatttttggaaaaattacaaattacccctcgcatccgatttttaaccctgaactctaataccgattatttttaaccctaaaatttacaaaccggatacatggtagactggcagtctagtcaatcaaaacataagaaatatatgggacccatttgttagccaaaacaaataaacatggtgggacccacttgtcagcctaattccccttcttcccccctcctcttcgccgcttcccctctctccccgtatctggcgcactgaggcgagcggcgggaggccgaggatgagcggcgcgccatgttgcggaggccgaggacgagccgcgcgccagcggtggagcccaaggatgaggtgcccgtcggtggaggccgaagatggcaagcggcggtagtacgtagcagcagcgacaccaaaatcttgtgttcctctaggcgcggctaacaaagcgtgagaaagatcgagaggggcagcagcaacgtgcacagatgccgacggcatcgaggcggaggcgaggacggcacgaccggcggcgggggcgacgcggtcgaaggcgaaggtgcggcggtggagacggccatggtaggggaaatacggtggcggggagacagggcgacgcggcggggcgcctgtagatgccagcggcttggaggcgaagctcctctgcggtggctggcgccgacgagcctagacgacgtcggcgaagctatggaacgtcgatctcgaggccgtttccctgaggcttgagctccgcccccgaccgctagctccaaagtcctcccgctctgactcttcctcctctctttctcgtttgccaaaggaggatgtgctgcttcatgctccgacacgcctggatttgacgcaatcggcacgtcgagccccgtcgcatagctcgtctccatcgccgcctctgcgctaccacgaatcgacgtagcctgctggtcttggatcccaacctcctcgcctccgcctccatgccattggcctctgcaagcgccccgccgcatcgcctcctcttcctgccaccgtatggcccacatcaccggagccatgcctgttgggattgagctgccaggaaggagaggaaatgaagatgcactaacaactgggccccactgtgttttttttcgtttttttttctgactaggctgccatgtatgccatatagaccaaaaaccactccgaattgagttaagggggggtgattcgttcggatttaagagtttagggtttgtaatatccgatattgcagtttaggggtgtaattcgaacgacctcaatagttcagagtatagctgtcaacgagccaaactcgagtgaactcgtctgcccaagctcgagctcaagccgagcctattgcaacttcgagcttttaggcaagctcagttcgagctcgagctcggctataagtagtataatatatattttaatgataatctcttgataagtataattattttctagctaatcacactaataaaagagtagaaaatgattaaaataaatatattgtgctaacacatgctaatttactgtataaatagatactaatatatatttatctattagtttattatattaataaggtaaacatgtaatataaattatatacagtcaagctcacctagactcggtagaagctcgagctcggctgggtaaagctcgcgagcttttgctcaggctcgggttcggcttgtttggagcttgagccgagctcaaatcgagcctaggacgagccaagctcgagctactcggcgagcctcgagcttttttgacagccctatttcagaggggtaattcgtaattttttcaaaaatatatggggcaattgcaaatttaccactactttgaatcgttattgcaaaactgccactagaaaattgcaaaaatgccactagaactgtcattcgagtggtatccttgcaatattcaaaaaaccggtggcaaatttgcaaatgccccaaaatatattgccaagtgggtgcacaacaagactgtgcagggtggtgaacggtgacgccgggtggaagtaatttgtgcagtcttgtaaaaatataacgccattattctatttttttagcacaaccattattctaatttgatttccgttattctctgcatatatggttgctaagtatgaatatgagcaatgttagaaagttttaggtaatacctacaaaatcaaaatgcccacggtaatgaacgggatatcatctactagtaccataatacatgagagatttcttcagttcagacagcctaaatgacaagggggacaaacacaatacagttagcggagcagagccattaactcgtctgcttttgcaagttgcaacaacagcggcaggcagaaacgactgaacctacatctgatcattaccattgaaatcgtagcaaagatcagagtccgaagttgcacaatgtcaggaactccatctcggtgtcgacgtacttggtccagagatgcttgtactggttgaaggcgacgtcgagccacggcttcatgttcccgttgaagtgtatcaccgcggctcccttgatgtcctccggcctgatgtgcgggttgtacccgagtcccatcacgtgccacgacttgtccagcggcctcgtgttgccgtagaacgtcatgagccccgccggcagaacggacgctggatcccacagcgtgccgttctcgttctgcatggcacgaacacgagcaacatcaagctcaaaaaaaccgaaagcgaattgcattttcagccgtatcgagagggatcgcggtgagctagcttaccatttccatgagctggtggaatcgctgggtgcattggtcccggcgccaagcctggagatcgaacacgttgaggccgtaggaccaggcgcacgcgcgcgggttgaaccgctcctgcacggcggggtcggagaagttgatgtgcttgccgtatcggcggaaccctccgaagcaggtctccagcgcggcgttcaccttgccgccgaggtcgacgcgccacagcccggccaggtccctctgcaccaccacgtcgtcctccaggagcaccacccgccgcagcgccgggaacatctccgggaggtagaaccggaggtagtcgagcagcggcacgtccctgttgccgtcctcgatctgcctgatgaccggggaggcggaggcgttcaggaacgggaagtccgagacggcgaggagctgcacgtgcgtgccgagcggcggcggccggcgcgcgaaccagacgcggaaggccgggaggtacatgggcgcggtgaccacgtggaagacgtggcgcgccggctcggcggctgcgcgcgccgcggaggccaccacgacggacacggcgagcacgttgtcggagaagatggcgtagtggtacagcgccgggtcggtgaactgagggggcgggacgggcgggtcgtcggggatggcggaggcgttggcgaggcgtgcctcgaggaggcgcatgacgaggcagtggagcgacttgggcgtggagccggcggcgatgcgggagttgaggaggcccgcgcggcgggcgcggaggagctgctggtcgacggcgaagacggtgtcggagagcttctggatcttggactgcgtgtcgaacgcctccttggcggcgcctgccagggagcgggcgcgcttgatttgcccgcgcgtctccttctccaagagcgcgacggtggacagggagatgcgggacgagagcgagctgagatgcccggagatagacaagaaagactccgtctgggaggcggaggccgcgctgagtttccgcgcctgggccgcgtaggcggcgagaacggcggcgtggtcctcggcgtggcggcgaatggcggccagccggaagggtgcggagttcggggcggaggcggtgcccgtcgccgacaggaggaaagcgagggacgcaagcaagaggagcgtgatcagcgccgcgagcgccgcccgccgctgcgcggaagctctgccgccgccgccgccgcctgccatgggagcgcgtgaagtcggaatcgctcgccgtcgagcaatcccgaggcgaaatgcggaggaaaagggcgcgcaacgctttctaacgccggcgaggtgggtttagttaggttctcgtgggcccttctgccagtgactcatagactgtacatttggggtttcaacggtttgacgtgagaggctggccgtgtcactgacatgtggggcttttctcccaacctccttgtgcgatcggatttgaagtgggttaatggtcagtgtgtccggtagtggcacactgagaggagcagtgagttggtgatgaccagtaaggcgccggatgacgacggccaaccatgttagtgcagaatgcagaataccgtcttctgttttgacaatgtgattgttgggttatcctagcccgatgtcagtgggtgttgcgagggtgcattgacttttttttttgtgtgtcgcaactaaggaaaaaaaggttaaaatattggttttggtttggtcgcactatcatggctagtggtggcatgtcgatgatttgcctaacaatattgttggagttgccgatatcttgacagtgtgaacgagcggactgtcaatctggatgcagataacctattcggatttaggcccaaccatcacgacaggcccagtattctaaccaaactgggcctagtttgagacaaaggtcaacccatttggtccactaataactggacaggaatagatttttatccgggccgattataggtcgaactgtcgaagcgacgaaacgtcagtcctgatgagtctctctctactctctctcctgccgcctcgccaaaacggaaacgagagggctgagggctccatggagatcgcggtttcgatgtcggcgaggcgccgtgaactcgcagccggcggtggcaggccagccgttgggcgtgaaggaacagtagcgggctaatatccggccacaagacggcgaccgccgccgggggagtgccgcttggtggcggtgcgcgccacccgttcggcggaatgcccagcgggacttcgccacggacgggcggctcgccgcacgccgcttcagtcgatcgcgagcacgatccacacctcgaggatttgtaagtgacccaatctgtacgggattccaactaattcagaattcaagtccgacgggggcggagtgcacggggacctcaccatcactgcagcgaggatccctcttgttgcgtctgctatcgattcttcgatttatgaggtgttatgtgcgcaaggtatgtgaaccaaaaaggcaacaactgtcaatgttcagaactaggaaaaacgaagaaatgaagacaatcagctgatcaggggagtatttgctaataccctacgcattttgcagtacatgcaactatggacaaaattggaaccgagctacgattacacatgagacggacgacaaccactcttgcactgcataaggaggtaattagttccatgatgcatcctacattgtggactagtagcatattgcttcctaattctgttagcttcactgttaacagaacgaaattcgaatacctcttcatgctaacagtaatactagcagacagaggtagatgctaatcttcactaccgcattctaaaaccaaacctacattactagaaacctaagtatagcacttggttgactggaaatttgttgagacttctgtcgtgcaagggagtgattcccatggcaaggtcattctccagtcatcagaaagtgttccttgcaggttgaagttgatggaccgtggaccgctgttgatattgttagcaacatcaggcatgtcgaccacacatctgttggtcatgctgctgctgctgttgcacttctgtggttggccaaactctatgtttgcagtcattctatccatgtttgggagtgtgaaggatgatgcattgaaaaccatggatgcaatgtcaatcccagctgtaatatcaagtgggattgctgagaggatacccatggtctgatgctctgcaaccggtgagggtagaggtacagatgcatctggcctgctgttgctgtcaatcatgctgagtgggttgtggcatgaaggaactgttgaaggcaagtagctacttccggtgaactggatggtggaggagatggcatcggtcattactgatgatgtgttatctgaggtatgctgacttctctgtgtggtctgcgagacaggggcagtgtaggcttcatttgtgctggacaagggaggagatacccatgagtgtgagagcgctctttgtgccgtggaattggttttcttgaaaatcctgcagattgcccaggaatcctgctcatgataagaaaaaagaagaataagattagggcagtgttttcaggtaaaaagtgcattcaacttatcttcacaaggaaatggtatatgaaattgttggtgtcatactgaattagctcggaaagcactacatatgctaggccttttgcagtttatattgcaagttttcccattgtaattatgggcagacatgtattgctcagatcatctaccttagtgccagttttggtagctatgcctaagctacttttgtagcatatgtgttaaggtttgaagttttttgttttcaaatgttgcagcatgccagttgcttacatttggtggaatgatcttctcgagtggcttcttctgtggcaatgaagggtcagtgagcgatggcagccggaactcgtgcatcatccagtcagtttgacgcctttagctgctctgcccttgtagaagacaagggacttcttcaagcctatgcactttgatccatcggaggagtagattggcctatcggttccagtggccttccagaaacctgctccagtcaccctgtttggccttgtgctgttccggtacttcctatcccttgggcagtagaaataccattccttctctccagtacttgctaactcttcacggtgaaaaaaggatttgttaagtaaatatgactagaaataagttaaatggtgtctattgtgtaacactgacttaaaacaaaacgtgagctagtcagctaggctaactggtctgactgataaaaggcatatgcatcacatgaaaaataatctatttactatccgcatgcctttttagtcttgagagcccaactgtgatacttgtaaatcaattataccacattaacactactgaaagccaaatctcagaatacatcatgacattaatagcttggtagacttgcaaatcttgctctaaatgttttatgaggcttaaccctaaaactgcatgggcttcgtgatgaatggacattatagtagtagcgcttaagaggcaggttgaaaactcttaggtagttacttttcttatttccttatcaaaacctcagagacaactaaataaagatgcatgcaaaaagtttagagttcgacttcaacatggtggcaaaaagaagaaaaaactattactactaagatacgaagtctcagcatgatggaacatgcaccatgaaagtcataaagtaaaaataggaaacatgatggaacatgcaccatgaaagtcataaagtaaaaataggaaacatataattagtgttatcttgaaagagaaaggcttcatagttctttatttatctgtgcagagaacggaaaaaagaatgaaaatggaagtaacaaatcttacttgggagatcccatggatcatacttgtagatgtccagctgcctgatgagctcaatgggaagagacttctgctggattttccttctaaggtagaatctgacgagctcttcatccgttggatgaaacctgaagccaggtagcatgacttcatcttgcttctctatgtcactactcctcatctcgtccatatcaacacagtacagaaactactggtggatggtaactagctagctcaaacggtgctcactctcacctacttctggttatcaagaccttacgagctaacaaaccctaatggctatacctaaaagattttggtttctgctggttactgaagatagaaaaggaacaattatacataagattacatataactgtagcttcctccagacctgaacaaagctagctcttagcagtacgtgctttcttatcaacaaaagagcgagctatattcttaatctgaactgaaacttgcaagaaaactatgagacagctatcacgtgctgttagaaagaagaagctcgaccttaagtttcagacttcagctaaccctcctcgcttggttgctccctttgtagggtttttatttggcttgtcgttcgcacctttgcctgcactcaggtacagttcttatagcagaattttaaaaccctcacctgttgttgaactcatgcagggtctctttggtctttactccatgacgaggatctcgatgagctgtacaacttcagcagtaattttgggattagcaatctctcttattacactaagttaactgaactgtacttatgcatcattgcttatatagcttagcatctaatctaatagagttctcacatatgcctcatttcttataattagacctttgagagaataatctgactccttagatatttggataattatttttttgtagttgtttccttgggttgtccatagtgaactatgtggaacaattcccaagacatcagagacttccaaattccaagtaagtacagtacagtattatattggaacactaagagcctaattctctctgacaacatctatattttacattggtatcaaaaaatacctatcatcctctaatgatccaaaaatccctttctccattcctttccttttctctcttacctatataattgaagtttactgggaattgttaaacactagcaactgtgtgtctaaaaacatcgcagagaacaatttacatgtttgcttatgttggtcatatttacactctgaggtacattattttaaaattcctccagaaagaaatagagacttttttttatcaacatctctgatttctgttatatggtattaatttaggtcattttctgaagatgtcctttatggtcatgtctggataagttatttatctttctttctcaaagaaaagttatttatctttcatttggaaagatgttaatgtctcttgctgttgtaagcttgcgaatggtcaaacctattataattccaacctaagtcattattttactatctgaatagtgatctattagtcgacgatgaggtgttacagccaagaggtttgtatgtgtaaaggggtgttgagaatttaagaatctgctcatctctagattattatttctctctccttaccgtgcaaagtgctgccaacctaggattgtaattcacactattaactacctttgtcatgtagggacaatgttttgtgcccatctgttcgtcgctattctgagggtccttattttgtcagcccacctggtgtgttcttaggcgcatccctttcttggctattaaccatttaacctgctcagtcagttctagcttcaaggaacggtaacttggcatcctttatgtgttttggttatactgttacacgtctgattttgctagcgtgctaggctgctacagttagttgaaaccagatcaatattttacacactaagttcttgtatggaaataccaagatacaagtatattcataacagtcatagtcatcaagttaccaccatagccacttgccatcacacttttaactaaacgaaaatttcaggcctgcccattcgtgcatatggtgttgcattgggcccatcaacagaacttctacagacattgatgcgaaaatcctgcatggatccaagtgcagccctctcattcgtcccttgcatcaggaaattaaattaggaaaattatgcaacccaaaatcccatgggcccaagttttccttccctgtcgtccaagcacccaacagtgtaagaagcttagaattaaatgagggaagaggtcacttgtagggggtttatagaggggtaattagggtcaaacctctgagttcaaatgctaaaagtcggtccgtggaaacctatgcagttttctattcagatctgaagtgttcataccagttctatttctacgagtattccttcctgcattagtatgatcttgttacaaataactagcggtaaaaatcttgcaaatagatgtgtttttgtgctaatactccctccgtactcgtaaagaaagtcgttttggatagcgacacgatctccaaaacacaactttgacttctcgtttctataaaaatatgtatacttttatgaaagtatttttcaagacaaatctatttatataatttttacattttcaaacttaacaacttaagagttatttatgatttctattcccaaagtttgacttaaacattgttttaaacgattttctttacaagtatggagggagtaccttttaaattattgtgtgctaagcaggtgacatgcactcttgttttacagactttttacggtggagtgttaacatatgtagatacattactaatgcttattgcttcagttgtctgccctttgtagcatggtgtcctggaatggtcgttcgagctggtgactgacctggtgagccaggcgtatctgcctctctcctcgacaggtatggctagttccttgtctcttgcttgcttgacctcgatcttgctgtgcccaatgccaacccactcgtgcggcctccgtttgatgttactactagcaagtgtagtacagtagctagcccctactcgggtgagctgagtcaaacccttccggttcaagttatcctccttctcatgccccttgcaatgcgtggccatgtaataagtttgttagtatccaggatcccatgtttccagggtgcagactccaaatttaattcccttgtacttttgcgcggctaatcgatgtgcttaggccgtgtttgtgcgtgtttacacacgcgcttaaccgcgtggtacgccgagcgtggcacatcggcttttgcccccgtgcacgtgtggtatgggaaagcactctgccctcgaaaggtatagggacagtttcaaaacagctacagcgtagggcgccaataaatagtagtagcagtatgagtgaagaataagcatttatatccaattgttatcgagcaagaaatgctgagattggcgctgcagagctggatgcaggtggcatttcttggagccctgacacccttggtgaaagtctatgttataaatggataggtaaaaatgtgcttgtaatctgtagaccaagttgactttgttggatgatgacaccaaattaacctctggtcgtttaagccttcttcagcttggaatatttaaactggtgaagctccagttttgtcgcttgttttcttctagtcttttgactatattccaagacttaaaccagagttagtacatctgtacatgtctaacataagtcatgctacacgctcccattcccaaactgataaaaccaaagaagacaatgagtgtttcttactccacacttgttctctagaaccacgcgacggaaacacggagtggaaatcaacttgcatcgactaggaacgaggtaaatcacgtccaggagaaaggaaaaaaaaaacagtgatcacgaaacagacacgacgatcaatccgagtagcagcttcccagtttcaccgtttttatcatgtattcatgcatgatggtgcaatggtggaggctagggctgggacttcatggattacttgcaaactaagcgagtgttcctgaaaggtcctgattcacatttctacttgacatgtctatgcagttggttcaggaattctaggtgctgtacttttttgcaaaatttcatgcagtcaaacttccatattactcgactgttcttggtcacaccaccaccacaccagagcccaggtcttgaagagtgttaacatctgaagcccattaaactcattactgtagcaatattgcacagcttaagctcttactaagcaacaaggagaaacatttctcctactgaactgcaaaacagagtctgtaatgctgttccagtgtattgcattgttaattaggagcgcttaatatttttttttgagagaagtacttaatgaaaacagctcaaaaatttcaggcttaatgggctgtcaccacccatctgggccgcaaagagaatcaagtcttcaccgcatatcgttctgattgttgcattcaccgcttcacgggagttcaatcaagtctttcgtgaataataatctaaggtacgtaactggccatcgatatccatcatccatgttttcttgaggggaaaaagttgcctgctttcttttacgtatatctgctaacttttgaaacccataaggatcgatgatgcaagtcactagtgcattgtatccagcacaaaaagtcgctgtgatcatccaaatctaatcgttttatcacatgacaaatttgtcgcaacaggtgataagaacctagttactttagctcgcactactatcacatttcgtgacattgatgttgaattgccatccctcatgaccatccccgctgtcagttactaggattaaacttaaaaaggccaccaggagaacaataattaccaccaaaagaatcctagttcgatatagttcgtcatgtgtcaagcagctgatggagctttttaagggagtcgtggaaatggtgggggttacctgttatagatggatgcgatgcgtaacacaaaagcacctttaggtccgagtcttaggaatcaggcatctgtcgattttactggtgcactataatgcgcgcaggtgattttgccaaatttctttcagttaaaaaatacatcgccacacgtccatccggtaagcagtcccttcaaagttcaaacattcaaggttcgagtcctctttactttccacctcgccaaaactccagtgaaaaaggagatcaaagaaaccgtgtggcgtacatatggttagtgtgccactgtgtcccctgctttgcagagaagatttttagtattatatacaatcccaggatgatagacccagatcgcccacaccaaaggaacgtgaggccgatcgatctccccacccgctgcctgcagcaaaagggccccaaattatttagtgtgattgttctttttattaaaagaagcttatttagtgtgattgtatcacgctcaaaagcgatgcatgatacatttcagtttaatataaacaagcgacgagatgtgcacgagcgcgtagtgcgccagaagctagccagccagccaaatatcccagtcccacgtagccgacgtcgcgtctcgcctccaaagatccgtcaaaagctgccgacggggcgagtatcggatcggtcgagaaaaagatcccgcggatcaaaaggcgcggggcgaccgatcgaacgaccaacacccacccaaccgtgcgcgagtgcgcccgccgcgcggctcgtgtagtcgtgtgtgctcacctcgtccggcaaatcaaccgcgctacgcgacgtacgcgacgcgattgttacgcggatttcgccgtgggtgcggcgtgacgcgcgcgctgccgatcgatcgattgcagcgcgcgccgagccgtacaatagattctctccctcacgcagtcacgcgcgcggttgatcgagcaggcagccgtccgtgaccgtgagatgcatggggtggggtcgggttgggggtacgtcgagatgagcgcgacggcgagcactagcgggcgaggtggtgtgcgtctttcggcgtagtggcggggtgggccggggtgtcagtagtggtcggcgacggtgaggtggcgccgggtggcgggtcgatcgctcgctcgccctgatatatggaaggtaaagatcggcatcaccgagacgccgtccgccgaccggttgaaagcacaccgagactgtgtagcactatgcatgcatgtgaaatgtgataagctaaaggcggtgaggcaaggatgcgtgcttggttttgcaggtgctcactgattgggcgcgcctgaccctgcatgaccgttcagtagagagttgtgcggcgtgcatctgtcgctgattcgacatgtcacgatggccatgcatgcagagaagattcaggagacgctacctagctaccgcttgtcattgtaccgaagacttatttcagtttcagtgcgacttgtgaagttgtgatgcatcggtgatcagtcgtatctatcagtgtgtgaatatgtggctgcatgcatgctcatttgtcatctagtgtgatcgatcaatatcattcagtctcgtggttgtaggcaggtcgatcagttctagaatgtggaggaactgatccgcgtgagtgcgcgtgcttgtccctgatcaggtttgcttttctcgcaaatccagcacccgatcgacgtgatacagttcgattctgcgtgcgtgcgtgcctgtctgcttgcactaaacgcagtatgctgggacgatgtacgcggtgcacgttactgaaagttttattgataagtccgtgtattataacgggttacacccatatataattggggaatggtggagaaagtagattgagacctatatatgattggtgattggctggttaggtggattgaggataaaacacatgacattgtcgtggtagagaaaaaaagtgatagtattaactaacaggttacaaccatacaatgcactttcaaataaatatgtaacacatattactcgcaaatttcaaccaaaacaccaatgaaacatacccacttttgcttcttttttatccctggtttcttctagctatatatatgaagaacaaggaagtggctatataaaattctcttctcttgcaaagcctacatctctagggctcattctagattcttattgcacgacaccagaatatgcttctttctgtccagcagcnnnnnnnnnnnnnnnnnnnnnnnngaccgacggacatatgttcaagccgaccgtgcatggccggcgggtcccggcgccggacgcacgcaaagtcgagcaattaacggccacagcttcatcttacactgatggccgggaggccatccacgacgacatgcggcagcaacagcagacctgacgatcaagcagccattgggcgactgttttgatatgctccggggaccactgcacccatggcgatgcatcggtcgaataacagcgactcctccgggtgattttcagctcccaatgcaagctcgatcgtcctgcgctgtgaggccatgcatgatagcgaaaatggctgtggagcaataggcggcatgctaggctttactggcatgattgtagtactgtattctcatctatcccaagttggttccgcgcgaagaatgtcgtcgccgcccttaattgtgtggaagtgtggtcatcgttgtctcttattccatatatgttcatgggtggcactagctagtagtgataacagtagccagtgttgaacgatcactgtatggtacattggtacagatagcttggtctgtcagctaggtgttttaattggtgcttggcggtggtggagaggaaaaaaaaatcttatgagaccaggtcctatttagactctcaggatatgtttgttcgaaaaaaatatgtagtataaatcacatatgtaatccagtgatcgatctacctccaatatgtttattcgtgaaataaagttttctatttctttctttggtgggaacagaactccatttcactgttggagaaagggtttttaattccggtttataactccatttaatttacccctttatactgaatattgtacatcctaaactctttgaattagagttatttgtttgttagaagagttgaagaaaaaaaaagactggtgtagcatctgaggaggttaattgaacgtaggcagacggtgcaaggaagattaatgtttttcttaattgttcggctggtagtagtattttatacgttggcacgctgttagaaaatggttcagggaacacatcacaaaatcttcttgcgtgagtgagaaacagccttacatagttacatcatcgaattgatggacttcttttgttgattgttgcactggttgcgtcatcatgattgtatattgttgtcttacgaaatgacgtggagcccaccatatgaatttgtgagcctgatcacttgttagagtgaggtaatgattatttagattgcactgcaaatatcatccgcggctcgccgattccaaaatccagaccggggattttctttcgttctatcttttctagagaaagttagtgatccaccgtttccgccgagtcatacaagcagattattattatggattatctatttaatatgagtatatatattaaatatcttgatagttaacaaataacttaaaacaactagtttaaataattagaaattttacgatccttgagagatatcaaaaagtaccagaggcactaaaattttttagtgcagatttttgtatcttctaggatcgaaagtaccgagagatattaaaatttatattagaaaatacggtatctctcgatagcttcgcaagtactataaaatcactcctaaacaataccatagaagttgctttataaaatgtattttttttggaatgtgaagtaaatagtctatttcaatgtacaacctgttaaataattaaaaaaaactaagccttaattaattggcatgtggatgaaaatgactatacgagtacagaatcattagatagctagatatactaaatttaggcacgggaactaaattgcacatatccaagcaaaaggagaaaatgatgaaaaggtagaggagcaaagcacatagtatatgcttgtgctatctattacggatgtagtagtatataagaataagcacgcactttaatccgtttagattagataagaacaatggacagcaccaattattctctttttgctggttttgatcgagcaatctaaaaaaactcgaaagctacagctgaggaccaccttgaagtgataaaaaatgattcattcagtgtctcatacatttcgttagataatatagtttcatgcaaatgttaaaattcaaacctatcaacacgcgcacaatccctatctgcttctatgttatattagttacttaagggaccaccatacactgttatgattttctttaagcttttcacaattatttgcattatatttcactactccacaacatcaaataggatgttgaagagaatatgggagggtaaaatctttataaatttctaaccttataatttgctttacgattcatgctccagtgaacgatgaacctaactccacaactttggtgatcagcaatggcctcatgagtcagggtttagggtatgggttagtgttggggtgagaggaggagataggggggggattgtcgggtttagaggggaggccatgggagatggtggacggtggacacaggcggatgacaacatcggagccaagggaatagaggagggcagtgagccagcattgacctttttttttatatataattagcagcagggagcttccagagacaaggaagacggttggggtaggggcactgtaacgacccgcctctcccaggccggcggatgacaacatcggagccaagggaatagaggagggcagtgagccagcattgaccttttttttatatataattagcagcaggttgcttctagagacgaggaagatggttggggtaggggcactgtaacgacccgcctctcccaggccgggcccacttacatttggcagctttcataggtcatagactgtcctcacataccaacacatgtcttttctgcacattttgtcctcactcgtgtgcacccgggaagaatttcccggttccaggccaagcacgcttaaccctggagttatttggagattggcttccggaaaagaagttgcaacttgttgatatgaatattctattaatcctattaaaccctaggccgggatgttacaggcacttaccgccgccagcttaggaaagagggggcatgggaagggaggaggccagccgactaaggagatgaggggtggcgcgggggggggggggggttgacaccttctggtctgccgagatggcaattaggaggcgagggagcatctgcacgcaatattacggtggtaggagaggctggggaggggatgttgcacaacttcaaaatgattcaacggtttagaattcacaatatttttaggctgtgttcgggaggtgaggttcacctcccgcgtacgcaaaacgtagcgacacattttcttataaataattaagtatttactaattttaaaaaaatatattaaaataatttttaaagtaactttcgtatataaaatttttgtaaaaaacacaccatttagtagtttgaaaaacgagcgcgtggaaaacgagatatgtgagttgtgaaagttgaaaaaagaactcagccttatatatgtattctgtcaaatgccatgtagatagttgaagaaaatggggtgccgaccaatttaccgggaagtacactctgtgtcgataaaaaaaaaaaatctgcaccgactgccgacaattttgagaagtacgccataaaagtgaagttgataaatctaggcagctaggctctaaatgattactccaagcaagcagttcattaattagagcatgaaaaaaaagcagtaaatgtgtcattttaagcttcgccgtatagctttttcttgacgtggagaagaggagaagagaaaactaaggtgccatatcccatgaaaacacactgttttagtgctgtttgtacggttttctcaacaagtgttcatgcccgcgacaggggccgatatcatgacaatactctttccagtgccccacggtattgttcaggtcaaccaagctctatcgatcattagcgacatcatcagttaatcattgacggaatgataacgcacatgcaagacatgcaacccccacaacaatatataaagtcgcagatgttttatataggggagagaacgtgacatccttttaattactttgggggtgaattgaagtggaacaagcaactgctggagagatagtacacctggcacacacgcacaatttgacggcagagactgatgcacaagcggcacacgcacacgcccaaaattagcaggctccagccccggaattaacagagcgagcaatctacgtaccccacacgaaccaccaagcaaccaaagctagcgccactcccccgtgcacgcgcgcgcgttttatgtaactctctccggcgtgtacgaagcagcagtgacacgacacaaaacacacacaaagacgtagctagtgatgacgagaccgagatcgactggtaattttccgagtaagaggacacgatcgacgacatctcgtcgtcctatcacacttggatgttctccatctcgtcgacgtcgtcggcggcgatggactgctggctccgcaagcggcgcagcttgaaggaggagagcttctgggaggagccttccttgggggtgtcctcgaagcggatgaaggtgtaggtccatgctcccgagagcgtgcccatgactgggcccaggaagtagatccacaggccgtcgaacttgttgctcgccagcgccggccccagcgtccttgccgggttcatcgatccacctgaaattgccctgcaaccaccactcgtttttcgctgcgtctcagtctccattgtatattctgctcaactagtttagtttctacgttctgcctgatcaatatgtatgtttccctacatttattaatttggttactgatcgatcaaagataatgttgattagccaggttagtttgacttttcccccccccccctctcacttgtcaggagtcaagtggctacaaattaactaattggtcttgctactagctccaagttaattacttcctaattagctagtactaatcttcttggtcatgaacatgaatgaacgaattgaatagctgattgattaacgggccgtcgatttctagcgtatttaccctgcgaagatggacgtaatgcaaaccgcggaaccaaccgccaacccggccaactcacccacctgcatatggaaaaaaacaccggtcaagagtccatgtattttacggcaaaattcagtcatcatcgatcgacgacaaggaggtgaaagccgtggacgacgcgtaccgctctcgtgtccgtggcgacggcgagcgtgacgaacatcatgttgaacgtcacgatgacctcgacgacgagcgagtgccagtgcggccccacgggcgtggtggttccgatcacatccaccgggtggatcaccgccttgagcacgaacgacgcgcatatcgctccggtgaactgcgccgcccagtagaacggaacctgtgtaagggagaaaaaaaataggttgaaaagatgtttcatttcaacgctttaaccctgcacctctagctggagatcgatctagagcagtcgcagtagtatctaactgcacattgcgagatgtctctgttgaagccgggaacatcgaatcggttccggtcagcctcaccggtgtgtgtgctagtgaatatatagatagatatatagcactatagcagatagcggcaactagcttagccccggattcggtgccgatcgatcggacgacggcgccacaggcgatcgatttccggcggatccctatcgatcgaccgaatatatggcacatgaaccaccacgcacgccaccgcctttacatgaattcttgcgtcgcgaccggttctcctgtactgtatcgctacggacacttgtccctgctagctttacgtgcagtggcaacaaaaaagcctcgaccacgatcatactcttgtcttctactagcagcagcagcagaagtgccctgtggattgcgatgtaaaaatagactatatggaatgtgatccgtggcaactaactcagcgtatcccagcttagtggcttcatctttaatttggctgtgctggggttttgacgcgtgattgctcgtgttcaattagcacgagcctgaattgtttgtggcggtttcatgctagatttcagatgtctgattttttgattgatgtgagcttaattaatctggtgatcgatcgatcacatgctactgcccaacgtgttgtctggctgtactattgtttgtgtgttgctgatatggagtggttgcttgctttcaggctccagctagctagacaaatgtgtagtgaaaaggacctatggattaaggtcgatatatgttgttgacagaagagacgacattaattccttatacaatgcggatgtgtgcatcattatggtatatataagtttaatgaccttgaaagatatgtgattggttggttcggataacaagttacatgagcatataccacctctcgttgccttttgactttctttctggccggcgacataagctagactgaataatttggcatatatgcctaaaatagagatttaatttggcagaatcaaatccatggcaacatcttgacaagaacgcgtgaataaactaagtacttaagtgaggactaaattagccaatgattttgctctcttgagatttaaaaagtttttcagataatgaagagggttgcgtcaaaaattaaaaaaatggagaggatcaaagctgacgaaactctgaaaattgtagctatcggaggtaaatttaacaagattcagataccatcatatgtaaaaagacaaccggaacaagctaaggtcgtttcagaaaaaattcttatgtgactactaatattcaatcagcactcaattggttaggtgtctctgctaacatcttttggcaaagaacagattgaaagaaactaagaaagcatctagctagtatgccgaagtagtgcatggcttaagtcgtacacatagctaactattatattgcatatatattttgatgcaagaagtaatatatatgaagaattggcagtttgaggtagctgtgttgctgcatctgcatacctgaatccaggggaaatgcctgaacacggcgaacgcgagcgtcacggcggggttcatgtgggcgccggagatgtggccgacggcgtagatcatcaccgtcacgatgaggccaccggcgatcgactgtcccagctgcgatatgcgagacaggtcgctgccgctgatccctgccgccccacacgtcatgaacaccagcaggaacgtggccaccacctccgacacgacctgcagccatggcgatccaagcagcgtgcacgcattagctcccccccagctcaatcgatctcgaatcaatcaagcaaccagagaaagacagataaagctctgaaagtctgaagaattaatcattcagctccagactcctcaccttcttgaggaggtgaggagggaagaagtcggcgatggccttctcgccgtagtacatggtaggcatggtgccgttctgcaccgtggagagatcgtggatctcgttggagtagttcgccctggagtttgttctcgagttgttgctggccatttctgacgctctatctagctgagctacttgtgcagcacgcgagtgcaggaggtagaagaagaacaagcagctcaagctctaacactggctggctagctcgctcgctccgtcgatcgcttgctcgttgtggtaatgagcaggagtatttatagggagatcgagctagctaaggttgagaagcctgagcaactgggaggtggcaggtactagtagttacagtcctcactgccttttgattaggcaggcctacttgtcggagcaccactgggtacagtgcttgcatgcatagctcattagccctaattaatcagcataagatcattgtttctggtctaatttttcgacggggattcagattttgtttaatccgttcaaacacgttgtcggatcagcattggccgagaaacagaaacgcatacttgattttgtattctcgtcgagggcataaaaccgcgcgtcatccccccgtgaacgacaacgagagcaacgttgcctctgtctgctgttagactgaaataattgtgggttttcaattcacaaggtgttgtaaactatatgcctggataaagcgcgacgtcgaggtcatgacgccgatatatgggtgacgaacaaattctttttcttttgtagattgggggctcccctgaaagaaatgatactatagggatggatatttttggtcattctacgtacgttttccatgccgaatgttaatacgttttttttgcgaaattcgtcacctgttgtaagttgacatttttcataatctatactcgtagaagagacgaaccatgtgtgccaatgccaactaggataaaccgtaccgaaatttactattggccgaatttgccattgtccctgtcagaggttgccgccattgccagattaatgatggatccgtggcaactgaacaaattttcaattgtaggattgccatctctggtgaccaaattgaaatatccgagcagttaaggatttgcaaaggtgacattacaataaggggttatcctaaccactctattacgcagtgtgcatgcttcggttagcaatgctaagcaatgtcagagcagaggacgttgcacttggatggtcactgtcaaaactgacctgctactattgaaaaatctcatgtcagttggagtacttcagcaatttgcaatcctagcttctctcattgagcttagctcacattcagtttttctttttttgccgtactgtacctgtaggatactccctccagttcgaaatgtttgacaccgttgactttttagcacatgtttaactgttcgtcttattcaaaaacttttgtgagatatgtaaaattatatgtctacataaaaatatatttaataatgaatcaaatgataggaaaataattaataattacttaaattttttgaataagacgaatgatcaaacatgtgataaaaagtcaacggcgtcaaacatttcaaaacggagggagtactatcttgtactaccactatcagtaactgtcttcagagttcagatactacagttcaggaaaacaaaactccaattcaggcagctgaattttcatcaccttgtattaaaaagagcaatgccagaaatcgacatatcatctgaagagcaatgccacctactcctaattaaactcaatgaaaaatcaacaggattcggaactcaaagtctgaagctgatttttacaggtcaatcatgttctgtgaagtaggcccgtatggtcaatgctctgatggccgtagacagcacaagtgtatggcagttatgacgcctcttcttcccttggtaggcatccccggtgggggagcagagtgtggacggcgatgccctgacaaaatcttgccacaatgattttcgattggaaaatcagcacacatcacaaagaatgaaagaacccatattttgatcggtacagctcgttgcagatcagccactcgacttggtgaaaatctcaggccttacagagtttgctaggtatttcgttcacgaggtgtttcaatcaggtttctttcgcaaaaatgcagataatttattgatttgagatgccttctgtaatgagcactcatcaatactttgtagatgtatacatgtagaatcaagaactactttacgagcaaagcaaattaaatgaaaataaatggatattggtactgaaaaataccactaaatacacacatgtgcaaacagagagcgctttctggggcacgtttagaaccagcaccttattttgcacgatctacaggatgaaaagacagcttgtgctgcctgagatgagactagcgcattggcatgaggccaggccacaagagggaaaatccacgcttctctgcaaccccttagcttttcatgagaggcatggaaccaagatagctgacgagtgagcgatcagatcagtgaatcaatcacagatgcaccatccatccagaagctggcataattaccttcgctgattattgatcttcttttgtctgcgctcctcaggccactagtgtagttcttgttaatcacttttgtgtgtatgaatctaactacatttcctggcataatgctaggccctaccctgtgatcaagcagtagcaaaagcaccccatgttgaggtcaggtgtaccatccgatatctgctaagttgatatggtgccctgaaccattctctgaagaagcatcgtttagattcagaataaccatggttttactttgcacaagtctagctaatactgtaggtaggttccctgatgcatctgcaatggcgcgcgcctgacctcagaacttgaatcagttattcctatatggcaatcaatcatgtctgtcttcccatcgaatcacctccgttttcacggccttaacaaaagatctgaggaccatatatgttctcgattgttgtcgaaggttctagatcgattcaccactgtcaaaccaagcaattacgtatggaactatgaaacatatcggattttgacgaataatgattacacatatttttaattcttttctcctatattattatgtttcgaaatcagagcagataatgtatggattcatatgtagatattgattgttctggaatcagacagaaaaagacggactcatagtatgtcttctaatttatcagccgtgaccaaaatttaaattttaaaacataattgtagtgttgaacttaagtttcttacttggaatttattttcaatattgacttataaaccgctaagaatacggatataaaaattttacctgtaaattactttttattgggaaagaacatgtaacctagcagttacagtgataagtagcacatctaggttttgagttcgacaccccaagagagtgaattttaagcctaattaaaaaaaatcacttgttggccctgtaagatcgaacaacgagaactaagattaccaaacagagagaggggagggggaggggggttgaatggtagcaacaccaaacacttttagcggaattaaaagttacaccagtgttagatctttggtctgactgtacaagcctcattggtctgaccgcgcaatcaagccaccgcctcttgttgacacctccggtccaaccgccatagatccgattgtatgaccgagtagttgccgttggtctgaccgtcggtattcttccggtgtgactgttgtactccgagcaaatcacaaatcgaaaaccctcaaaagtagattaaagtttatttgcatatattcgtgtttacaaagtgcaataacaacacttctcttatagaattggactaaactcgaaaccctaacttttctttaaacttaacttacacataatcgatcacaagaggcctcaatcccctctctatttatacccgagataagcagcctaaaaccatgaatctaacttgtgcaatatatcctaatccactaggaaacatttctcgtacctaaaataaacttatctctttccaattcaaattccaatcttcctaaatttaaatcgactccttattccatatgtacacaatctcccatcgtatgcctcatggaatctccatcaaccacgtgcattgttttttagcctaagcatctcgcatgatatcccaatcgcccggatgtcatcttctcccaagttgattcctgaccatcatcggcaacgctctcccgatgcatcaaagcacacctacacaggaatcaaacgaagaaacatatctgagcataagttctttctcaactttactcaacattattacacatgtatagaattcatatataagtcataatcacgaataaacaaataaaaaacccgaaaccaacatcgacataaagttggccggtcatgctgtcgttttggccagtttgacagtgcacaccacgccagtatgaccagcttatcctgcccggtctaactggctccacacaaagagcaaaactacttcactaataatcttcaaatatcgaaatcaattatctcatatgccaattgttcatcataaaataacaatcaaaacacactttgatttcacatgcccctcataaaaatgtgttaagaatcaacctatggagcgtgggcctcgtataggaagcatgggcctcaaagaatgagttaaggaacgatccatatgaatgagtttgcgtgtgtgtgtggggggggtgagggtttgtggcttttctcggttggtttgatggagccttcttcttaatgaaaaccatcggacacttattttctcactggtcaagtttttttaattatttttcgttgtttcgtttatttttctacagtttattagctatggagtaaactatgaggttgagagctaggttactcggttaaattagacagaccaccggaaagccatcaaatttcaaaaagtgttattaatgaatgagggtacaaacggtagaaatgacatgagccattacaatttttacggtggtctatactgatgatagaaaatacaccactaatgtagcaaaccatacagctgttacttatctacagatcgaacattcattaattttggcatcaaaccaaactttcagctctaaccaaacttacactaagctttgatggtactaaaattttggcaaaatatcagacctaaccagccttttaccaaaactttggcatggtccaaatattgacattgttaaaatctattatatactaaaagtccattaaactttctacaaacgctctcaagttatcacgtggcgctctaataaattagagaaaatcctagaaattctaaaaaaaaagcaaaacatctacctcttgattttcacttaaattgatgggtccaatattatacaccattagataaaattgatcttaaaacaaaccaaataatatgggtcccacctctcctatttctcccgcgtgcataagtataggtcacgtacgtacatgtgggcctgtagtacgtacgcctccctccatttttttcttttttttcttcttttttccatttatacaatttgatatatatttgtttaaataatcatattttttttaaaaaaagaaaaaacatcatataactctttataaacacaggtaattaactaaattagctatacagactttgaaaataaaatttacaccatattatatgtaaattagctctaaaatcaatagtgtaagataatttactttgtactattattttcatataatgcactattttaaaataaagcttacacaatattatattgtgtacctatcaaataaacaatttaagatctaaattaactaatatatatatatatgtgtacttaaacagatagacccattatttaaatcatcggatctatttttttattactttggactattattctcaaataatgcattgttttaaaataaaatctacaccattaccattatgttgtgtacccattaaattgacaatttaatatatatatatatatatatatatatatatatatatatatatatatatatatatatatataaactaatttacatttgcactaaaaccggtggacccattatttaaatcatcggatctattgttaataatgtctaaagttctctttttggcccactgcacaatgcacgtctgcacctctacctttcgcacatgtgacaaagtgtcgtatttgaggcatcttgggtgatcacgaccgctgcagcgctaccacttttgttaatagcatgaaaaaaatattaaaggtgtgatgcagcgagagaagaattaagtaccgtggaacacttaactctgtttaagatgaaatcgagagtttattaaataataattataatatattgtgttatgttgtatttggattttgtattatttgttcgtacagttgaaagaaatcattatgttataattgtgaacacaatattaacgaatatcaatagaactcttactaggataagagtgttataagggagtttaaggccctattttttccctgattccatcttttgaattttcatttgcacgctccatgctttccaagttactaaatggtgcttttattaaacaactttttaactttttagaagtcaattcattcgtttataatctcaaatagctatcacataaataagataattcatcaatttcagttatcctaacctctaaagtacatattttttttcatgcgagtcatggtgataagtaaattggtgatcaacgcataatcaaaatcgtatgatgaatctgtaagaactactatgaccaattgtaaataggtgtcaaaattaattgctattaattaaacatctaatggcttgctagcgacatatttaatttttctctacatatatataaacatggacgaagctagaacgaatattaacatacatcccatacatatatattacatgttaatattctaattacatgtggtaagtccattaaaatttcttaaaatgccctcaagatgacacgtggtgctctaataaattagagaaaatattagaaattctaagaaaaaaaaaagcaaagtatctattacttgattttcacttgaatcgatgggtccaatagtttataaactattagattaaattgatattagaataaactaaatactacgaggtcccacctctccacctttggtacgcacctactcccctccctttttttattttttcatttcttcttttctccatgaatatgcttccctccctttcttactatatcatgcaccttcatgagacgatttaatctatttactcaagaaaaaaatatatttcaaaagttgtaagtacttaatccatctcccactcaaagtttgtaaatggatttttaagatatcttaacaaaaaatcgaacccttaaattattataaaataacaatatccgaactttagtttgcccttaattatgagatattttttttaacaaacaataaaaatcttacctttcaataatataagtgcccgcgcgtatgcgcgggccaccttcctagttttgataaaggttgcatcagtaataaaccaaacaagcgctttggtggttctacatgatcaaaagcagtactaccaaacagggcctttaacctcaaaatcactgtaactttaactgctctatccagtaatgatagtagaagcatggatgtatcactacatgattcattcatttgagcaaagccgacatgagaagaccagcaatccagcatttgatcgtggtcgtctgatggttgaaaaggcatttgtatcgacttatgctagcccctatcaaggttggttatccgtcagcgtgatcgttgattttgcacggaaaacaacaggaaaacataaggtctactggaacactacgagagtctacgatacggacgaactgaagggcccttgcgtttgacgccgggtttaggtcgccttggctccgttgatgtcaccgtttgggcgtccgtgtaggaggggccagccaagtactgcactgattagttcttgatcactctgctggccagtaatctctcttcatcttaggtcggcttggctactagtagttgaggagtaaggccctgccttttgtagctggcacacgcttgaaactgttgacaatttttgctccatcgaacatcaggttcagactttcagtcatcgttttcgatccccttgcttgttgcagcaatttcattcagagaaagcatgtgtgtcaatggacactcttcagctgcaagaatcaataatgtacttccttagagtaagtttaataacggagccaactataagcttatagtttatattaaagttaacatatatagtaagtgagctacaaggttatctctttttttttctcctcctctctctatctctcacctatgcatttaatgtatttatcttgaagtatgtgaattgctagctcttgtattagagccaatcctctctaattttcaaattctctttcatccacataagcttatagttggcttatagcctactagtatacttgctcttagtattagggtattcccaacccaatgactaggatggtgtccatagcattaaataagttaccacttaggataaaaaatgatgtggcaagtgaataaatgaggaaagagaaggaaaccatatcttgcatgggacatggttttctacacaacatccaagacatcatgtgagataaatagcattaaattggagtatggaatagtggtgtttgcattggaagagtagtatctaggactagtttcttgatgatgtggagtttatggaaactatgtctagtgttatgggttgggactgcccttactgcttctaaatgagacttgtgactgctggtctcctttgatttacttccttacttgcatgagatttttttcatgtgttattgacgtactacctccgtcccaaaataagtacagccgtgaatatccgtgcccaacgtttgaccgtccgtattatttaaaaaatttgtgaaaaatttaaaaatatttagtcacacataaagtgctattcatgttttatcatctaatagcaataaaaatactaatcataaaaaaatttcaaataagatgaatggtcaaacgttgaacgtgaatagtgcaaaactatacttattttgggacggagggagtactgaagtactggaacaaatatctgatgatgttccaatctttctttagttattgcaccggtaaaagattgcaataagaaactggagttagtacgcactttaggctaccctgaagaattttttgcatggtggttagtttattgaaggtgtggtgtcatccttgcgtgtagagattatcacattgtctaatcaagaagagccaggagctaagctaatctagctcggccgcgaacacgacagcaagttatcttgaaggaatcagtcagttgactaagcaggctctcgctctctccagtccagaaaagcttcggcatttagaatcccctgtttgcaacaggcgacaaggcaactttcatatggcaccaaacatgtcggtaacagctgatgaaaccgtctaatttatctgctaatctcgctgttttttcccttgtcaggatggctcacaagtggaccaagttgtagaatgttgcaaaacccgttgtttatcatggccacattcggctagcgatgcagagcgattgacagagaaatcccatgcgacttaagaaaagcgaaaccggggccctcgtttgccagccagggtggctaacgactggagtgtgtgcaactagccgctgacagacaacgcgacgcttgttatcattcgcaatgccgacctgatggatgtgagctcgacgtgactcagctacaggaggaggagtttggagtcatttgcgtttttagtccaactcggtgaagggtcatcccggatcatctgcactgtagtgtgcagggttcatgacttcctgtgttgcagccctgaacctaaggatcgttctgtagtcgtaggtccatggtatcatgattaatcatggttgaatgattcttttgctcctccgcgttgtggaggtcgatttctactgtatcgtagtccagattcttgtgcaatgttgaccatgttcattggcctggcttgagctccaaagagccctattatttctcttatacatatgcttatccttacagcttattaacaaatagaaaataatttacaaataaaactttcatataagtctcactaacgactcaaaaataaatgttgtaaaataaactgcgataaaaaaaataagttcaatatttagttttaaaatttaacttttgacttataattataagtataaaaaaatgaggccgtaattgaaagtcttttctgaagaaaatgggaataaagatgaggatttgatacagtaaaaggctgtttggggcgaattgggctatcggctcagtaggattgcttagttgatctaacctccatatgggctgacgctgatcatgggctttacatgggcgagttgccatggcccatgggctgtcttgcgcggaagaggcgtgcgtggcagttgatggcggtgtcgccgtgagagaacggagaagcggagaaaccgacccgtctccgcctcatccaccgctccgccacgatgctcgcgaccgccgccccgcgcctccgcgccgccgcgtggggcagcctctcgccgccggcgccagtgcgggcgcagttcgtgagtctcccgctcagtctccccggccgctacgcctcgctgcgcctgcgcgcctcggcggcggcggcggcgaaggaaggggcggaggagatggggttcgaggagatggcggccgggacgcggaggcgctactacatgctcggcgggaagggcggggtcgggaagacgagctgcgcggcgtcgctggccgtgcgcttcgccaacaacgggcaccccaccctcgtcgtctccaccgaccccgcgcactccctcagcgactccttcgcgcaggtcgcctcccccgtcgagcacctgctgtctcggttcgaggtttcttgtgtgcgtactgcgtagctaacatcacttcctgcctactcattttaggatttgagcggcggggcgctcgtgccggtcgaggggcctgaggcgccattgtttgcgcttgaggtgagcggtattagtatatgaaaatcttagggcatccatttgctttgagaagctttgggctatgcaacataatcatttagattgtaatgaagtgttagcatatgaacatcgtagagaacatccattttgctttgagaaactttgagctatgcaatataatcatttagcttctacagtaataagctgaaaacctctacctgtgaaattctaggatttgtttggaatcagaatgatttaatttagatcaaccttctgattgacttactctagatcaatatagatagtgcttgagtgtggcatattcgagttttaatgcagataaatcctgagaaagcccgagaagagtttcgtgcagcaagtcagaagaatggagggactggggtaaaggacttcatggatggcatgggactgggagtgcttgctgagcaggtgcaaggctgcatatctgtttactgtcgctctctgtatttcatcacctcccattatgtctgaatgttgtggtccttgtgttcgtgaatttgcctgaattgctttgtttaactttggtattaccatcttattccatatagctgggggagttaaaactgggggagttattggacacaccaccaccaggattggatgaagcaatagcgatttcaaaggtgagaaaaagcaggtcatgggctttacctggttcatcttgttgttcttcttctagcatgtgactcctacttgcatccaggttatgcaattccttgaagcacaagagtatagcatgtttagacgcattgtttttgacactgctccaacggtaactatcctatatatgtgaatccacaattgactccatacgcacattcacattattacctatgatttgtctccctcatcaacagggccatacactccgtttattatccttgccagatttcctggatgcatctattgggaagatcttgaaggtattatttgcttgattgcttctgcaccttttgctatcatgctacgatgtaaggcctgcagtacatacataattgatgaagaaaatgtgtattatcttgtgtaactattatcctgcctatcgtcacacaaaacaaagtcattttagaatgtgtgtagtcaacacaagttaactttgaccataaatatcacttaaaatataggttttggggctatgaaaaatgatatatttaagtttgccataacaagagatttcataatactacacttatgtaaccttcttttaaaaaaaatgctaaagaactaggtagtcaaagttgtataatggtgaccagagagagtagccactacaatcttgttatttttgtggctaaatggtagcgggaagcttattgcatttctgctattattcatttgtgttcgtttgcgcagcttcagattgtgctttttttttgttaacttgtgaaattggaaggctgcctatcttgttgaatatttatctgctcaaatacattgtttacatctttttcatcagagttttttagacacttgttagaagaaaccgcttatccttgttctgcttcatatgatgaaatatcatgtctctggaatttaataaggaattaatgcaaagttattcttcaagtcctgttaccaagagctaggcattccatctaagttgtggtttgtcatactgatttatcatctttttttttccagcttaggagcaagatcgcttctgcaacatcagctattaaatcagtttttggacaagaagttcaacagcaggatgcagtaagtatttgcctaaaattcctctgaacttggtgtttcttcaccatgtctttaaacctttgaatttgttattctcccccttaaggcaaacaaattggagcagctgagagaaaggatggtccaagtgcgagaactttttcgtgacacagaatcaactgaatttataattgtgactattccaacagtaaagattctgtgtatccattcccccaccaccttctgtatgtatttatcagtgtaatagccatctttatatttccttttggcatttttcaggtgatggcaataagtgaatcagcaagactacattcttccctaagaaatgaaagtgttcccgttaagagactcattgttaaccaaattctaccaccttcgtcatcagactgtaaattctgtgctataaaaagaaaggtagagttcataatctgccgaaatgattctctagtaattgtctgctgcttgtagaaactgtgttgcagggccatttaccatcttctttcatccaggatcaaacacgtgctttggatatgataaggaatgatccagagctaatggggctgaacttaatccaagcacctcttgtcgacatggaaataagaggcgttcctgctctgaagtttttgggcgatatagtatggaagtaacttcacaatggaaaatacgataaacttcatcacacctacttattgaagtgctttgcaatgcaaactttggtagctgcaagtatcagcatggatagagctagaatgcaagtgtgcaacttagcagatgcccaatctcatgtgagtaagtagcatctcgctgaaggtttgccggaatagcatatactagggggattgtgttctaaaaaaaaagggggggggattggatcaagctgcactaatatcaagtccattgaggcaacatgccggtgatatttctgcttctttatccctttaataggagcgattctgagggttttgagtccataactttgcactaaaattaattttgttcgtgcatcatgtaaagtcggttagagaatgaagaatggagaaaatcagacaacacttttaagtaaattttcttacagattagtgtgacttaaatgtaaatagacaatattgacaagacagctgcagcagttgagattttaatttaagtagctgaaaattctaggaaaaactatcctacggggtaagtttttcaaacagaggtaggggtagtatacacaatggacgttgcagtactgataaaccagtgactggggtagtaatcttcctttctgtctttcgtagtactacaagacggttgaagatcttttccatcctatcgagatgtactactccacttctgttctgtgcaggttgaatatatgtggcccaatcacatcttgccactaaaaatcttacatttatccatatactccacgaacagtagattttactcatccctgattagacccaaaacaatcatgagcacggtagacaacacaagcttagggcgtcttgcacgattaggtattgttcggtttagaggggattgaagaggattagaggggactgaggggtaataatttcacaccataataggtattgaataaatcccctctaatcccttcctcatgagaattaaccgaacaagcccttaccccgctacacccaaaaatgtttccgctggggtgcaatactgctatcgatggcttcttacgtaggaatttcatttttctaatattttttcattaaaaattgtacaaatatgacaaatctcttttataaaacaaaggtttctatagaaattatgcgagcacatatgttcacatatacacatatttcatatttatgactaattatttttttcaacgacaccgacaaatccgtcaataggctttatttttctttcacaaagcccgtaaacttccataggagcctactacatcagtggcttcgtgccgcactaacgaggcatctatagtgattgactttatcatgtaaaatatgacagccaaatattttgatgggaggtgttcatggttatatgtacgtttatactccgtatgagtgagtagcactccctccgttctgagatatttactagtactacgaatctggaaatactctttattcagattc

SEQ ID NO: 7328 - DNA, 1001 bp, Oryza sativa
ctgcaagtacgttcatcagcagcgaaaaacgagtggtggttgcagggcaatttcaggtggatcgatgaacccggcaaggacgctggggccggcgctggcgagcaacaagttcgacggcctgtggatctacttcctgggcccagtcatgggcacgctctcgggagcatggacctacaccttcatccgcttcgaggacacccccaaggaaggctcctcccagaagctctcctccttcaagctgcgccgcttgcggagccagcagtccatcgccgccgacgacgtcgacgagatggagaacatccaagtgtgataggacgacgagatgtcgtcgatcgtgtcctcttactcggaaaattaccagtcgatctcggtctcgtcatcactagctacgtctttgtgtgtgttttgtgtcgtgtcactgctgcttcgtacacgccggagagagttacataaaacgcgcgcgcgtgcacgggggagtggcgctagctttggttgcttggtggttcgtgtggggtacgtagattgctcgctctgttaattccggggctggagcctgctaattttgggcgtgtgcgtgtgccgcttgtgcatcagtctctgccgtcaaattgtgcgtgtgtgccaggtgtactatctctccagcagttgcttgttccacttcaattcacccccaaagtaattaaaaggatgtcacgttctctcccctatataaaacatctgcgactttatatattgttgtgggggttgcatgtcttgcatgtgcgttatcattccgtcaatgattaactgatgatgtcgctaatgatcgatagagcttggttgacctgaacaataccgtggggcactggaaagagtattgtcatgatatcggcccctgttgcgggcatgaacacttgttgagaaaaccgtacaaacagcactaaaacagtgtgttttcatgggatatggcaccttagttttctcttctcctcttctccacgtcaagaaatagctatacggcg

SEQ ID NO: 7329 - DNA, 11971 bp, Oryza sativa
ccagtagtttctgtactgtgttgatatggacgagatgaggagtagtgacatagagaagcaagatgaagtcatgctacctggcttcaggtttcatccaacggatgaagagctcgtcagattctaccttagaaggaaaatccagcagaagtctcttcccattgagctcatcaggcagctggacatctacaagtatgatccatgggatctcccaagtaagatttgttacttccattttcattcttttttccgttctctgcacagataaataaagaactatgaagcctttctctttcaagataacactaattatatgtttcctatttttactttatgactttcatggtgcatgttccatcatgtttcctatttttactttatgactttcatggtgcatgttccatcatgctgagacttcgtatcttagtagtaatagttttttcttctttttgccaccatgttgaagtcgaactctaaactttttgcatgcatctttatttagttgtctctgaggttttgataaggaaataagaaaagtaactacctaagagttttcaacctgcctcttaagcgctactactataatgtccattcatcacgaagcccatgcagttttagggttaagcctcataaaacatttagagcaagatttgcaagtctaccaagctattaatgtcatgatgtattctgagatttggctttcagtagtgttaatgtggtataattgatttacaagtatcacagttgggctctcaagactaaaaaggcatgcggatagtaaatagattatttttcatgtgatgcatatgccttttatcagtcagaccagttagcctagctgactagctcacgttttgttttaagtcagtgttacacaatagacaccatttaacttatttctagtcatatttacttaacaaatccttttttcaccgtgaagagttagcaagtactggagagaaggaatggtatttctactgcccaagggataggaagtaccggaacagcacaaggccaaacagggtgactggagcaggtttctggaaggccactggaaccgataggccaatctactcctccgatggatcaaagtgcataggcttgaagaagtcccttgtcttctacaagggcagagcagctaaaggcgtcaaaactgactggatgatgcacgagttccggctgccatcgctcactgacccttcattgccacagaagaagccactcgagaagatcattccaccaaatgtaagcaactggcatgctgcaacatttgaaaacaaaaaacttcaaaccttaacacatatgctacaaaagtagcttaggcatagctaccaaaactggcactaaggtagatgatctgagcaatacatgtctgcccataattacaatgggaaaacttgcaatataaactgcaaaaggcctagcatatgtagtgctttccgagctaattcagtatgacaccaacaatttcatataccatttccttgtgaagataagttgaatgcactttttacctgaaaacactgccctaatcttattcttcttttttcttatcatgagcaggattcctgggcaatctgcaggattttcaagaaaaccaattccacggcacaaagagcgctctcacactcatgggtatctcctcccttgtccagcacaaatgaagcctacactgcccctgtctcgcagaccacacagagaagtcagcatacctcagataacacatcatcagtaatgaccgatgccatctcctccaccatccagttcaccggaagtagctacttgccttcaacagttccttcatgccacaacccactcagcatgattgacagcaacagcaggccagatgcatctgtacctctaccctcaccggttgcagagcatcagaccatgggtatcctctcagcaatcccacttgatattacagctgggattgacattgcatccatggttttcaatgcatcatccttcacactcccaaacatggatagaatgactgcaaacatagagtttggccaaccacagaagtgcaacagcagcagcagcatgaccaacagatgtgtggtcgacatgcctgatgttgctaacaatatcaacagcggtccacggtccatcaacttcaacctgcaaggaacactttctgatgactggagaatgaccttgccatgggaatcactcccttgcacgacagaagtctcaacaaatttccagtcaaccaagtgctatacttaggtttctagtaatgtaggtttggttttagaatgcggtagtgaagattagcatctacctctgtctgctagtattactgttagcatgaagaggtattcgaatttcgttctgttaacagtgaagctaacagaattaggaagcaatatgctactagtccacaatgtaggatgcatcatggaactaattacctccttatgcagtgcaagagtggttgtcgtccgtctcatgtgtaatcgtagctcggttccaattttgtccatagttgcatgtactgcaaaatgcgtagggtattagcaaatactcccctgatcagctgattgtcttcatttcttcgtttttcctagttctgaacattgacagttgttgcctttttggttcacataccttgcgcacataacacctcataaatcgaagaatcgatagcagacgcaacaagagggatcctcgctgcagtgatggtgaggtccccgtgcactccgcccccgtcggacttgaattctgaattagttggaatcccgtacagattgggtcacttacaaatcctcgaggtgtggatcgtgctcgcgatcgactgaagcggcgtgcggcgagccgcccgtccgtggcgaagtcccgctgggcattccgccgaacgggtggcgcgcaccgccaccaagcggcactcccccggcggcggtcgccgtcttgtggccggatattagcccgctactgttccttcacgcccaacggctggcctgccaccgccggctgcgagttcacggcgcctcgccgacatcgaaaccgcgatctccatggagccctcagccctctcgtttccgttttggcgaggcggcaggagagagagtagagagagactcatcaggactgacgtttcgtcgcttcgacagttcgacctataatcggcccggataaaaatctattcctgtccagttattagtggaccaaatgggttgacctttgtctcaaactaggcccagtttggttagaatactgggcctgtcgtgatggttgggcctaaatccgaataggttatctgcatccagattgacagtccgctcgttcacactgtcaagatatcggcaactccaacaatattgttaggcaaatcatcgacatgccaccactagccatgatagtgcgaccaaaccaaaaccaatattttaacctttttttccttagttgcgacacacaaaaaaaaaagtcaatgcaccctcgcaacacccactgacatcgggctaggataacccaacaatcacattgtcaaaacagaagacggtattctgcattctgcactaacatggttggccgtcgtcatccggcgccttactggtcatcaccaactcactgctcctctcagtgtgccactaccggacacactgaccattaacccacttcaaatccgatcgcacaaggaggttgggagaaaagccccacatgtcagtgacacggccagcctctcacgtcaaaccgttgaaaccccaaatgtacagtctatgagtcactggcagaagggcccacgagaacctaactaaacccacctcgccggcgttagaaagcgttgcgcgcccttttcctccgcatttcgcctcgggattgctcgacggcgagcgattccgacttcacgcgctcccatggcaggcggcggcggcggcggcagagcttccgcgcagcggcgggcggcgctcgcggcgctgatcacgctcctcttgcttgcgtccctcgctttcctcctgtcggcgacgggcaccgcctccgccccgaactccgcacccttccggctggccgccattcgccgccacgccgaggaccacgccgccgttctcgccgcctacgcggcccaggcgcggaaactcagcgcggcctccgcctcccagacggagtctttcttgtctatctccgggcatctcagctcgctctcgtcccgcatctccctgtccaccgtcgcgctcttggagaaggagacgcgcgggcaaatcaagcgcgcccgctccctggcaggcgccgccaaggaggcgttcgacacgcagtccaagatccagaagctctccgacaccgtcttcgccgtcgaccagcagctcctccgcgcccgccgcgcgggcctcctcaactcccgcatcgccgccggctccacgcccaagtcgctccactgcctcgtcatgcgcctcctcgaggcacgcctcgccaacgcctccgccatccccgacgacccgcccgtcccgccccctcagttcaccgacccggcgctgtaccactacgccatcttctccgacaacgtgctcgccgtgtccgtcgtggtggcctccgcggcgcgcgcagccgccgagccggcgcgccacgtcttccacgtggtcaccgcgcccatgtacctcccggccttccgcgtctggttcgcgcgccggccgccgccgctcggcacgcacgtgcagctcctcgccgtctcggacttcccgttcctgaacgcctccgcctccccggtcatcaggcagatcgaggacggcaacagggacgtgccgctgctcgactacctccggttctacctcccggagatgttcccggcgctgcggcgggtggtgctcctggaggacgacgtggtggtgcagagggacctggccgggctgtggcgcgtcgacctcggcggcaaggtgaacgccgcgctggagacctgcttcggagggttccgccgatacggcaagcacatcaacttctccgaccccgccgtgcaggagcggttcaacccgcgcgcgtgcgcctggtcctacggcctcaacgtgttcgatctccaggcttggcgccgggaccaatgcacccagcgattccaccagctcatggaaatggtaagctagctcaccgcgatccctctcgatacggctgaaaatgcaattcgctttcggtttttttgagcttgatgttgctcgtgttcgtgccatgcagaacgagaacggcacgctgtgggatccagcgtccgttctgccggcggggctcatgacgttctacggcaacacgaggccgctggacaagtcgtggcacgtgatgggactcgggtacaacccgcacatcaggccggaggacatcaagggagccgcggtgatacacttcaacgggaacatgaagccgtggctcgacgtcgccttcaaccagtacaagcatctctggaccaagtacgtcgacaccgagatggagttcctgacattgtgcaacttcggactctgatctttgctacgatttcaatggtaatgatcagatgtaggttcagtcgtttctgcctgccgctgttgttgcaacttgcaaaagcagacgagttaatggctctgctccgctaactgtattgtgtttgtcccccttgtcatttaggctgtctgaactgaagaaatctctcatgtattatggtactagtagatgatatcccgttcattaccgtgggcattttgattttgtaggtattacctaaaactttctaacattgctcatattcatacttagcaaccatatatgcagagaataacggaaatcaaattagaataatggttgtgctaaaaaaatagaataatggcgttatatttttacaagactgcacaaattacttccacccggcgtcaccgttcaccaccctgcacagtcttgttgtgcacccacttggcaatatattttggggcatttgcaaatttgccaccggttttttgaatattgcaaggataccactcgaatgacagttctagtggcatttttgcaattttctagtggcagttttgcaataacgattcaaagtagtggtaaatttgcaattgccccatatatttttgaaaaaattacgaattacccctctgaaatagggctgtcaaaaaagctcgaggctcgccgagtagctcgagcttggctcgtcctaggctcgatttgagctcggctcaagctccaaacaagccgaacccgagcctgagcaaaagctcgcgagctttacccagccgagctcgagcttctaccgagtctaggtgagcttgactgtatataatttatattacatgtttaccttattaatataataaactaatagataaatatatattagtatctatttatacagtaaattagcatgtgttagcacaatatatttattttaatcattttctactcttttattagtgtgattagctagaaaataattatacttatcaagagattatcattaaaatatatattatactacttatagccgagctcgagctcgaactgagcttgcctaaaagctcgaagttgcaataggctcggcttgagctcgagcttgggcagacgagttcactcgagtttggctcgttgacagctatactctgaactattgaggtcgttcgaattacacccctaaactgcaatatcggatattacaaaccctaaactcttaaatccgaacgaatcacccccccttaactcaattcggagtggtttttggtctatatggcatacatggcagcctagtcagaaaaaaaaacgaaaaaaaacacagtggggcccagttgttagtgcatcttcatttcctctccttcctggcagctcaatcccaacaggcatggctccggtgatgtgggccatacggtggcaggaagaggaggcgatgcggcggggcgcttgcagaggccaatggcatggaggcggaggcgaggaggttgggatccaagaccagcaggctacgtcgattcgtggtagcgcagaggcggcgatggagacgagctatgcgacggggctcgacgtgccgattgcgtcaaatccaggcgtgtcggagcatgaagcagcacatcctcctttggcaaacgagaaagagaggaggaagagtcagagcgggaggactttggagctagcggtcgggggcggagctcaagcctcagggaaacggcctcgagatcgacgttccatagcttcgccgacgtcgtctaggctcgtcggcgccagccaccgcagaggagcttcgcctccaagccgctggcatctacaggcgccccgccgcgtcgccctgtctccccgccaccgtatttcccctaccatggccgtctccaccgccgcaccttcgccttcgaccgcgtcgcccccgccgccggtcgtgccgtcctcgcctccgcctcgatgccgtcggcatctgtgcacgttgctgctgcccctctcgatctttctcacgctttgttagccgcgcctagaggaacacaagattttggtgtcgctgctgctacgtactaccgccgcttgccatcttcggcctccaccgacgggcacctcatccttgggctccaccgctggcgcgcggctcgtcctcggcctccgcaacatggcgcgccgctcatcctcggcctcccgccgctcgcctcagtgcgccagatacggggagagaggggaagcggcgaagaggaggggggaagaaggggaattaggctgacaagtgggtcccaccatgtttatttgttttggctaacaaatgggtcccatatatttcttatgttttgattgactagactgccagtctaccatgtatccggtttgtaaattttagggttaaaaataatcggtattagagttcagggttaaaaatcggatgcgaggggtaatttgtaatttttccaaaaattttagcaataatatgggcaaaaattcctgttgggcctgggcgttgcgcgttcaccaccgtcggaagcccgaaaaactcttgctaagtggtccatgcagcccacctgtgtcaggtatagaagaaaggaataagttcatctaaggtctcttaaattgtcaacgaatccgattttcgcccttcaaccacaaaaccagatacaattggtccctcaactatcaaaaccggtgcatattaggtccctcggcggtttcgatggcggttttggctgacgtggcgcctacgtggctaattttgactcggtcttgatctgacgtggcactgatgtggcgcttacgtggcaattcgatccgaaaaataataaaccccgtgggacccacatgtcagtttcacacacaataataataataatggtgggacccacgcggaccccacatgtcagtctaattaacccctcctcttctgcttcctctctctcctcctccccctcttcgtctctctcttgcgctgggtcattctgattctcctcttccccatcttctctgtcttcatctctctcccctctcctctctctcttctcttcggttcacgggcggtggggagaggacggtgtccggctaagagaaggggcgcggcgcggcggctggtgggagggaaactagtggagagaagggaaccagcccggcggcggaggcagtgccgccgcggccgtggctgcggacgacgtcgacgtcgacctcggcatctcggcggcgggatgaacgtgtcccgccgaccggccgacacacgcgcgcatcctcggaggcggccgtccacgtgggcgggtgagggggccacctcgccggcgggagaggggagaggcggccggctgcaaagacgaccccagtgatgatgacgaccgtgcggcgcgcggcggaggccgatcccgtgagcaggaagctcttcgtccacggccttggctggggcaccagagccgacgacctccgctccgcgtttatgtgcctaatcatacaaaggtagaagcaatagcgactagtactacctgactggagtatattttgcttcgtcatcatcatttgcttgtgttatgacgaggttgatgaatgaatgaatgatcattgttttgggcaagaaaacaccgttccggccggattgacgaggaacccatatcgatccgctcgccgtggcccatggaaacccaacaggagatggcggcgctaccttccgctgccggcgactactaatggtgggtgatgctcgagcacattgacgaactcgaggtcgacgacgaggactccaactacaactcctgctccgccgctgccgacgacaccgccaatcccgtgagtccatgatgacttcgctcacctccgacggccacgtcgtaagagtctacttccacctcgaagcgcccccggcgatgtcacacctatgcccctagcggtcactcttatccatttccgccgccgtcgtcgccggccgcatcccctagcgcaagagagagatgaagagaggagagagaggaagcagaaaaggaggggtgagttagactgacatgtggggcagcgtgggttccaccattattattaatttttttatgtgaaactgatatgtgggtcccacggggtttattattttcccgggtcaaattgccacgtaagcgccacgtcataccacgtcagatcaagaccgagtcaaaattagccacgcaggcgccacgtcagccaaaaccgccatcgaaaccgccgagggacctaatatgcaccggttttgatagttaagggacccgttgtatctggttttgcggttgaaggacgaaaatcggattcgttgataagttaagggacctttgatgaatttattcctagaagaaatccgcctccttgtagccaccgctccgtcggtcagttgaaccggtctcctcgagcgctcggaggagcggcaggcgggcgcctctcgatctcccccctcgcgagtccggagtccggacggggaggcgcacaactccaggaatccaggtgctccctccgtccctccccttctcctctggtaggcgccgcgcaactgctccactcgtgtagcgtagtcgcctcgctgctaggaccgccgcatcggggcccgggacggcggaaatcaggcaccgacgacgtggaaaacttcggtgactggtctgtcacagtctcggggtcgtccctgttgccactgaatccgatcttattagtcgtccccgttgccgctgaatccgatcttattagtcgtccccgtcgccgctgaatccgatttataataagagtataatagattggggacatctctcgtaagtcccaacgctaatatcatcgcgacgcgcggtcgtacgagtggtcgtctcttactttttcaggtaataaaaagcgcaggcacccctccccttatccaggtccggatttgggtttccctcaagttttttccgttgttcaattggatcgaattaaacgatttatgcccgtacagggtttggtttgagtagaatcatctgtggtggtatattggtattctatatactttttttttgatttggctgtttcgatcagccatggtgaagacgtcggccaacccgaatgccaagggcaaggccgcagcttcgtcctctggtcttccgtcacccaagaccacgcccagaggggtgaggcctaaggcgtttaagaagaaggccaaggccgatccagagatgcagaaggtggcagctgcggaagccgccgccactgctgagactgcatcggcaccccctctgaagccggctgaggtcagcccagcggcagcggtggccaaggagaatggaggacagaggatgagcagaaaggaaaagacaaagatgaaagagggggaccagatgaaggaggataagaaggggagaataaaggggaaggaaaagaaggacgataaagcgagggagaggaagggtgaagctgggtttatattcatgtgcagtgctaagacaaagccggagtgcttccagaatggtgtgtttggcttgcctaaggggaagatcgatgtggtggagaagatccagccaggggcaaaactgttcctctatgacttcgacctgaagctgctctatgggatatacaaggccaagacaaagggagggttagatcttgtgcgaggcgcgttccatggaaaattccctgcacaggtaactctttagtctgtgtgttcctttcctatgttttatgttcctttcctatgctttaggttccctgcacaggtaactctttagacttattgtcagtgcgttcctttcctatgctttaggttccctgcacaggtaactctttagacttattgtctgtgtgttcctttcctatgctttagggtattgggaggacctggtctgctattagagcaatacaactgtcttgattatccaggcaatataattaaaatttaaaacaacaaatcagaactagaaacatttcctcaggcttaggggtgtgcaatgtctaataacgaataataatttcaggtcagaactgattattgatgtttgactcttgttttgttgttctgattggtgttaataattggaaatttaaccctaatggaacggtaaatgattgccaaggtattttttctagcatgacattgtggctatttaaatggtcaaataagttctatgttttcaaaaaaagggacaatgatcatcggtcatcattaacttaaatccccatttgtacacatgtttttctaacctttttaacataattcgttagcccatatgttattcgttcagattggtctatcatttttgtaagcaagtgtcatgcaactggcactaaaatacaaacagctcaggataaactagtcaacttttgtcatgagttgatttattcttaatacttgttgacaacttgagaaacatgattgctcatttttatgggggagtgcaacagttatgcctataagttaagctttaacaccagtttggaatatagaatgtggccacatcctattgttatgtttttgtaagacactaaaatttgagaaaattttgcatgtggcagcggctgtgtcattttcttttttgcatgccatcttcaaaactatatttttgtgcttccacccaaaatagcttatgttcttatccatgacactggtgacttg

SEQ ID NO: 7330 - DNA, 1417 bp, Oryza sativa
atgttcccggcttcaacagagacatctcgcaatgtgcagttagatactactgcgactgctctagatcgatcttcagctagaggtgcagggttaaagcgttgaaatgaaacatcttttcaactattttttttctcccttacacaggttcccgtctacttgggcggcgcagttcaccggaacaatatgcgcgtcgttcgtgctcaaggcggtgatccacccggtggatgtgatcggaaccaccacgcccgtggggccgcactggcactcgctcgtcgtcgaggtcatcgtgacgttcaacatgatgttcgtcacgctcgccgtcgccacggacacgagagcggtacgcgtcgtccacggctttcacctccttgtcgtcgatcgatgatgactgaattttgccgtaaaatacatggactcttgaccggtgtttttttccatatgcaggtgggtgagttggccgggttggcggttggttccgcggtttgcattacgtccatcttcgcagggtaaatacgctagaaatcgacggcccgttaatcaatcagctattcaattcgttcattcatgttcatgaccaaaaagattagtactagctattaggaagtaattaacttggagctagtagcaagaccaattagttaatttgtagccacttgactcctgacaagtgagaggggggggggggaaaagtcaaactaacctggctaatcaacattatctttgatcgatcagtaaccaaattaataaatgtagggaaacatacatattgatcaggcagaacgtagaaactaaactagttgagcagaatatacaatggagactgagacgcagcgaaaaacgagtggtggttgcagggcaatttcaggtggatcgatgaacccggcaaggacgctggggccggcgctggcgagcaacaagttcgacggcctgtggatctacttcctgggcccagtcatgggcacgctctcgggagcatggacctacaccttcatccgcttcgaggacacccccaaggaaggctcctcccagaagctctcctccttcaagctgcgccgcttgcggagccagcagtccatcgccgccgacgacgtcgacgagatggagaacatccaagtgtgataggacgacgagatgtcgtcgatcgtgtcctcttactcggaaaattaccagtcgatctcggtctcgtcatcactagctacgtctttgtgtgtgttttgtgtcgtgtcactgctgcttcgtacacgccggagagagttacataaaacgcgcgcgcgtgcacgggggagtggcgctagctttggttgcttggtggttcgtgtggggtacgtagattgctcgctctgttaattccggggctggagcctgctaattttgggcgtgtgcgtgtgccgcttgtgcatcagtctctgccgtcaaa

SEQ ID NO: 7331 - DNA, 8315 bp, Oryza sativa
  unsure (1)..(8315): unsure at all n locations
aatcatttagaagttgtgcaacatcccctccacagcctctccaaccaccgtaatattgcgtgcagatgttccctcgcctccaagtgccatctgggcagaccanaaggtgtnaccccccccccccccccgcgccacccctcatctccttagtcggctggcctcctcccttcccatgccccctctttcctaagctggcggcggtaagtgcctgtaacatcccggcctagggtttaataggattaatagaatattcatatcaacaagttgcaacttcttttccggaagccaatctccaaataactccagggttaagcgtgcttggcctggaaccgggaaattcttcccgggtgcacacgagtgaggacaaaatgtgcagaaaagacatgtgttggtatgtgaggacagtctatgacctatgaaagctgccaaatgtaagtgggcccggcctgggagaggcgggtcgttacagtgcccctaccccaaccatcttcctcgtctctagaagcaacctgctgctaattatatataaaaaaaaggtcaatgctggctcactgccctcctctattcccttggctccgatgttgtcatccgccggcctgggagaggcgggtcgttacagtgcccctaccccaaccgtcttccttgtctctggaagctccctgctgctaattatatataaaaaaaaaggtcaatgctggctcactgccctcctctattcccttgggtccgatgttgtcatccgcctgtgtccaccgtccaccatctcccatggcctcccctctaaacccgacaatcccccccctatttcctcctttcaccccaacactaacccataccctaaaccctgactcatgaggccattgctgatcaccaaagttgtggagttaggttcatcgttcactggagcatgaatcgtaaagcaaattataaggttagaaatttataaagattttaccctcccatattctcttcaacatcctatttgatgttgtggagtagtgaaatataatgcaaataattgtgaaaagcttaaagaaaatcataacagtgtatggtggtcccttaagtaactaatataacatagaagcagatagggattgtgcgcgtgttgataggtttgaattttaacatttgcatgaaactatattatctaacgaaatgtatgagacactgaatgaatcattttttatcacttcaaggtggtcctcagctgtagctttcgagtttttttagattgctcgatcaaaaccagcaaaaagagaataattggtgctgtccattgttcttatctaatctaaacggattaaagtgcgtgcttattcttatatactactacatccgtaatagatagcacaagcatatactatgtgctttgctcctctaccttttcatcattttctccttttgcttggatatgtgcaatttagttcccgtgcctaaatttagtatatctagctatctaatgattctgtactcgtatagtcattttcatccacatgccaattaattaaggcttagttttttttaattatttaacaggttgtacattgaaatagactatttacttcacattccaaaaaaaatacattttataaagcaacttctatggtattgtttaggagtgattttatagtacttgcgaagctatcgagagataccgtattttctaatataaattttaatatctctcggtactttcgatcctagaagatacaaaaatctgcactaaaaaattttagtgcctctggtactttttgatatctctcaaggatcgtaaaatttctaattatttaaactagttgttttaagttatttgttaactatcaagatatttaatatatatactcatattaaatagataatccataataataatctgcttgtatgactcggcggaaacggtggatcactaactttctctagaaaagatagaacgaaagaaaatccccggtctggattttggaatcggcgacccgcggatgatatttgcagtgcaatctaaataatcattacctcactctaacaagtgatcaggctcacaaattcatatggtgggctccacgtcatttcgtaagacaacaatatacaatcatgatgacgcaaccagtgcaacaatcaacaaaagaagtccatcaattcgatgatgtaactatgtaaggctgtttctcactcacgcaagaagattttgtgatgtgttccctgaaccattttctaacagcgtgccaacgtataaaatactactaccagccgaacaattaagaaaaacattaatcttccttgcaccgtctgcctacgttcaattaacctcctcagatgctacaccagtctttttttttcttcaactcttctaacaaacaaataactctaattcaaagagtttaggatgtacaatattcagtataaaggggtaaattaaatggagttataaaccggaattaaaaaccctttctccaacagtgaaatggagttctgttcccaccaaagaaagaaatagaaaactttatttcacgaataaacatattggaggtagatcgatcactggattacatatgtgatttatactacatatttttttcgaacaaacatatcctgagagtctaaataggacctggtctcataagatttttttttcctctccaccaccgccaagcaccaattaaaacacctagctgacagaccaagctatctgtaccaatgtaccatacagtgatcgttcaacactggctactgttatcactactagctagtgccacccatgaacatatatggaataagagacaacgatgaccacacttccacacaattaagggcggcgacgacattcttcgcgcggaaccaacttgggatagatgagaatacagtactacaatcatgccagtaaagcctagcatgccgcctattgctccacagccattttcgctatcatgcatggcctcacagcgcaggacgatcgagcttgcattgggagctgaaaatcacccggaggagtcgctgttattcgaccgatgcatcgccatgggtgcagtggtccccggagcatatcaaaacagtcgcccaatggctgcttgatcgtcaggtctgctgttgctgccgcatgtcgtcgtggatggcctcccggccatcagtgtaagatgaagctgtggccgttaattgctcgactttgcgtgcgtccggcgccgggacccgccggccatgcacggtcggcttgaacatatgtccgtcggtcnnnnnnnnnnnnnnnnnnnnnnnngctgctggacagaaagaagcatattctggtgtcgtgcaataagaatctagaatgagccctagagatgtaggctttgcaagagaagagaattttatatagccacttccttgttcttcatatatatagctagaagaaaccagggataaaaaagaagcaaaagtgggtatgtttcattggtgttttggttgaaatttgcgagtaatatgtgttacatatttatttgaaagtgcattgtatggttgtaacctgttagttaatactatcactttttttctctaccacgacaatgtcatgtgttttatcctcaatccacctaaccagccaatcaccaatcatatataggtctcaatctactttctccaccattccccaattatatatgggtgtaacccgttataatacacggacttatcaataaaactttcagtaacgtgcaccgcgtacatcgtcccagcatactgcgtttagtgcaagcagacaggcacgcacgcacgcagaatcgaactgtatcacgtcgatcgggtgctggatttgcgagaaaagcaaacctgatcagggacaagcacgcgcactcacgcggatcagttcctccacattctagaactgatcgacctgcctacaaccacgagactgaatgatattgatcgatcacactagatgacaaatgagcatgcatgcagccacatattcacacactgatagatacgactgatcaccgatgcatcacaacttcacaagtcgcactgaaactgaaataagtcttcggtacaatgacaagcggtagctaggtagcgtctcctgaatcttctctgcatgcatggccatcgtgacatgtcgaatcagcgacagatgcacgccgcacaactctctactgaacggtcatgcagggtcaggcgcgcccaatcagtgagcacctgcaaaaccaagcacgcatccttgcctcaccgcctttagcttatcacatttcacatgcatgcatagtgctacacagtctcggtgtgctttcaaccggtcggcggacggcgtctcggtgatgccgatctttaccttccatatatcagggcgagcgagcgatcgacccgccacccggcgccacctcaccgtcgccgaccactactgacaccccggcccaccccgccactacgccgaaagacgcacaccacctcgcccgctagtgctcgccgtcgcgctcatctcgacgtacccccaacccgaccccaccccatgcatctcacggtcacggacggctgcctgctcgatcaaccgcgcgcgtgactgcgtgagggagagaatctattgtacggctcggcgcgcgctgcaatcgatcgatcggcagcgcgcgcgtcacgccgcacccacggcgaaatccgcgtaacaatcgcgtcgcgtacgtcgcgtagcgcggttgatttgccggacgaggtgagcacacacgactacacgagccgcgcggcgggcgcactcgcgcacggttgggtgggtgttggtcgttcgatcggtcgccccgcgccttttgatccgcgggatctttttctcgaccgatccgatactcgccccgtcggcagcttttgacggatctttggaggcgagacgcgacgtcggctacgtgggactgggatatttggctggctggctagcttctggcgcactacgcgctcgtgcacatctcgtcgcttgtttatattaaactgaaatgtatcatgcatcgcttttgagcgtgatacaatcacactaaataagcttcttttaataaaaagaacaatcacactaaataatttggggcccttttgctgcaggcagcgggtggggagatcgatcggcctcacgttcctttggtgtgggcgatctgggtctatcatcctgggattgtatataatactaaaaatcttctctgcaaagcaggggacacagtggcacactaaccatatgtacgccacacggtttctttgatctcctttttcactggagttttggcgaggtggaaagtaaagaggactcgaaccttgaatgtttgaactttgaagggactgcttaccggatggacgtgtggcgatgtattttttaactgaaagaaatttggcaaaatcacctgcgcgcattatagtgcaccagtaaaatcgacagatgcctgattcctaagactcggacctaaaggtgcttttgtgttacgcatcgcatccatctataacaggtaacccccaccatttccacgactcccttaaaaagctccatcagctgcttgacacatgacgaactatatcgaactaggattcttttggtggtaattattgttctcctggtggcctttttaagtttaatcctagtaactgacagcggggatggtcatgagggatggcaattcaacatcaatgtcacgaaatgtgatagtagtgcgagctaaagtaactaggttcttatcacctgttgcgacaaatttgtcatgtgataaaacgattagatttggatgatcacagcgactttttgtgctggatacaatgcactagtgacttgcatcatcgatccttatgggtttcaaaagttagcagatatacgtaaaagaaagcaggcaactttttcccctcaagaaaacatggatgatggatatcgatggccagttacgtaccttagattattattcacgaaagacttgattgaactcccgtgaagcggtgaatgcaacaatcagaacgatatgcggtgaagacttgattctctttgcggcccagatgggtggtgacagcccattaagcctgaaatttttgagctgttttcattaagtacttctctcaaaaaaaaatattaagcgctcctaattaacaatgcaatacactggaacagcattacagactctgttttgcagttcagtaggagaaatgtttctccttgttgcttagtaagagcttaagctgtgcaatattgctacagtaatgagtttaatgggcttcagatgttaacactcttcaagacctgggctctggtgtggtggtggtgtgaccaagaacagtcgagtaatatggaagtttgactgcatgaaattttgcaaaaaagtacagcacctagaattcctgaaccaactgcatagacatgtcaagtagaaatgtgaatcaggacctttcaggaacactcgcttagtttgcaagtaatccatgaagtcccagccctagcctccaccattgcaccatcatgcatgaatacatgataaaaacggtgaaactgggaagctgctactcggattgatcgtcgtgtctgtttcgtgatcactgttttttttttcctttctcctggacgtgatttacctcgttcctagtcgatgcaagttgatttccactccgtgtttccgtcgcgtggttctagagaacaagtgtggagtaagaaacactcattgtcttctttggttttatcagtttgggaatgggagcgtgtagcatgacttatgttagacatgtacagatgtactaactctggtttaagtcttggaatatagtcaaaagactagaagaaaacaagcgacaaaactggagcttcaccagtttaaatattccaagctgaagaaggcttaaacgaccagaggttaatttggtgtcatcatccaacaaagtcaacttggtctacagattacaagcacatttttacctatccatttataacatagactttcaccaagggtgtcagggctccaagaaatgccacctgcatccagctctgcagcgccaatctcagcatttcttgctcgataacaattggatataaatgcttattcttcactcatactgctactactatttattggcgccctacgctgtagctgttttgaaactgtccctatacctttcgagggcagagtgctttcccataccacacgtgcacgggggcaaaagccgatgtgccacgctcggcgtaccacgcggttaagcgcgtgtgtaaacacgcacaaacacggcctaagcacatcgattagccgcgcaaaagtacaagggaattaaatttggagtctgcaccctggaaacatgggatcctggatactaacaaacttattacatggccacgcattgcaaggggcatgagaaggaggataacttgaaccggaagggtttgactcagctcacccgagtaggggctagctactgtactacacttgctagtagtaacatcaaacggaggccgcacgagtgggttggcattgggcacagcaagatcgaggtcaagcaagcaagagacaaggaactagccatacctgtcgaggagagaggcagatacgcctggctcaccaggtcagtcaccagctcgaacgaccattccaggacaccatgctacaaagggcagacaactgaagcaataagcattagtaatgtatctacatatgttaacactccaccgtaaaaagtctgtaaaacaagagtgcatgtcacctgcttagcacacaataatttaaaaggtactccctccatacttgtaaagaaaatcgtttaaaacaatgtttaagtcaaactttgggaatagaaatcataaataactcttaagttgttaagtttgaaaatgtaaaaattatataaatagatttgtcttgaaaaatactttcataaaagtatacatatttttatagaaacgagaagtcaaagttgtgttttggagatcgtgtcgctatccaaaacgactttctttacgagtacggagggagtattagcacaaaaacacatctatttgcaagatttttaccgctagttatttgtaacaagatcatactaatgcaggaaggaatactcgtagaaatagaactggtatgaacacttcagatctgaatagaaaactgcataggttttccacggaccgactttaggcatttgaactcagaggtttgaccctaattacccctctataaaccccctacaagtgacctcttccctcatttaattctaagcttcttacactgttgggtgcttggacgacagggaaggaaaacttgggcccatgggattttgggttgcataattttcctaatttaatttcctgatgcaagggacaaatgagagggctgcacttggatccatgcaggattttcgcatca

SEQ ID NO: 7332 - DNA, 972 bp, Oryza sativa
tcattagtaaggttgtagattcataggttagccacatcaaaaaggaaatcaggagaatataaagagtacatactactccctccatctcataatataagacgcgcacatattttaagattcaacctttaaaacacttgactaacacttagtataatattaaataaattttatttgttaaaaaatatattattagattgagatttaaattactttcatatggttataattttgttgctacaaaccttatagtatataagaaattataagttaaacattagttttggagaccgtgccaactttgaccatgccttatattccctccgtttcgaaatgtttgacaccattaactttttagcacatgtttaactgttcgtcttattcaaaaacttttgtgagatatgtaaaattatatgtctacataaaaatatatttaataataaatcaaatgataggaaaataattaataattacttaaattttttgaataagacgaatgatcaaacatgtgataaaaagtcaacggcgtcaaacatttcaaaacggagggagtactatcttgtactaccactatcagtaactgtcttcagagttcagatactacagttcaggaaaacaaaactccaattcaggcagctgaattttcatcaccttgtattaaaaagagcaatgccagaaatcgacatatcatctgaagagcaatgccacctactcctaattaaactcaatgaaaaatcaacaggattcggaactcaaagtctgaagctgatttttacaggtcaatcatgttctgtgaagtaggcccgtatggtcaatgctctgatggccgtagacagcacaagtgtatggcagttatgacgcctcttcttcccttggtaggcatccccggtgggggagcagagtgtggacggcgatgccctgacaaaatcttgccacaatgattttcgattggaaaatcagcacacatcacaaaga

SEQ ID NO: 7333 - DNA, 7341 bp, Oryza sativa
ctactgcccaacgtgttgtctggctgtactattgtttgtgtgttgctgatatggagtggttgcttgctttcaggctccagctagctagacaaatgtgtagtgaaaaggacctatggattaaggtcgatatatgttgttgacagaagagacgacattaattccttatacaatgcggatgtgtgcatcattatggtatatataagtttaatgaccttgaaagatatgtgattggttggttcggataacaagttacatgagcatataccacctctcgttgccttttgactttctttctggccggcgacataagctagactgaataatttggcatatatgcctaaaatagagatttaatttggcagaatcaaatccatggcaacatcttgacaagaacgcgtgaataaactaagtacttaagtgaggactaaattagccaatgattttgctctcttgagatttaaaaagtttttcagataatgaagagggttgcgtcaaaaattaaaaaaatggagaggatcaaagctgacgaaactctgaaaattgtagctatcggaggtaaatttaacaagattcagataccatcatatgtaaaaagacaaccggaacaagctaaggtcgtttcagaaaaaattcttatgtgactactaatattcaatcagcactcaattggttaggtgtctctgctaacatcttttggcaaagaacagattgaaagaaactaagaaagcatctagctagtatgccgaagtagtgcatggcttaagtcgtacacatagctaactattatattgcatatatattttgatgcaagaagtaatatatatgaagaattggcagtttgaggtagctgtgttgctgcatctgcatacctgaatccaggggaaatgcctgaacacggcgaacgcgagcgtcacggcggggttcatgtgggcgccggagatgtggccgacggcgtagatcatcaccgtcacgatgaggccaccggcgatcgactgtcccagctgcgatatgcgagacaggtcgctgccgctgatccctgccgccccacacgtcatgaacaccagcaggaacgtggccaccacctccgacacgacctgcagccatggcgatccaagcagcgtgcacgcattagctcccccccagctcaatcgatctcgaatcaatcaagcaaccagagaaagacagataaagctctgaaagtctgaagaattaatcattcagctccagactcctcaccttcttgaggaggtgaggagggaagaagtcggcgatggccttctcgccgtagtacatggtaggcatggtgccgttctgcaccgtggagagatcgtggatctcgttggagtagttcgccctggagtttgttctcgagttgttgctggccatttctgacgctctatctagctgagctacttgtgcagcacgcgagtgcaggaggtagaagaagaacaagcagctcaagctctaacactggctggctagctcgctcgctccgtcgatcgcttgctcgttgtggtaatgagcaggagtatttatagggagatcgagctagctaaggttgagaagcctgagcaactgggaggtggcaggtactagtagttacagtcctcactgccttttgattaggcaggcctacttgtcggagcaccactgggtacagtgcttgcatgcatagctcattagccctaattaatcagcataagatcattgtttctggtctaatttttcgacggggattcagattttgtttaatccgttcaaacacgttgtcggatcagcattggccgagaaacagaaacgcatacttgattttgtattctcgtcgagggcataaaaccgcgcgtcatccccccgtgaacgacaacgagagcaacgttgcctctgtctgctgttagactgaaataattgtgggttttcaattcacaaggtgttgtaaactatatgcctggataaagcgcgacgtcgaggtcatgacgccgatatatgggtgacgaacaaattctttttcttttgtagattgggggctcccctgaaagaaatgatactatagggatggatatttttggtcattctacgtacgttttccatgccgaatgttaatacgttttttttgcgaaattcgtcacctgttgtaagttgacatttttcataatctatactcgtagaagagacgaaccatgtgtgccaatgccaactaggataaaccgtaccgaaatttactattggccgaatttgccattgtccctgtcagaggttgccgccattgccagattaatgatggatccgtggcaactgaacaaattttcaattgtaggattgccatctctggtgaccaaattgaaatatccgagcagttaaggatttgcaaaggtgacattacaataaggggttatcctaaccactctattacgcagtgtgcatgcttcggttagcaatgctaagcaatgtcagagcagaggacgttgcacttggatggtcactgtcaaaactgacctgctactattgaaaaatctcatgtcagttggagtacttcagcaatttgcaatcctagcttctctcattgagcttagctcacattcagtttttctttttttgccgtactgtacctgtaggatactccctccagttcgaaatgtttgacaccgttgactttttagcacatgtttaactgttcgtcttattcaaaaacttttgtgagatatgtaaaattatatgtctacataaaaatatatttaataatgaatcaaatgataggaaaataattaataattacttaaattttttgaataagacgaatgatcaaacatgtgataaaaagtcaacggcgtcaaacatttcaaaacggagggagtactatcttgtactaccactatcagtaactgtcttcagagttcagatactacagttcaggaaaacaaaactccaattcaggcagctgaattttcatcaccttgtattaaaaagagcaatgccagaaatcgacatatcatctgaagagcaatgccacctactcctaattaaactcaatgaaaaatcaacaggattcggaactcaaagtctgaagctgatttttacaggtcaatcatgttctgtgaagtaggcccgtatggtcaatgctctgatggccgtagacagcacaagtgtatggcagttatgacgcctcttcttcccttggtaggcatccccggtgggggagcagagtgtggacggcgatgccctgacaaaatcttgccacaatgattttcgattggaaaatcagcacacatcacaaagaatgaaagaacccatattttgatcggtacagctcgttgcagatcagccactcgacttggtgaaaatctcaggccttacagagtttgctaggtatttcgttcacgaggtgtttcaatcaggtttctttcgcaaaaatgcagataatttattgatttgagatgccttctgtaatgagcactcatcaatactttgtagatgtatacatgtagaatcaagaactactttacgagcaaagcaaattaaatgaaaataaatggatattggtactgaaaaataccactaaatacacacatgtgcaaacagagagcgctttctggggcacgtttagaaccagcaccttattttgcacgatctacaggatgaaaagacagcttgtgctgctgaaaaaggaccaatggcttttggttgctctccctgagatgagactagcgcattggcatgaggccaggccacaagagggaaaatccacgcttctctgcaaccccttagcttttcatgagaggcatggaaccaagatagctgacgagtgagcgatcagatcagtgaatcaatcacagatgcaccatccatccagaagctggcataattaccttcgctgattattgatcttcttttgtctgcgctcctcaggccactagtgtagttcttgttaatcacttttgtgtgtatgaatctaactacatttcctggcataatgctaggccctaccctgtgatcaagcagtagcaaaagcaccccatgttgaggtcaggtgtaccatccgatatctgctaagttgatatggtgccctgaaccattctctgaagaagcatcgtttagattcagaataaccatggttttactttgcacaagtctagctaatactgtaggtaggttccctgatgcatctgcaatggcgcgcgcctgacctcagaacttgaatcagttattcctatatggcaatcaatcatgtctgtcttcccatcgaatcacctccgttttcacggccttaacaaaagatctgaggaccatatatgttctcgattgttgtcgaaggttctagatcgattcaccactgtcaaaccaagcaattacgtatggaactatgaaacatatcggattttgacgaataatgattacacatatttttaattcttttctcctatattattatgtttcgaaatcagagcagataatgtatggattcatatgtagatattgattgttctggaatcagacagaaaaagacggactcatagtatgtcttctaatttatcagccgtgaccaaaatttaaattttaaaacataattgtagtgttgaacttaagtttcttacttggaatttattttcaatattgacttataaaccgctaagaatacggatataaaaattttacctgtaaattactttttattgggaaagaacatgtaacctagcagttacagtgataagtagcacatctaggttttgagttcgacaccccaagagagtgaattttaagcctaattaaaaaaaatcacttgttggccctgtaagatcgaacaacgagaactaagattaccaaacagagagaggggagggggaggggggttgaatggtagcaacaccaaacacttttagcggaattaaaagttacaccagtgttagatctttggtctgactgtacaagcctcattggtctgaccgcgcaatcaagccaccgcctcttgttgacacctccggtccaaccgccatagatccgattgtatgaccgagtagttgccgttggtctgaccgtcggtattcttccggtgtgactgttgtactccgagcaaatcacaaatcgaaaaccctcaaaagtagattaaagtttatttgcatatattcgtgtttacaaagtgcaataacaacacttctcttatagaattggactaaactcgaaaccctaacttttctttaaacttaacttacacataatcgatcacaagaggcctcaatcccctctctatttatacccgagataagcagcctaaaaccatgaatctaacttgtgcaatatatcctaatccactaggaaacatttctcgtacctaaaataaacttatctctttccaattcaaattccaatcttcctaaatttaaatcgactccttattccatatgtacacaatctcccatcgtatgcctcatggaatctccatcaaccacgtgcattgttttttagcctaagcatcacgcatgatatcccaatcgcccggatgtcatcttctctcaagttgattcctgaccatcatcggcaacgctctcccgatgcatcaaagcacacctacacaggaatcaaacgaagaaacatatctgagcataagttcttctcaactttactcaacattattacacatgtatagaattcatatataagtcataatcacgaataaacaaataaaaaacccgaaaccaacatcgacataaagttggccggtcatgctgtcgttttggccagtttgacagtgcacaccacgccagtatgaccagcttatcctgcccggtctaactggctccacacaaagagcaaaactacttcactaataatcttcaaatatcgaaatcaattatctcatatgccaattgttcatcataaaataacaatcaaaacacactttgatttcacatgcccctcataaaaatgtgttaagaatcaacctatggagcgtgggcctcgtataggaagcatgggcctcaaagaatgagttaaggaacgatccatatgaatgagtttgcgtgtgtgtgtggggggggtgagggtttgtggcttttctcggttggtttgatggagccttcttcttaatgaaaaccatcggacacttattttctcactggtcaagtttttttaattatttttcgttgtttcgtttatttttctacagtttattagctatgagtaaactatgaggttgagagctaggttactcggttaaattagacagaccaccggaaagccatcaaatttcaaaaagtgttattaatgaatgagggtacaaacggtagaaatgacatgagccattacaatttttacggtggtctatactgatgatagaaaatacaccactaatgtagcaaaccatacagctgttacttatctacagatcgaacattcattaattttggcatcaaaccaaactttcagctctaaccaaacttacactaagctttgatggtactaaaattttggcaaaatatcagacctaaccagccttttaccaaaactttggcatggtccaaatattgacattgttaaaatctattatatactaaaagtccattaaactttctacaaacgctctcaagttatcacgtggcgctctaataaattagagaaaatcctagaaattctaaaaaaaaagcaaaacatctacctcttgattttcacttaaattgatgggtccaatattatacaccattagataaaattgatcttaaaacaaaccaaataatatgggtcccacctctcctatttctcccgcgtgcataagtataggtcacgtacgtacatgtgggcctgtagtacgtacgcctccctccatttttttcttttttttcttcttttttccatttatacaatttgatatatatttgtttaaataatcatattttttttaaaaaaagaaaaaacatcatataactctttataaacacaggtaattaactaaattagctatacagactttgaaaataaaatttacaccatattatatgtaaattagctctaaaatcaatagtgtaagataatttactttgtactattattttcatataatgcactattttaaaataaagcttacacaatattatattgtgtacctatcaaataaacaatttaagatctaaattaactaatatatatatatatgtgtacttaaacagatagacccattatttaaatcatcggatctatttttttattactttggactattattctcaaataatgcattgttttaaaataaaatctacaccattaccattatgttgtgtacccattaaattgacaatttaatatatatatatatatatatatatatatatatatatatatatatatatatatata

SEQ ID NO: 7334 - DNA, 1896 bp, Oryza sativa
cggcatcattatgtacttcctcttcatgcatagccagggggggaggttgtagatacacatcgtaacgagccaagtgctatggccgctgctcatctctccaaaaggattcatgccatccgtactcaaaccaaaccgtatgtttcgtgcgtcctttccaaattctttaaattttctgtcgatgtttcgccattgcgaaccatcggcggggtgtctcagcatcccgtcctgttgacgctcttcagcgtgccatcgcaacattctagcattccccttgttcctgaacaaacgccttagccgtggtattatagggaaataccacatcaccttagcaggaattctcttctttgttagctgcccgtcaacttctcctggatcgtcccgtctaatcttgtatcgtagtgctttgcaaacagggcatgcttctaggttctcatactcctcaccgcgatataggatacaatcgttcggacatgcgtgaatcttatgaacttccagtcctaacgggcaaactatcttcttagcctcgtacgttgtctcgggcaatttgtttccccccggaagaatgttcttgacgagtttcaataaatcgccaaatgccttgtcactaaccccattttttgccttccattgcaacaactccagagtggtatccaactttttgtgcccctgctcgcaacctgggtacagtgaagttctgtggtcctccaacatcttgtccaatttatgggcctccttttcactttcgcagtcctccctggcgtcctgcaacatctgaccaagatcatccgcaacgtcgttaccatcagcagctatttcctcctcgcccgtttgatttccttcaaatccaacatactgagcaaagtccggaatattgtcgtcttccacttcatcttcttccatttcaacaccttgctctccgtgggatgtccaacaattatagcttggcatgaaccccgactcaaacaagtggaaatgaatagtcctggatgcagaatactccttctgattcttacacttattgcatggacaacaaataaaacccctttgcctgttagcttcggccactctcaaaaaatagtgcacgccgtcaataaactctttggaccgccggtcagcgtacatccattgccgatccatctacatgagtcaaaactattacaccaaataattcttaaaaactatttgtaaagttttaaactaattttaatgtgttttacttcttttaattttcattttagtttgttttctattatttaagattaactttcactagagttttccttctcaactattttataaaaccttgtttagcaaatgaactaaatttctatatattctttcttccccacacacattttctctctcatcaacttacaactaaattttggagacaaaaaaagtgtgcaaaacataggtgcaaatgtagtatgacaaaaaaaacattggaggatgaagttgcaaaccttttaggcacctccgatttgtatgtaatcaccaaaataaattcaatagaaattttggcatgacctcccctcttttttgaagaaattttgaagcttgctcgggcagctggaggaggaagaagacatatatataggggtgggactttagtcccggttggtagcaccaaccggggctaaagatcaccgggatctttagccccggttggtgctaccaaccgggactaaagtcccacccctatatatatgtcttcttcctcctccagctgcccgagcaagcttcaaaattttttcaaaaaagaggggaggtcatgccaaaatttctattgaatttattttggtgattacatacaaatcggaggggcctaaaaggtttgcaacttcatcctccaaagtggtttttggcatactacatttgcacctatgttttgcacac

SEQ ID NO: 7335 - DNA, 1072 bp, Oryza sativa
cttcgctgcacctcgttgcccgcgtgccctcttctgtccaacggagggttgactaccactagcctcctcctcctggttcccctccacatccctttccacgtgcccctgctggttcccctccgcatccctctccacgtttccttcctcgttcaagtactggtttggatcctcgttcccctcttcttcattccagtactggctgcttccctccgcgattgtatcgtacaatatctgttcctcatcgcggtcagccatctgttgatacaagaaacatctgctaagtcacgagacatttatgttttaacaatctaagtcatgtatgctaagtgtaaatgtcgtacattagaaccctacacaaccttacgtgctaagtctaattacaaatcgtcatataagctaagtctaggtgacgtatattatacaaccctagctagtaaataattatatactaagtctaattacaaataaaataatcttatattaaaactcaaataatattacatgctaagactacaatagtcatgtatatgctaagtgtttcgtgcgtatatgctaagtctaattaagactacaatagtcaattgctacttgtcgcaccaattccgtagtcaataattacatactaagtctaattacaaataaagtaatcttatattaaaactcaaataatattacatgctaagactaaaatagtcatctatgctaagtgtttcgtgcgtatatgctaagtctaattaagactacaatagtcaattgctacttgtcgcaccaattccgtagtcaataattacatactaagtctaattacaaataaagtaatcttatattaaaactcaaataatattacatgctaagactaaaatagtcatctatgctaagtgtttcgtgcgtatatgctaagtctaattaagtctacaatagtcaattgctacttgtcgcaccaattccgtagtcaataattacatactaagtctaattacaaataaagtaatcttatattaaaactcaaataatattacttgctaagactaaaatagtcatctatgctaagtgtttcgtgcgtatatgctaa

SEQ ID NO: 7336 - DNA, 3900 bp, Oryza sativa
  unsure (1)..(3900): unsure at all n locations
gtcacgtgttgatgacacaactgctaccagttgtaataaggggtatccttccaaacaatgtccgggcaacaataacaaagctatgtgcattcatgaacgcaatttcgcagaaggtcatcgatccggatagattagaagcccttcagaatgaagtggtgcaatgtctcgtcagtttggagttgatatttccaccttcatttttcaatataatgacgcatctactttgtcaccttgtgaaagagatccgtattctcgggcctatgtacctacacaacatgnttcctttcaagaggtacatgggcgttctgaagaagtatgttcgtaaccgtgctcgtccagaggcaagcatcgccaagggttatggaacaaagaggtcatcaaattttgcatagaatttatcgaagaccttcgcccaatcggggtacctgaatcacgccatgaagggagactacggggaaagggaactcccggaaggaaagcgataatgacggtagacaacaatttattccgtaaagcccatttcacttttctgcaacactcttcattggtagctccttacatcgaggagcacttggctctagttcgcgccaggaacatcggtaagtccgatgcatggattacacggcatcacattgatactttccccgcgtggctacgacaacatctcatgggtaacgagtcgatcaaccaacaacttgccttcctggcgagggaaccgtctgggtcgatcacgacattccagggatatgagatcaatgggtacacattctacacgagagcccaagacatgaagagcacgaaccaaaacagcgctgttcgtgtcgatgccatgggacacgatggaacaactgccacgtattacggtgccatcgaggacatatgggaacttgactatggtcctctcaaggttcctctgttccggtgccaatgggttaggttgactggtggaggcgtaatgattgatgacagtgggatgacaactgttgaccttaacaaggttggatactcggacgaaccttttgtccttgccaatgatgtaacgcaagtctttttcgtgaaggacatgtctagcaaaggaaagaagggcagagggcctgatgagcctaagcgtcaagtggttctcccaggcaaaagaaaaatcgtcggagttgaggacaagactgacgaggattacgatcagttggatgggcaaccccctttcacggtgacgattgaccctagcatcctcctatcaaatgaagacaccccttactcacgcagcgatcacaaggagggaacaatagtgaggagaaagtacgtgcggtcaaccgtcaccgccgatgtaatgtcgtaattattgtgtacacgatgtaaactattttggatgtattgattatccatataaatcaattgatgtatggcatatgttaattacgcacgattattagaggtttcaacaagtttaaatcatgtatatgctagttatatgtgatacttacaatttttaaaagttttaaatcacacaggtggcaatttcatatgtatgttaattagagtttttaacatttaatttactagcattcatatgctaattataattgactagaggatttttaaaagttttaaatcacgcaagtggcaatttcatatgttaattagagtttttaacatttaatttactatcattcatatgcaaattataattgactggagaatttttaaaagtattaaatttaatatatttttaaaactatcattcatatattagagtttttcacaatttaatttactgtctttcatatgctacttatatatgactattcgaatttttaaaaggtttaaatcatgcatgtggcatttacatatgttaattagagtttttagcatttaatttaatataattcctacgctaagtatatatgatgattacaatttttattaattttaaatcatgcagtatgtacatacatatcttaattagagtttttaccaatataataatatcattcatatatatgctaagtatatatatattggaatttttattaattataagtcatatatttgcttattacaatttatccacttaatttattacagacaaaaataatttttcgaagtaattgtcattaatctttgtactttaaataatgttaatgcattaacttctattttataaacacatatgtaagcgaaaatcatatgcagtgctataatctttagtcccggttcttaaccctaaccgggtttaaaaagaatttcgaaatagcgggaaaagatatttactcccggttggtaataccaaccgggactaaagatcatctttagtcccggttgttctcaacaaccgggagtaaatatcttttctttactcccggttgttctcaacaaccgggactaaagatttagtcccagttgttctcaacaaccgggagtaaagatcttttctttactcccggttgttctcaacaaccgggactaaagatatctttagtcccggttgttctcaacaaccgggaataaagatccgggggtatatatattcccggtgggccctcgtcttcttcaccaacacttagacgttttcagccgatcgatctttctcggcctctttccttcgccgccactgcctagggcaaatccccgcaccgacgccgccgtatctcgccgtcgtctcgagctcgtcgtcctcgtcgccgcctccgcctcctccgctgccgccgcatctctggggtgagagccgccgccgccagatctcccttcatgcatctcgatctctccgatatcgatctctctccgtcgcgccgcccgccacgagacgccgcgccacgacgacgacgcgccacgacgacgacgcgccacgccgccgccttcgccgccgccgcatgccaacgccacgccgccgccgccacgccacgccgccgccgccgtcgccacgccggcgccgccttcgccgccgcgcgcgcaatgccgccgccgccacgccacgccgccgccgccttcgccgccgcgcgcgcaatgccgccgccgccacgccaccgcgccaaccgccgccccgatgccgccacaccgccgttaacgaacgagaacgagaacgatcgaacgaacgagagcgagaacgaacacgtcaacgtacgttgccgcgagaacgtgaacgagaacgagaacgatcgaacgaacgagagcgagaacgagaacgatcgatcgaagacaagcgagaacgagggaacgaacgtgaatgagaacaagcgaacgaacgtgaatgagaacgagcgaatgaacgtgaacgagctagggaacgtgaacgagcgaacgaacgaggacgaacgttaacgtgaaatgcaatatatatatatatatatatatatatatatatatatatatatatatatatatatatatgttacttcgcatttatcctaatacatctttttgtatcttgcagaaaagacgtgttgtcggagtcgtccgtcaagcctgagtggaagagctagccctagaaggaattggagcaggcaagtgacgtaataatataaatgattgttatatttgtaatgcaattaattaagattattagacctgtaattggacttatcatataagattgtgtagtgttctaatattatttgagttttaatataagattactttatttgtaattagacttagtatgtaattattgactacggaattggtgcgacaagtagcaattgactattgtagtcttaattagacttagcatatacgcacgaaacacttagcatagatgactattttagtcttagcaagtaatattatttgagttttaatataagattactttatttgtaattagacttagtatgtaattattgactacggaattggtgcgacaagtagcaattgactattgtagacttaattagacttagcatatacgca

SEQ ID NO: 7337 - DNA, 17647 bp, Oryza sativa
cggttggtaacacaaaccgggactaaagatcaaatatgcccgttacccttttgaaccgggactaaagattatctttagccccggtttttattgcatccgggactattgtggaaatcggccgaccgacgaaagatggtttctccaccagtgagacattggcctgaaacatgaacctacctgcatttaaacgttggcacggagaacaatcatatagcatggacaacactgggtcgcgcgcagtgtgcctcccaaatataaaacggttttaattagaaatatagtaaaaaaaatgtcattcagagtaaggtaagcatgccaccgcccccgccgacggcgtcggcgctccagccaacgccgcccacgcgcatccttctccgccggcctgcccccgtctccgcagcatcgtggccctcgcccacggcgcgtcgcacccccagtgccccgtcgccgttcccagcaccggccccgccatcgcctccgacgtccctgcttccgtcgccgccgccgcggctgctggccgggggtggccgcaccagcgcaagatccatctcggtggtcctggagacgctagatccgtcgcacaccggcctgcgtcgctcgttcgcagaagttgtcagaggagcggcatcacatttttcaaattcaaaacaggttgtttgggcgcgttcctcagctagctccggcttaaactcgccatttacttctcccgtccggaacaaccaccgctccactcgccgggtcacttcaccacggagagccgccccctacgatgctagcctacctcaacgtcgcatcgccgagcaggatgatgggcatggactgcaagatcctggctggatccgggtgcagcggaggagctcgcggagacgcgaggcgcattcaagcggcgtctgcctaccacaacgctcacctcaatcaagcaatgcgcttcggccgtcttcaagttgacgggacgctgtacggccaagccgagactacctctccgcctcacatcgagagttcttggctcagaccagtggaaggtgtttcatttgcctctctcgtggacaccgagcagcccagtgcaggacccaatctgctgcttcctctgtcagcgctccggtcaccgcgtgcgcgactgtcgtcgccgcggctcggcgggtcgtgcgcgctcgtcggctcgtcttcgcgacgtgtcccgtacgctccactcatactacggggctcgcactcgcacgccgccaccaccgctgcttcgccaccaccttgccgacacgcgcccgccgcctctgcttcgtcgccgctccggcttacctcacacctccgctcgacgcgagcgttcgccagtcctctcaccctgcaagcgcgcctcccccacagctcagccagcgctcctgtcacgcccggaaattcactaataatttccgaactaatttgtgcataaaatcctcatccaggaatcagccgaggtacacaaactgacaatttaatatacaaatccatcataataataacgttacatacttacaaaagaaaagaaaaacagcaggcacggctattcgaatagttttactctggccagaggtgtaccactgtacccacaagacacagcctcaacatcatgtctaccatgcgtcgtgatactggaaagtacccgaatagaggctgtgacaatacactctgcacaacacaactcaccacagtgcaccattcctggatcataatcacccccttataaaacaaggcatggactccccagcgacccccgtgggcttatctccgccacttctcagtctggtgctccgcaatgaaccatgctatacaaaaggtaaagccgttgcccacgctggcttgtggttggcacggttaatgtttcacaacagtagctcgcgaaccggtccttaattgccatgagcacgaccttcaaaaccatgtgctcacaacccaccattaatcatattttaattaccaattaattatcataacacgattagccatcgtgagctaccattaaatataaccataaataataatgtagtatatatgattcatcccattagtgagctaatgtttctaagcattgcaaagcaattatatctaacatctagttgaaccaatatatataaagctcaactagtcaaattataatatcccaaggtatcaaggaatagagtaatcaatgcaaacaggccataacaaaggaatagattcacaccacccagtgacattcgaaaataaatgcacagttgaaataaatagagaatttaaatataggatcaacatgctcaaaggattgtgtttaggatctgtgtgacttgccttgcaataatcggtcttcaattaatcttcttgaacacttccggcgctctcacaaaccttcgaaacgacggaaacgacaagctaacacgcaaaacaaggaaaacactaagaaactccaaataaacaataaatataaagtaaaaaaacatgtagatcataattttagatgtattatgagacttgaacggcctcattctgacttcatatgaatttattacgaattttacaagatttaatctaattaaagcctatttaaaaagaattaaataaatttaattctatttatggataattttaatatgtagatctttattttatacaactttagagacttgaaccaactaaacccgagctaagatgaattagttatgaatttttaaagattaaaccggattaaaacatttatatggattttaattgaattatgacgcaataaagaattatttttgaaaaggaaaagaggattattgcgtcagcgggctcggctcacggtggaccgggtgcacagcggcggtctacggaacggacggccgagatctaccctatccaaaacgaacggccaagatcaacttgatctaccgcggttcacgggacatggcgacgatgacgtcagcggtgacgtcatcaccggcggcgactcgggagcacgtgctcgacggcgaacggcggcgagacggcgcaaacggagggtaccaacgggtagagctcgactcggcgaactcaccagtggcttggacggtggcggacgacgacggatgacgacggcggcgaggctgaggcggcgacggccttcgggtcggcggtgacggcggtgcttcggtgggaaacgtcggcaacagagaggtggacaagatgctgctcctcctcgcgatcccgatggtggcgacggtgaccgaagacaacggctgcaacagcggcacggcacggctggaccgacggcggcggtggagagcttcggggcgacggagtcagcggcgctccgacggtcttcggcggcggcgaagcggtggacggaaacagcgacgacctcacgatgctgatgaaggagacagcgatcgacggcgatgaccgaagcgacgacggcgaccgactagacacccgccggcggcggcgacgcagagagcaacgcggaggcggcgctagagaaggcgacaagctagggcgaaggtggcggcggaaagaggaggtcccggggatgcttataaaggggctagcgagcggtgacggaggcccacggcgatcggcggcgagatggaaagcaagggttggagggagaaaagtcgatccgaatcgagctcaaatccgtcggtttccaaacgaaattagccgaagtttctaaaagagaaggaagaggagatcgaggagattatttcccctcaaatgatttggctggagaaggaatggggcggccggatttggaaggagacggtggcgcggctcggctagggttcggccgggcgacggcgcgaggttgacgacgggtccgacaggtgggctccacctgtcagcggaagggagcgcgcgcgcagacggctgctggctgactgggccgactgggccggggagagagagaggaaggttttgggccgactttcggcccaaagccaaaagaggggtttaaaaacatttttctatttaaattattcatgaaatggaattccatttattaaaaatactttcttggctcaaataaatcccagaaaaatctaggaactaaagattcaagagaagtatttaacaaaattttatctagccaaattttatattgagatttagcaaattaaaattagatcttctcttttaggcttttaagatcatttctaataattccttttaaacaacaatttataatttaaggatttttaaacaagaaaagctcttaacaattataattagatcattaatgatcaaataattactgaactgttctttgtatcatttaggaattgagctccgaaaaatccgagaaaatttcagagagtatagttaatcatggagaatttaataaaaattaaatccatccaagctttatatttaggaaattttatttcccacatttaacttcacttgtaaattaatgaacatttaatataaattctattaataatttattagataatttctaaatcctaaaacgaaaatcaggctgtgacagtttcccaagcaagaacgcacccggctgccgccgccaccgccccggtcgacccagagcaagatgtcgcagctcggtgacccggccacgcgccccgaggaggacacgtgcttcatccccacctcttacgccattgacgaggagctgcgcgagtggagcgagactgcggctgtctcctgggcggcccacgcgccgtcgaccactacaccgcgcgacgtcgagcaggccttcctagatgagttccagcttcgtcggggcgaggtggctgtctcgctctaccatccacaggccttcctcatcaagttccaacatcgtcgccattgtgaggaggccctggtcaaagggtacgtcaagcgtcgcggcatcgagattcatttcatcaagtggcgcagcctgcagagtgcgctcggcgtcgcgcttatgttccgcgttcggctgtgcctcgacggcgtccccatgcacgcctgggctgccgacatcgccgagcggatcatcggccgcacctgcgcactggagcagatcgagaccgacgttgtccatccggtggagtccggcaacacgcgctccatcgacctctgggcgtggacggcgaaccccagcaccatcccgaagaggatgtggctcagcttcaccaacagggcgaaagatcccaagctggcacccctgctcgcggtggaaagcccgccggagcactggcagagaggggtgcgccatccggtcctcttccatctggaagaaatccacgactacacagcggcaacaattgacctggaggagcaaggtagcttccagccgaccaagcgtcggctgccgccttggagcctgggagtgctcgacggcgagcaggtcccaggacgggtgttcgaggattttccgcatcacccaccgccgccccgctcggttcacgaccgtctcggcggcactgagcgggaagtcgatcgccacgaggacgatcgccgcgatcaccacgacgaccgccggtccggccgcggcaccagggacggccacactcgccgtgggcgcgcggcgcggggcgggcgccctcgcgacgacgacgaccgtgatgactttgatgacgaccaggacgaagatcgtgaggaacgtgaccgggacgatgaccgcggtcgaggcgacgatcgcaaggaccgtgaccggggcgggcgaggcaggcgacgggggtccagcaacgaccacccgcgaccctggcgccgcattgatcgggacgatgatcgcgacaaccgagactgcgatcttggccacgactgtggcgagcagcgggcaagcgacaatgactaccgccgcgagcgcacgcgctccctgcggcggcgggacaggggggctctagccgctacggcggcggtagacggagaccggctgacactatctacgactcgagcaagcagctctcctcgacggacgcctttgctctgcacggcagtgcgctccaagcagaggtaggtgagttccacttattgcacgccctgcacaattcccccttctcgctgcaggagccccaattgccatcgtcagtggaccagctacaacggctctccttcatcgcgaacaaggctctggcggggatgccgccactcccggagcacgctctcccggcggacccaaggaatgaagcctggttcagcatgcagcctggaagccgatcccggtggagagcgtcttcgcgcgcatcaagtcgaacctgccaccgccgactgcggcgaccacatgccaacaagttgaagaagcgctgttgcggctcgagctggcggcgacggcagcgatagactgcccagtgggggacgtgtcgcctttgcaggccgcctcaccgccacctcatgcttcgccgactctgcttcctctcgaaagccaagtcagcctcatgcacgatctgagggaggtggtggcggaagggggcaacaaggatggcaatggcagccatctggcgccgctcccacctactccgtcccccatccagtcttctcaggtggcggtcccggcatcgccgaactcaacgggcatcctcgatgcctgtttgcatcaccgccgcgagcaatcctcgcctcgccaccagcgtcgccgccaagatcaccgtgcgtgcatccgatccagctaacacggcggctcaagatccagccaaggaaatgcggtcaggccacccggcgcaacaaacgcattgccaagcagacttcaaggccgacgatggagcggtgccagcgagttctcttcaagaggctcgggatcctcaacgacgaaggcggcacatcgatcgagcaggtccttgcccaatacatcgccatgttcaatgggctgctgccaccccacatcatcgccgccctcactgcgatatttggcatcgacgacgacgagcaggacgccatggacgcggcactgatatctctggtaggtgaaggagttgcggaagtggccgatgaggtagagaagaacgccgcctaatgtgtcctggtattgaccggacctggaatgggagccttcctttctccatgtatcgtcgtcttttgttgggtggatggagtgctggtggcctgcgagctatcctctccgtgtcaatcccctctgtgtcaagctggatcgccggcggcctcgcaagaacctcttcatttatgttgtcaagaacctcgtttatttcccctgcagtgtggcgtcttctgtgaacatcttgtctacgcatcgtctttacctgcatcggcgctagcttcggcggacttcaccgccaaattttcggccgcacattacgtcgaacaccttcgggccactgtgaacctgtcgaaccagtccagccgcttcctgggcctctccagcgaaccaggccagacacgatgtgggccgcctaatgggcctctctccgatcgtcaagccacccccctccgcttgtttctccctgaaccggccgatgggcctcaggccgccccctccttagcatttcccgggcctctatgtgccctcctgcgcaggcccagcggctgggatggccatggccagcgcctgctgactgtttgggccgccgcccctacacaagaccaagcagcccacccccttcgtgggccacgaatacggagaacaattttactaaaatgatgcaaatcctagatattatttcctagaacgtgagggagctcaattcggctgcgcgctgtaacacgatccatgagcttatggcagacacgaagtgcagcttggcatgcttccaagagacaaagctacagaatatagacgatggtctcgcccgctttttaggaggctacaaactcgacaaatttgcctttaagccggcaagaggcacgagaggggggatcctcctcttatggaatagcgcagtctttgacgtccaagaggtccgagtcagtcgcttctcgatttctgcgcaagtgacggtcatactcacaggggccacatttctgctcaccggagtttatgggcccacaaggcaccacctcaaaagcgccttccttcggcacataagaagaataaggcccggccccgaggacggatggcttatccttggagattttaacatgatctatcgagcaagggacaaaaacaacagcaacatcaaccttgcacgcatgagacgctttcgctcaacaatcgatcgatgtgaactgcatgagattcccttgcaaaataggaagttcacctggagcaacgaacgacgaagggctacacttgtcaagttagatcgctacttttgcaacgagacttgggacttggccttccctaaccatgtccttcacgccctacccacagggccttctgaccactgccctctagtcctctccgacccccaatgtccacgtaggccgagagccttcaagtttgagaacttctggacaagaattccaggattcaaagacaaggtcaaggatgcctggtgtcagccttcgtcacacacagagcctatgcaccgcctaaatgaaaagcttcatcgcaccgcgacctgtcttagagaatgggcaaaaggaatctacaccgaggccaaactgcagtttcacatggcgctcgacgtcattaaaagactagatgtggcacaagaacatagagacctctctgcccaggaaacaagactaagagcagccctcaagcgtaagatccttggcctcgcttccattgagcgggcaaggaaaaagcaggcctccagagtaacacatatctgtgagggagatgcgaacacaaagttttttcatctcaaaatgaatgcgcgaagaagaaagaacaccattcatcggctgaaaaaagacaatggttgcgctgtgacacataaggagaaggaagcaacgatccatgaccattttgcgagcataatgggacggccggcgccaagaccaaataagctaaattgggatgcccttgacatctcaccgattgacctagccaccctaggggagcccttctctgaacaggaagtacatcaagcaatcaagaaaatgccaagtgacaaagctccagggccagacggcttcaccgggattttctttaaagtctgctgggaaatcataaaggaggacgtctttctggtcttcaactccatttacaatctcagatgtgcacacctgaatctgatcaactctgcgaacatcgtcctaattccaaaaaaagagggggccgagggcgtttcagacttcaggccaatcagcctaatccatagtatcgctaagatcttctccaagatgcttgcattgcgactaaggcctcatatgcacagcttgatttcgatcaaccaaagtgccttcataaaagggagaagcatacatgacaacttcctcttcgtgagaaacatgactagaagataccatcgattgaggcgggcgatgctgctattcaagttagacataactaaggcctttgattcagttcgctgggattacctgctagccttgctgcagcgaaggggtttcccaacaaagtggatagattggttgggggctctgctatcaacttccacctcccaagtacttctcaacggcttgccagggcagcggatcaagcacggaagaggccttaggcaggggaaccccctatcgccactccttttcatacttgcgattgacccccttcagcgaatccttttcaaggctacagagctcggcgcaatctcgaaaattcgggggagaacaactaggctaaggatctcaatgtacgcagacgacgccatcatcttcattaatcccacccgaggcgatgttacggccttcacggacatcctgcagcacttcggcactgcaactgggctcgtcaccaattttcagaaatcccaagtggcggccatcagatgcggcggcatcgagttgaatgaggttcttgacggcgtccctgtggtgagggcaagtttccccatcaagtacttgggcctccccctagctctgggaagactgcggaaggtggacttgcaacctgtctttaacaaaatttccggaagggtagcaagctggagaggaaaaaacatggcagcggctggaagaactacgctcgtcaaatctgtgctaacggcgcaaccaatctaccttctgaccgctctgaaaatcacaaaggaatccctcgagcagctagacaagcagcgacgccacttcctctgggcaggcacgggtgatattaccagagggaaatgcaaggtcaattggacaaagacgtgcatgccaaccagccaaggaggattgggggtcctaaatctggacaaattcacgagggccttgaggttgagatggctgtggcatgaatggaaggaccagaccaaaccttgggtggggctggagacgccatgtgatgaaatagataggaacctcttcgccgcctcaacaaacataacaataggggacagaaacacggtgcgattttgggagtccgcgtggattggtgggcgaagacccaaagacctcatgccgcttgtctatgcgatctcaaaaaacagaggaaaatcccttcggcaaggaaaggaggaggacgcctgagtgcaagatttgaagcttgattcacaatcatctatcacagtcgacctcgtcgaacagctagtcgcactgtgggaagcggtccgaaatgtgcacttagacgttggagaacaggatcagattaattggaagttcacaaacaatgggcattacacggcctccttggcttaccatgcgcagtgctgcggggcgccgagtacaatcttcaattccttgatttggaaagtgtcacaccccaatctgataccgccgtacaacggcacctgacaggagcgtgtcgtagggaaacggtgcgaaccgcttcctacgaaaccgcgatctcggtaccagtcccaggacatagtgctggtactcacggtgacaaatatgaatcatagcaatccttaaaataaatagaggacttatttaccttaacttaggttgcagctcagaacaacccgagaatacaaccgacgacgcggacgagaaaacaccaacagcagcagcagcagcggaaccaacggaccaacacccaacaccacaggcgacggctgggaaccaggacgaaaccctaatcttcacttcactttatcttctcttcagggcggaggaactatatataaatatttatatagagcaagggtgagtactttcgtactcagcaagtcacgggaacttaggtgtttaatgcaagcttgaaagagaggcaaggttgttttgcaaatcttttgtttgaaatcattttgaaatcactaagtgatttatttctttctaagtttgggccgaaaagagacttgcgtctcgattcgactttaagagatgtttttcaacagctcatttagtaatgtaccgacctcccgggtcagatcattacttctcggctcccagagccattccacttgattaatcggctcccagagcctttttcattttctcggactcccagagtccagctgcccagcagcaaagcaatccgcctccactcgggaagcctagtctatgatgcccacagacatcccgaatcacacagattcgtttctgaccactcaggtcatccatctgccacataggctgattctggttacgattcccacaccacaacaacttttcacaaagcacaggcaaacaaatctacgcaacgggaaccacctcatatccgcccatgaccgtgggcacggctgttcgaacagttagttaacctctgcagaggggtacactttacccacaagatacgaacttattccgaacacccgtcggtatcggaggttcgcaacaaagcttttcccaagccgacccagggttacctcatgccacatagaaggatcaaatcctcacataaacataggccattttaggcgttcacaaatcaaactccaaccaccttgatcggtaagtgagcaagcttctcgtccttgccttaccaggaacccggtttgtccgaccccgccccggcgttcccaactattggcatgcgaggtttccctgaaccgactagttacttagccagggtgtcccattccaccttgtggttgcactttgattatgttcgatgagtttcccacaggaatcggtccttatatgcgaatacgggacagtgccacataggcacaacccccgcatcgcgagttttcacaattcattttattttcaaacacaccgacaccacatgtcgggttttgaaggcttcacaaacccatttcccaagttttcgacaaacaatggtgtttgtgggatatttggtatacgcgctcaaagagcacgaataccgaggtaccacaagggtggagcgacaaggaatcagggtattacgacctacgaaaattagtgcgactactgggtaggtccgtcggtttggcacgcaaaccgaggccaagcaagttaagtgtgtgattctactaatgcatgttgcaaacaaaataataatgactttgcaattataggggcaattggtcaaagggtgacttgccttgctcaaggtcttcacgaagcttcacgaatcttcgagaaaacccgcgatcgacgaaaatccggtaaccgcaactatacacaaacaatcgaaaacctaaacaaaagaccaagaaaaggatcctatttagactaaataatagtgccattaaatagatctcgattttacgggaatactggaagtggaacggggtcaatcggaattacggatcgggagatatgaattttggaagtttaattggagtttctagaataggagaaatggtttatggaatttatagaaataatattctcaagaatattattgacagtcacggacgtgcgggaccaagggaaatgattcatggaaattttggaataaggaattgatttatgggacaaaggaaaaaaggatttattaaatccctgaaaaaaagaaaggatggagggatgttaattggacttgggccgaacgaaggggcgcggcccgaagagatgcgcgggcgcggccgaggcgagcgggccggcgcacgggagggaggcggcccaaggccgaacgaggcgcggcccacgcgacgcaagccggtggacgcggtccaccgtgccgggcgcaaggtgggacccacaaggcggcgacacggctcacgcgagcggggtgcacgcaaggcggcgcgttggatcagtggaccgggagacctttgaccggtctccgcggggccgggcggctgaggtggcatccacgtggatgccacgtcggatggggaagggagaggaggccgggcacgctgatccgatggccggcgatgagcgacgtgaaccggcgaacggcggcgaggtggattggggggttagcaccagaagagagaggaggccaagggggatcgattcaacggagcggattagccgggggaaaaacgacagcggctggcggcggcgaccaatctcgccggcacgccgacgtggccgcgcgcgagaagagcgaagggcgcgcgggctcgggcttagccgaaccggtacgcgaccgcgatgcgcacgcggggacgcgggacccgatggtcaccggcggctcacgcacggcggcgttaggcggcggcggaagcggtgacacggcgcggagacaagggagaaggccgacggccttggggcagccagggggaggtcaaggggatccccgggagcatggcggcgagaggaatcgacgcgagaggagccgacgacggtggattgcggcggcggcaatcaccggagatcaaaaggggaaaacacgacgagacgatgagggttcgattcaaaggggtgggagcatctccggggttcaaggaatccgtttccggcgtcggattggacggagcggcaccgagattggctggcgatgagaggcggcctccgggacagagcaagagcttgtggcaagctatgccgaggggcggcgggcgcggcgcatcgtgcggcaggaggaggatcatggtagggagctcaccaacgaagaggaggcagcgttggcggcgcggtcggtgtcgcggcgaggtggtcgcgacgccgaggcggcacggcaccgagagggcgcggccggggaagaagggagggagaggtggtgcccggagctcctcgtcacgcgtccacgcacgcaccggctcctccggtgctcggcaacggacggcaacggcgagagcgggacaagcagcaacaaggcggcgacggtggttcggcggcaatggcgcggtgggtgtgaggactgaggcgagtgaaaacgagagaggaggggtttggggtggcttggttttatagtggaggaatgtcggtttgggagggggaaccgacatagagcggtcgagcgctcggctggcggtcacaggcgatgcaagagcggcggatgccgaggatgcaaggagcggcgaaggcgatggatcgggcggctgaaatcgaaccgctggagcgcaggctggcgcggtcaaggtgggggcggcgagctggcggtcgcgcccgtggcccaggcggtggcaggcggtgacaccgatggtggtcgggcaaaaggaaaaaggaagagggaaaggagggcttgacccttgccgaaacgggaaaaggaggagggagaggggtgtgagacagggggaggagagggagagcagctgcttctcctactcttggatgggtgcggcgtggagtggcggagcggcagcgcacgacgcaggcgacgccagggcttaacgcggcggcaaccgggcggctgcgcggcgcaggcgcggcagggctgacggcggcaacgaccggccggtcggccacgcgcgagcgcgggagagagtgaaggcggtggcgggttttgggcggcgacggcgggaagcggcgtcggcgcgagagagagaaagagaacgagagagcgagagaacgcccgagagagggaagggagagagagacagcgctctctctctctctctcggtggtcacgtgcggcgcacgtggagatggagagagctgagaagagatgggccagcggcaggtttcggcccaaatcatcacgagggaggtaaagtagacttttactgagaaagctgatttggatagaattggagagatttagggtttggattcgaattcaaatttgatattcgaactcgagggtttagggatgtatcaaggggaattcaaggagaagtcatgggaaagattcaaaaggaatacttgggtatttgttctcgggaacatagggtggagtcaaggaaggaaacaaaacgggggtttggacattttgggatttagaaatgtatttggcgaggattcaaaggaagggattgactttcggatttagatttcggagacttgaattggaagaggaaatttgaggcggaggattttgatttcgatgagagggaacaacgggatttgatatgagatctcggcacgacttagactcgcacacaaagaacgaaaattttcgcaattaggattttgccgaattagtttttaacgactcgcgaaaggcggagcgttacagaaagcctgggcgccagggaaatgcaaatttcatgcttggctcatcattcagaacagagtctggacttcagaccggcttgcgaccaggggatggcagaacaatggttgttgcgctctttgccgccgcgagactgagacggcattgcacctcgttgccacttgtagatacatcaagaggatctggcacctcgtctctgcatgggtgggctatcagcagatggacccaacggaatgggaggaagcccagtcagtcaaacagtggtgggagaacattgcaaacacgcctagtgtcccgaaaaaaggacttcgatcgctcattctgttagtcgtctgggaaatttggaaagagaggaatcggcggatttttgatcacaaagaggtggcaacgaacttcctactaatgaaaatcaaagaggaggcgagcctttgggctttagcaggagctaagcggctgcgtgagttaatcccgcactctgtatagtgtacagctatagtggctctcagttttccttttacccctaggggtttgtattttctcctgctctattcaatgaaaaggcactctagtgctgctttccgttaaaaaaaattagaaatatagtgtcgcgagcagtatatagttataccactgctatcttgtgttgttgtggcgtgtgtccctactggctccaaggctggcccgttgatgactgatgtcgtgcgtgccatgcaccagctcgatcgtgtcgtccgtgcatgcatgcgggctaaccacaaaggggaacagcaaacctgcggcacggacacgcacataaagcagatcacgaggagcaatacggataggccactcctgatcaccttgtctttgattgagagagaaagaaaagggcgcttagatcgatcgatcgatcagacggctggggtttggatttgtgggctgcaaattgcgatccgagagaggggccggccagccaggcttgcgctgctgctaataccagggaggcaaaacgggcagaggtcgacggtgacatctgcacgcaggcatgcatgcagatgtagtagtagaggcctctgcttcctctgctgcctgtggctcatgtggtgtttggttggagaaactaaagtggggctaaaatttagtctctctcacaaaaatatatagggacttatgttttttagaaagcccctctctcccaaacaccctctcaatgatctttgctttgccatttgctctgtgcctctgcaggcctctcttctctgtgagctgtgtgtagactacggtttatctgtgagctgtgtgtagactacggtctacggctcgaccgggtaaaaaatttacagtaagtttggttagctagttcacgggtccccggccggtgggccccataggtatatacctctctgcagccgtacgttggcagcagcatgcagcgcatatggaatagcagcagttaacatatccacaacgccacctgcagcgtagtgcatgacaggaccgatacatacatatgctgatagatcatatgcacgtactcagtctgtactgccatcgcgtacgtagcgttaaaacgtatggacaggcgagtagtacatgcggacgagggcccaagagatttcacgagtacatgcgcctctctggcccccaagtccccaattggtccaaatccaactaccagttttagatttcaggagccagctgcatacgcagctctcccggccagttggtccaattaacttgtgtgagcgtgcatgcatgcgggttgcagtcacttgcagagcctctgctcctgctcgcgtcgcatgcatggcaccgctgggcttgttcgctcgctcgctagctagctagctcattcgccagtgcgtgcgaagcagatgatgagatgatggagcagtagtggagtattaataagaccacaggttcagggctgagatgatgacgatgatctatctgcttcctctcttactagttttgaaccacctgaactggccggtcgcgagtgcgcatgcatgcatgcatgcaactggacggccggcggcggattggcggcggctcgccagtttgccggggtgggagagtcaaagagcgcatgattgttttgcatgcgccggcccgcggccggatcgtgcgtggattgcaggatgcggtacggtgcgtccgtgcgtgccatgcatggcccatcacctgttcatgtggaagaggagagcccactggccagtttgggagtaggaacgcgtcatttttccatccatctctctttttttttaatggaatttttccaaccatctcgtttggtaagagaaaaatttgaaggaatttttagtactcctttggaccgaaggatgcatg

SEQ ID NO: 7338 - DNA, 25972 bp, Oryza sativa
tgattgtaagatcaaatcagctggcacccccttgacacactcgaggctagccttggacctgcactggagttaagcaaatcttccaggccgtcatgtttcaacacgcttttagcacgcctagtgggacactcgaggctagccttagacctacactggagttaagaagatctctcaggccgccgtgtttttacatcaacaagatgatagctcgcttgttatttatttctacactttcgcactctctcttactttgtcctgtggtttgcggtgtgtttgttgtgttgcgttcacctttgcagagttggctgatggacgatgctccacttcatgcatccctaggaaatagtaggaggagcagacggatgttagggagaccacggcttcggcaatgacttttgtggaggtcgttcactatagtcgaggagtcctcgacggatgctacgcctctaggtcatgtgattcttgagttgggggggtgctctgtcgctggtgcagctgacacaatggaattaattggtcgggaggcaacgactggatctagaggtcgtgttgtggcatgctaggcctccaccgctgcacccatttttctctttcattttacaacaacaaaaaaaaattgcccaatcattttatgtaacctgacaacttgtaaaagttgatgatttatataggccttttgttagatgtaggcacttgaactgtaagtggaaatcaaggaatttatacaactagtgatttatttagaggtttgttaacagtattatgtaatttactctctatgaagacatgtgagggtgcctattagacgcagttacgctagggagacgaaacatgatattttataataaaaataaaataataggggttgaaagttttagatttggagatgtaagtttcaaaagtttaggtagagattttaaatgctgagttgaaagtgttagatttgaggtggaagttttaaattttgatttaaagttttgaaatttggttaatattttttaagaaaaattgagctcgttgttttattcagactcttattttttttcaaatttaattttcgttaaaaaaaatcacgtatgctatatagaggctggcgttttcagcgttcagtgcacatccctacatgactcggaatcacgtaccacacttatcgcgtccacttgcaaccccgccccctcccaaatgatattattcctagatgaaaacctatgtcatgttctttgttgattaaatcatggtaacttcaatacgtaagtgtatcattttctttatggccgttatttttggagaatctcaatacaaaatagtccatgtcattctaaaatataacaatgttttcatctacatttattttctcaaccaattatattttttcactatttaaattccctagctacctacattatcttctcaatcaattacaagattttcttatttaatttcctcaactttcttaattcatgtcgaaccttctaaactttttttatattttgggaaaggaggcaatacgatgggaatgggaaagaaaccttccgatcgaaaatcaacagctagctacctagcgctagctgtacgtgcaactgtagtaaaggaagaggaaacagcagctgcagaattgcagatgctaatggccgggcgtgcaggcaaaggacatcgcgagaataaacagcgagtactatactcctaccgagaagcaatagtaaagccagcaaaatatgcgcgccatcgctatcatccgtcgcctagcttttgcgggctcgcgcgccggtagctacgcagttgcccttcaatggttagccgccggcagaggccggatggacgaagggccggcggcgctcgcggccagtattgatcatcgtgatatcgaatccggtgatctctgcatgtatgcgtgtattgagggcttgtttgtttcgttgccaccacgttaaccctgtcaaatattggtaatgtaacaaattaaatgtgtacttaggaatgctatttaacaaaactttgatattgtagaaattttcactcttgatttttttctaaattttagtaaaactgtaaactgaacacatctaataaaagttggtaatctaataatgtggtggttatgttgggaagtacctacttcatctatcctaatatatatagcaacctagaatgagatgagacacctagaatgagatgagactcattctagaactataaatttcgacatcgtttctgctaggctgctagctagttgtcgacaggtttttcaggactgaaaacattcaatttgtttggccgtcgatcccgcgctaagatttgtgctgagatattttgctattggatttgaactctcttttcataagctagtgacactagccagtcccaccatcgcatatttataacagatttgttcaagttacatcctagttgcatgtagttaaactatagttacactatagttacataactacattgttatctctatataaattagatataaagttgcatatattattttaatacatatatacaagttattattattgttatagtcaagttattattattgttatagtgtagttttagtgaaattatatactatagttaaatttgaaagttttttttttaaaaaaaacttgtgatagttttttttaaggtaatctctttggacacgcccaatatttagatttatagctttaggatgagtctcgttcgatctaagattactatatactggaaggaagggaagggagtacaaaataatgaacaagccctaaaggcacccgcggaaaggcgataatactagcatatgtacgtgctccggtcgatcttaaaaacgctcaattaatgcattaagatggtcaggtcgataattaaagactgagactctgagaatagcgcaggcacacgatcactcgtatgcagttgttcgcacttgcgaaatctctgacgtggttatcattatgcatcccaattattggcatatctctcgtgggagttgcggtattgcagatttgcactagttatgtactactactactacacttttagatactccagagtactagtcgtgtgtgtcagacatggagcggtagcgctgcaatggcaaacatgcgatgttgggcgagttaaatggaggcactgcacaggccatagatgggggtgatacgatcggcagagctagctgcatgcatgtctagctagctctagctggatagtatcatctcgtcagagcgctggctgacagtgcaaattaatatacagatcgatcgacttcatcgccgtaacggctgcagggcaggtacgtaccacgtacgtcgtcattaaggttgtattcaaattaatttgtagatatatccatgcatgcatgcgcaggcagaaagcgtactaactatagtaatcccggatcccgatctatacagtatatgctaatatgcagtgatcgatctatatatatactcctacatttgcacgcagctgtttaaattagccagaagatgtcgcagcatgcagtggcaataattcgtagtttcgtactagtgttgctagctctctgcatgcacatatgcaaacagcaagcggtggcgcgcggggtacgtacgctgctctttacaggccaaaaggggtaggccgccttttggagctaagcagcgagctagctaccgatccgcgtcggatgaacagtgaggcagtacgcgcccccgccaccgcggaccgcgcgcgcgcgtcgcgtctcgtctcgtctcgtctcatggatcgatctgtctgcgtgcgtgtgtgccccagatcgatggttcgatcgcatcatatcggtccagctaactgatcgatcgaggacttgtgcatgcgcgcgaaatttaattaagctatggaccgatgcatctatggcgctagctcgctcgctggctctgtggctaaggcgactgtggctccgtcacgtgaaggcttgtgccgatcgattcggtgcagtatggtatggtctcatttggccttgtgggtgtgtgaatgtgatcgaccagagcggcagaaagtaacagggtcttcttacaaccgttggcaaagcagtggatcgatcgatgatgttcaacgctggtaagaatgttgggccatacgagctgtggttggccttacgttttgggccgaaaacccaatcttgtagccggccggtcccttaaaattcgctcaagacagaaaaaaaaggaaaagtatcagagccaggtttcgatcctgggacctgtgggttatgggcccaccacgcttccgctgcgccactctgatttggtgattggattaagaataaatatataaataatacttggtctcttatgtctacaactccaaaggaggcctagagtctagagatgctgtgaactgatgagtaatcgtgcggacaaggcagcagattgggcagggaccatcgacttgtgagaaatcagcaatcactaagtcggaattttatacggttttacataaaaaacctttctacatgtgcaatcatgctactagccacacaataatcgagcttacctaatccttctttcttaccggtacttttagtacctaatccttatcatgggaaatgccgtgctgtacctctgcaagctgcaacagcgagacaagattctccggaaaagctcaaaaagaaaaatatgcaagaatcatgtcgagagaaacgattctacatccctttcctggtgtttggataaggtggatgtgataatgtgaggcttttgttttaaaagctacttcctccaccctaaagaaaatacaattatagcattcaaaagataataaatcagcagggtaaaaataatctatatgtccctcataaatgagggtgattgatagcgggactgcgggagggttgttaggtacgatgaacaaaaatgaatgaaaggtagttagagggaatttttttttagaattgcattttttttaaaaaaataaagtttcaatgctagaatcgcgttattatggcaaaagtgcagctttatacttatttttccaatttttagaattattttatgaagaaaaaaaattagaatccacaacctataactttatatttgttaattccgaatttctgaatataactaacaggataagaaagtaatgaaaaatgtaagtagattctatacatagttttatagttattaattaattacaagcactacacgaaggaagatatcataccaactacaaatatcagcgaaaatttggtactttcaatagtattatagtattatgcttatctgtagagtgttagcctcaaattcaacccgtatcaagaaaaaaaaaactttgatagttttatgagtataaacatgtcatattttttatatatagatataatattattgaaaatatatgggacaatttcatttttcccccactttgacctctaatattgattttgcctactctttagagttttcgtttttacctccacttttttaaccgaaagaggcgtttacccctggtttggatggaagttagtgggaccaggtttatggcaataaaaatgagaaataaaggaaataaagattttttgaattagttatttactcttttacccctgtgaaagagttaaaactaatctctcctctcctcacctctcgctgcacatggtcaaactgagacctagccggcggcggcgagcgggtggtggcggcggcggcgaagagcatgcgtcggctaggcgcagctcctcccggcgcgagcaggaggcgagcgtgccaggcggcggggagagggcgacgcggcggtgagcggccggcggccaagcagcagcggcgagcgggccaggcgcagcccctcccgccagtggcggcggctcgacgctgggaggatgcggtggtggcaactcggctggggaggaggcgacggtgatggctcggccagggggcgacggtggcggctcaacatggggaggaggtggcggtggcgactcagcttggaaaggaggcggcggcccggctaggggtgacagcggcggtggcccactggcccggccaggaggcggagaggaggaggcggcggcggtggcccgtcgacccggccaggaggcggcgacttgtagaatatgaccttttttttttccaaattttgtccttttttttcaatatttgtctatatttatcacatttgtatatcaaattttgaaacaaattggtttacgaaaattgcaagatgcaaacagaactaatgaacaaaataggggaaaatcagcacagtgagggtaggatgtcttttcgtcaaagatttaacgccgttaacatgtccatcaaaaataggggtaaagcttaatttcgttttaaaaaaataggggccaaaacaaaaaccctaaaaaatagaggcaaaaccaatattaaacatgaaagtaggggtaagaatgaaattgccccatatatagattcaaagaaatatatatagatataatattactgaaaatatatgtatagtttttttctaagaacttttagtgacatttatcaactagtgtgaatggtgtgtgcacgtgaaaacttgtatatataggatacattcatatcatacaaatattacataataaagtagaggacttccccatacaaaatagctagttaaatattggatttgtgataatactctttgcgcatatgtccatatatgcaattatattttgtatagaatagatcgatatttgaatctaggattagatttaatgtacaaacttatgtttatatttgtgtatacaattgcatctttatacaactatattgccatcgctctatatcattatggtttggtttcatcacgatctaacggcttaatattttttattctatgtggcgaacatgatatatcatttccgagatatattgtatatttaggttgtgttcttcaatgtgttggaaattaacccttcacacacgtaaaatgaagtaatggattaccgcatgattaattaaataatagtgaaatgagcgtggctcaactggttaggttccttgtggtggaaccaactcacccaggttcaaattcaagattgacacaggtgcttgcatttacggctaattattcttttagtgataggcgacgtacctgtcgatagtgaagtgacaacccaatcttccggaagtgtttatagggggtagggtagatatgcgacatacctctgttgacagcgaggtgctagcacaatcttttagaggtgctcatagggggtagggtagatatgtcccaatcttccggaagtgcttatagggggtagggtagatatgtgacgtaactgttgataacgaggtgctattttccgaaggagcttatagagggtagggaaaattaagtaatagcttaaaaatcctggaaaatggattaatatgatttttaaagcaacttcccaattttctgtatgtgctcatagggggtaaggtagatatgtcgttcagttttccagaggtgctcttagagggtagggtatttatttattacatatattatagtaaaaaaagtcaaagatatattttgttattcaaaacatcaagaaatatctactattatttattggttagtgttgttaaaggggtatttggtttgtggcaacacaattattagtttgctccctgagcgaaaagcaggcaaacgccttcgtaattagagagagagaaaaaaaaaaagcaggcgacgccagcactgcagggaagaagaggaactgaagcctttctcttctgtccgccgctgcgccctccccctctctgtccacgttcccccaccccacctcggcctaaaaccctagccgccggcggagcgggacctcaccggcggcggcgatgagcgggggcgggccgccgaagaaacgcaacttcaagatcgagctgttcaagcaccgcgtggagctcgaccccaagtacgcggagcggacatggaaggtcctggagcacgccatccacgagatctacaaccacaacgccagtggcctctccttcgaggagctctacaggttggtacaaccccccgaggccccgcactcccatgatcctcccgcctcctgccgtcgccgtcgcgtttcccgcttggcgacctagatcctaccgccccggccctaacatgtggttaattagaaaatttcagtgtgccaattctaataagtttgctcctcttgagatgattaatgattatgattactagccgaacattcctgtcgcatatgttgatggttgaaagtgatttctttcgagagaattctcttttagtatttgtgatcctacaaattttcgttaaaatacagaatttttatagtcaacgatcagtattagggagattgggcggatgttaggtgttggatattgatgggttactccatctagtcatctgtagtattgacttagttgttggaagccatgcttgtcggcctctttggtcgtcacagcaacttggtgataaataactattctgaacctcacttgattgtaatttgcaatatttcctttcatctgtgcaggagtgcctacaacatggtgctccacaagtatggtgagaagctatatgatggcctggagagaactatgacatggcgcttgaaggaaatatcaaaatcaatagaggctgcacagggtggtttgtttctggaggagctgaatgccaagtggatggatcacaataaggcattgcagatgatccgagatattctaatgtacatggatcgaacatatgtcccgcaatcccgtagaacacctgttcatgagcttggtttgaatttgtggagggatcacataattcactctcccatgattcatagtcggctgcttgatacccttctggatcttattcacagggagagaatgggtgaaatgattaacagaggcctgatgaggagcataacgaaaatgttaatggatcttggtgctgctgtatatcaagatgactttgagaagccgtttttggatgttacagctagcttctacagtggagagtctcaggagttcattgagtgctgtgactgtgggaactatcttaagaagtccgagagacgtctcaatgaggaaatggaacgtgtctcacactacttggattctggcactgaggcaaagataactagtgtggttgagaaagaaatgattgccaatcacatgcatagattggttcatatggaaaactcaggccttgtaaatatgcttgtagatgacaaatatgacgacttggctaggatgtacaacttattccgaagggtttttgatgggctatcgacaatcagagatgtgatgacttcatacctaagggaaacagggaagcagttagtgacagatcctgagaggttgaaagacccagtggaatttgttcagcgcttgttaaatgagaaggacaagcatgataagatcatcaacgttgcttttggcaatgacaaaactttccagaatgctctaaattcatcctttgagtacttcatcaactaaacaacaggtcacctgaattcatatcgttgtatgttgatgataaacttcggaaaggattgaaaggagccacagaagaggatgtggaggttattctggacaaagtcatgatgctgtttcggtacctccaggagaaggatgtatttgagaagtactacaagcagcatttggcgaaaagactattgtctggcaaaactgtttctgatgatgctgagaggagtatgatagttaaactcaagacagaatgtgggtaccagttcacttccaaattagagggcatgttcactgacatgaagacctctcaggacactatgatagacttttatgccaagaagtctgaggaacttggcgatggcccaacacttgatgtccacattcttacaactggttcttggccaacacagccctgccctccctgcaaccttccaactgaaatccttgcaatatgtgataagttccggacatactaccttggaactcacagtggccggagattgacatggcaaacaaacatgggaacagctgacataaaagccacatttgggaaaggtcagaagcatgaactaaatgtatccacttatcagatgtgtgttctcatgctgtttaattctaccgatgggttaacctacaaagacatcgaacaagatactgcgatacctgcctcggatctaaagagatgccttcaatctcttgcttgtgtcaaggggaagaatgttctccgcaaggaacccatgagcaaagatatatcggaggatgacacattctacttcaacgacaagttcacaagcaagcttgttaaggtcaagattgggacagtagtggcgcaaaaggaatctgagccagagaaacaagagactcgtcaacgggttgaggaggacaggaaacctcaaattgaggctgctatcgtcaggattatgaaatccaggagggtcttggatcataacagcattgtagctgaggttaccaagcaattgcaagcccgattcatgccgaatcctgttgtcataaagaaacgcatagaatctctaattgagcgtgaattcttagagagggacaaagcagataggaagttatatcgctatcttgcatagaaggtcattatgtgattattgatgagcaaatggcttgtattcatgtaaaacggtttccatgacgtttgagttcagttttattcgttccactttgtccactgaatcatagctacttctcgtttcccgtaggcaagctggtgttcagagttttccagctaatactgatgtcatgttacgagttgctgctatcttaatataatggagatggatcgtcaaattcacagccaacatgaagatgattcccggccggctgcttcctgatcttgcatgagacagtaatcgtcacattggcagacaattatctttgccgtcgatcccaaaatctagtattgataatttcacaatgtaagtcattctattatttcccacattcatattgatgttctagattcattaacatcaatagaaatgtggaaaatgctagaacgacttatattatgaaacgaaggtagtagtatatttttatacgaatatgttttctcttgcccctgtcatgcagctggctcgctacaataacagatggtctcactctcaccccctggagtttgcactttgcagcaagtctcgcagaaaatgttgtgtgccaacttgaactgctctatgttagtcactcaatccagactccatttagtactaattatgtgccattgttgtgaatatgtattaattaattataaattatgcagagagcgcggaatgagactcatccgccaccatatatgtccggttgtccccgtttaaatacgagcgttctgcggttctcaacttgtacgtgaccgaatcaaagttaacaacgtaatagtgttacctttgtctacgtatctgaatacaactttgtctcgttggttaattaattactcctagctagttataatctcgtttgcatcaggatcgtttcgagagcggcaatcgagacatggagccgccgacccaggcacaattagaagccgaggtcgagggcaactactgccgctcaggagtgcccgaagggagacgcgcgttcgcgatgaagcggcacttgtacacgtacgcccacgcgagcaacatgatcgtccagaaccgattcggcgtgtggtcgcatcgagaccaggggtacatggcgtacatcaggaggacccgctacttcaagttcgtcaagatcggctgggggctctcgaggctgaggcgggtgtgccagcagcacggcgtgttcgcgtggtaccagtgcacgccgcggcgggaggagttggaggccgcggaggccggcgtgcggaggcttttcagccgccacacgcctgcttggatgaagaagcagaagcggctgcagagacgcgagcgagagcgagatgagcggcgtctcaacaagcagaagcggcctctcgcattgaagcagcagcagcttaaggcgcaggcgcccatgacccgtgcagtactactgtttgcttatgtatatgcatgtgtagttaaactttgttgttatttaagaagaattattcgtgcgtagcgtgtagatgttgttctatctggataaaatgaagacaatgtgtgtttctttctttgaagacaaaatggaagtgatctacatcttcgttattcagccttgacaaaccatcatattcctcttacaaaagataaactactataactttcatcgctaggtcgtcacattatcaacgcgagaatatgctcaagttcttggtttcctttttccttttctttcttttttccttctttttctccccgatccctccctttcttctttgtttggccacccgtatagattttattcctcttaatataaaagtgtacaatctttttacgtattccaaaaaaaaaaatttctataactttctaaagtcacatagattctatcccgtaactctatatgtactactacgataacttacttggctttgtttctgagactcccatctgctaggtaggctgctctgatttgatcatttgagtctcctgattcatttgaaccgctgtatatgtacgtataaaagtacgtccgcagcacgtgtggggtaatcaactcctgtccgggctgaacaaattgcgctcaactcggcataactgcataaggctatgttcgattaatcctaaagaggaagggatttattttacattgtggtgtgaaattattccccctcaaacccctctaatctccttcaagccccttcaaaccgaacaaggaagaggggaggggtaatccctttcgggcggaacaaattgtgctcaactcggttgaacaactttaaattgtgctttaaactccgcataaggaaaaaggcatgcatggtgcccaggtttagaactagtactagaaaatggagtatatgtaagaactatgaagtcgtttcagcttagcaattacagaccagagatcgacagaagcaaaaacaaacgacacatggtctatgccttaacttcctccaaaaaaaaagagagagcattatcttctgagagctcgaggaagaggctgctggtaagagccatctgtctgctgctgttgatttgggagctccccaccaaattgctgcatcgtcggcaatgcccagacgtgcactatcaaatccataaagcccccacaaatatgactctaaagaagagagcccacgatgcccctgcaagctaaacgagaaagaagaagccgacatgctctgcgtgagctgaagtggtagattgggtaaaccagtctggccagcagtagggaaccctgatcaagaatactcccttcacctggcaatgaaggaccagcagcttgggataggacatactgaacaaatgaagaactcctgagcaatgccctactagtagagagcgatgcactactagtggtagtagcagcagcggcttgagtagcagaagtaacacccaaatgaaggcatttccctgatattggtaagtgaatcttaaatcaaggattagctggaggtggatctgcagtctcgttagctcggtgatggaacagtttagttatcgctcttcgttcacaatcctgcttattgatgtacatcttattaaacggtgattaaactattctttaaaattgttcataaaaaaataaagagatttttatggagtttcatgttgggacataaaagtgtaaatgcatggactcctatgttttgtcattacaaactaattcaaaccacagcagcagaaattcagcaaggaaaagaaatgctttaccagaaattttattaccttaaacatattgaggtgaaaaggttttccagtgttcattctccttagcttcaggtaagtatatgcaaaactcaactgatctcgtgaggtgaaccggttaacctcattaaaccaaaggcatgaaaacagattagacattggtgtatgggcacgtacaatgaaagatccttcaggcacatctgcacaattgtgatgtaaaagatcaatactgaagaaatattcatactgggtaatttatcagatcataaggtaatgatacgaacaacttggaagaacaggctctctgccagattcattgaacttcacaagaccatcagattggtaaaagtaaaattgctcatcaatagcagtgtggttgtacttgttcagtcgcttgttttgaagcacttcctccgagacacaagtacgatcatagtgcactgaaatggcatattctgctttatttctccataagaaatactcaacgataagcattggatcagcattaaggcgcagtttactatccaaccaaatagagtacctaatgaagtacaaatcttttgttaaccaagtagaggaaacacggatcatggatatataggagattgatatgtaggaaacagttgaaagaattcacaaaaatcctaaacagcatagggagtagttaggacttaggaacttaggatgctttttatcaacttgttacatggtaagtaaacagtaactattgttgatttagaatttataacatgtcttttattatagaaatgttcaactgcaaataggacaatttagctttagccaattaataaattcctcatgcacctaaacaaatcctacatcactaacaccaaacatattctccatgaaactaggcaagatacatattgcacaaacaaaaacttacattgcaaaggggaagagtctgtgagccagaaattttggcacctttcctgctctccgcatatctttgtacggtaatttttcaactacaacaattctccacaggccaatgaatccagtttcatcagggccagttccttcagaggacagagttcccagtgttagctcatccaggaacatgacgaagcatacattcttcttagagtatggaccaatctgtgggagttcaaaccggtaatgtttaagtacagtctaaccctgcctattgttgaacttataaaatatcagcaaaacatacaatagtcatggaagttaaaaaaaatacagagagatttaaaaggagccaaagatagtaattaatgtactagcatgagggagataaaactccaaaagaacccattactcgcaaattaggtactctcagataaggtacttgctataatacatgtatacaagtatgccatgcacctaaaaaaaaattaccttgctcttagttggtctccttaagtaatcagagcttccaaaaatgcatgatgaaacaacaacacggcaggaagccatataaatcttgtcattttcatccagatcaaatccagtattagggtaatcctctggtccttgcacaaaaccacagtggagggtttggtttcttgcgtagtatgtctcttctcgttcctgaaggctctggtgtccaccaaacaatggttcaaaaataccattactagatgatacattctccttcgagatatagttcaaagaaaaccctgtaaagttgttgtagataccaggctccactagatcatcaactgatggcaaaaactcaatttgacatggtacatctgcaaaaattcatttgataaattaaagcagtatgcacgatggaagaaagcaatagcaaatttaataaacaaaaaagaacagcattcatgtctgcatttagcatatgagtagaattgactagaaaatctcttatatgagtcgtaagaaccagaactgatgctaacttgtactatacatctgttcagaaatataaagaaaatgtgtggtcaaccttgtctaattttgactaccaatatataaaaaactatttgaattggtatgtgaaaaatgatactatcatattttcataaaatatattacagtaatacatatttttttacattttttatagaatatactcaacatgtcataacccaggagtaacaagaaacattaatcaaagtagtagatattctgatccattaggtagtactactacaaccaacttgccgctggctaggcatttggcagatacaagagaacaaaagatatgctatctagtctgtttagaacaaagtgcatctaggataaagttggataagatatgttttattgtatttgattaaaaagtaccatattttaggaaactcaatatgtagagaatatagtagagaagatctcttacaatgcttgcgagatttctttcgtcttttgaagggttccgactcaactttagtcctgacatgagaagttaatcctatgactgttgttccatggtagccaaaggaatgtaaatacacacagatagatattatttacatatgaaaaaaaatgacgaactcacatagacaaatttgccttaaccttagcatcgagagtttgtctttgatccattctctccttaacatcctttatactagccatatcatgatgttttgctgtagagcatagcatcaaacttcattccagagaagtatgagaacattatcgacgaaagaatctgtttgtcgtcatttaaagttggtgagtttcctaagggcctacataattgtcgtcacagtccattcccttttctagtactgttgcatacaaacattacaccgcttctccttcccctaacaaatcaaaagttcactcccaaacctatcttataatgcaaatgtgtcacatgcttaaatttgacatgatgacaacagaaaaacatatttttggatttttcatttctgccacgcttaacttcctacacacttcaggtgagaatgcttctcggcctattccacccaatcccacgaattattgaaaacgatgaggagaaaacattctagtgttacgacacaaacccactatcaccccgcttttcaattactacattgcaagcaaaacgatagttcttgccctaaaactacggatctctagcagggtgatttgcgcagcttaccatggaaggggagattggggtgggaagagaaggagaggtaggcgagggagacaagcgcgagggcgaaggccgggaggacgagtaggcggcagtgacgccgctgccgtcgggggtgacggcggggtccggccgccgccggagtggatattggtaggcggcgctccggcatgccaccggcgcgctctccggcgacgcgtagaggtggcggttttccccccttctggtggtgccctctcttctcttgctttgctctcttccggtaaaattcagatagccattggcctcgtcacgtgtagacgtgtagagtgtagtgcaaacctttacccaaaaaaaaaaagaagaaagaaacaaatattgtcatctggttaaggcctcctttgtgaaataaatttcgcgggaatttcgtagaattccaatttgtaagaaacttttctatttggcattttgaaacaaaggtttagagctttttaaatcatatagaattctctggtaatggctaaatacatgtaaattttagaggatagttagcaagtgctccaacttgtattttcctttttgagtttatatttcatcttattcatgcatttcttttgcattctatctgttgacattttttttttactccgacgtatcgaaatggtcattcctatgtgttttccatgtgttttaatcttttgtttttgttttgtatatgtattctatcaaaatcatgtgttttttttatttttaatgttttaccattcctgcctgcgtttcaaaagggcctcaaagtgttgtatagatcgttgcccttcgccaatggtcctgactcctaagggtgtgtttgagaagaaggggattgaggagattgagaagatacacaaaacgaggtgagccattagctcatgattaattgagtattaattattttaaattttaaaaatggattaatatgaatttttaaagcaacttttctatagaaaatttttacaaaaaacgcaccgtttagtagtttggaaagcgtgcgtgcggaaaacgaggtgctttctccctcaatgtcctccaaacgaacgctgcctaagtgttgcatgctgaacaattttggaaaagggatctacagggataaagcatgctgaagtatgtattcccttatgttcccaactcttctccctcatttttcgcgtgcacgtttttcaaactgctaaacggtacgtgttttgtaaaaaatttatatagtaaagttgctttaaaaaaatcatattaatttatttttcaagtttttttacagctaaatagctaatacctaattaatcatgtgataatctatcgctccgttttccatgtggaggggaggggttcccagcccttccaaaagaacacagccttagataccagtagtactaaaagttttggtattgactattgacaactgattactctttttttccctaatgtgtggatcaaattttgaacttgattgtgtcaacattgctacagttttcgcaactacttttcgtgatactacaagtggaattacaagtgtgtgagctgccttgcacgaaagatttcgtatataaaaacttgagttagggtgtgtttagttccacgccaaaattaaaagtttgactaaaattaaaagtttgaagaaaaaagttgaaagtttatgtgtaggaaagttttgatgtgatgtaaaagttggaaatatgaagaaaaaagttgaaaactaaacaagggcttagaagcagtactgtgaaaacaacgcggttcatctgggtagtttactaatctagcattctgattgtaagccagtgaataaactagtagtacaaaagaatactcaaggcaaaccagtgacacagataatactgcatctgtgcactacggcaaaggaacgatcgaatgcaccacaaaagttactggcttactgcatagctgcatacagtgtaaatatcatcttctcttgttaacattggcatgcatgtaagctcaatacatgcagccaatctccaggaaacagatccaagtggatcttagtgctttagtattctttgatatagtacactaatttactcactataccttggtacaaggagaacccctcccaaaaggtaacagaagaagaatatagagaacaagaaaaacatcactatacgaacaaggtgataatttcacaccaacagtgtagttagaagatcagggtaccacagagccgagagtagtggaccgagaatacactaatcagtcttggtctgctctgctatgttgagtttaactggccgtgactcaaaccctcctccttttctgtgctcgatagagtaaggcatgtaagttccaagtatcttgtcccaaatgacaaaaaatggttgtgaaaagttgtacttgtttccatagagctgatgatgaatgtcatgataagcgctgttgttgttgaacagcgcatggaggatgttaccaggaagccacagaccacaatgatcatccactgtcttgatggttgcgaacgagaaaaagaatatggatgtccgtggtgtcataccagagacgaggaatgagagagcaccaccaatggtgtccaaaataagaccctcaagaggatggttgtaaagagctccaaaggaataagggactacaagagtgtggtgcttggagtggatatgtttatataggaacttgttgatgtgcatgtatctgtgcatgaagtactgccatgtatccataacgaacattgcaatggcaaattgcagcaatatcacaagggcagaaggttgcttctgttcaatatcactttcatcaccaataacctgcagttcgatagaagttcaacagtttgagaaccatacaagtaaagctattaggtaaactccaaaagaaatgtcaagatacaatattggttcaagacacataagcattcgtacaactggacattcatgcatatcagtttattttccatggacaccattttgatatacttcaatcagcatagagcagctgccatctcataaatatatttttctacttagtcagaaagcaacaaagcacggattttcttgataagcaacgcagaagcaaaatcaacacaagtatcataactttgctccctactcattatattcaaatgacttcttcttttagttatgtgcagcttccttccatacgaagtgaatacaaaaaatgtattttaagtagcaccaaagctatcctaccaaacaacacacctacagaccaaaacttaatacatgatgcgattagctcctatcctccgcatgttagcacagatgctgaggtttaaagattgatttattgagtgctacacggtgatggtgggccaaaacaatctaatcgaaatgcgtgtgaagcaatttttacttcattgttctccaaaacaatctaatcaagacgcatgtacaacaatttgcctattttacttcaaaattcaccccaagtatttgcatctctgcttctgcacttctgaaggaaaataataataaaaaaaaagcgattctgcatgtttcgcatcagattaccacaaagctaaaaaatgaaacaattcatccaaccaataactcgggtgcccgcatgctggaagagataaccggcggcgaggaggattaccgcgaagagggtgagcgagacggcgacctggaaggcctgctggacgaggacgcccctgacgacggtgcccctggagacgacgttcttggcggcctcctcctccctggggtgcagccggtacacgtccagccgctccacgccgtccagcgcgaggtacagccccgagtagagccagtacacggcgatcggcacgaacgtgcccagcagctcgtccgacgccccaatccccatccccccgccaacccaccaatcctcgggcgcaaaacacgccccccacaacgaacgtcgagccgggaaggccgggagagagatgggcttaccacggcgcagcgcggatccccccggcggcggcggaggaggaggaggagatgttggaattggattcgtggaggtggctggtggccacggcggaggggaggtatggataatttaggcggccgtcgccgtcggtccgaacgaggagaggagacgagggaggagaaggtggggaggggagggggacgggcgttggttgcaaaggggagcgtgtggtccgggttcgtgcgacgaaccgggcacatgtgcctgtttctacttctcgtgcaaaaaatctaaggaaatttcgtacgagttgaaaagaacagctaaacataacttggctaatttttcttctctgatttggactgtgtgatctatggtttgattgcattttttaaaatagtttataataaatttactggtgccagtaagcgcatgaattactgtacattttttaaaatagtttataataaatttactggtgccagtaagcgcatgaattactgtacattttttaaaatagtttataataaatttactggtgccactaagcgcatgaattactgatgctaatcttgaagggacgtatacagagctcaatccacaccatctcgtattttccaagacctggcttggaacaccagtaaacacatgtcgattctaaagtttctctttgcctacgcaagacatgaaaagctagacaacgcttcaggaggcaaaatcaatcgaaacagaatgtttctaagcgaagtgagcgaatcctggattccttcgcataaccactttagcagaccaggttagagccaaacaactgaagaacgatctcaggatcatttagctaagacaagacgtaccacatataaaaaatgaaagggcaggacgataatgaattccctttcacgacacaaactaaatactaggcagacagctaaataccgcacattttattttgttcattaaatctgatgaaataaaacccatgatccagtataaaggaatctatgttacaattgggataaaaaggaatcgatactctgcagcaacaagtacgattaacttgtagcctgactttcaagagagcaggagtatagtaccaggatgccagtacctacaccatcaccaactgacaataaggttgtctggggccaatttcagtgcactgggccactggggtgatcatcgatatgctggtgcaccagcaaaggaatacagggaggagaccggcgcaccaggcacgttaggccttgtagaagaaacaggcatctgatggatgctttcactgtaggcaggtcctgggttctcataggcagctgtcacataggacggaccctgatggagatccattgcacgagtggcaagtctataagaacggtagagctcatccacatgatccgagcgtgcgacaatctcttctggcactctgtaatctcttgcgaggaaggcctccctgtcagtagcctcaactatagctctgggggcagaactgaaattcaaaaggttacaaattcattaaacttaaaacagatcaaaagacttacaaataagtaaataacttcaaagaaaactaactcaacgaacgctattagaagccaaaattagcagccaaaattagcacgacaaagttagctataacaggaaggcacaattttctagcacatcactaaaacaatcatcagcactctgacagataaagctatgctcccttatatgtcaatagtaagaccctactcattaggcaacaactttcctcagcctccttaagataatacaccacagtcaattcttccttccttttatagatattgtcttgtacagctaatgagctaattgctgaaaattctagaattaaacatggacaggttttgagacaatgaattccagcagtagaaaactgagatccataaacttgccatcctgtggtaccttggaattgaaacttgaaaaaaaaactacttagttgattgctaaacttgcaataatttgttttttcagttagctaaaagtattgatgtgccttcaaaacatgtggagagtgcaagtagaacaagggtagaaagttccgtgtgaattgcgaagtgaatctgagttgcagtattgaatctcctatctacacggttactattagttcaacgcctctatacttttttatcgagctggaaagtcccaaaattcaatgactgcatcaacaatctctctaaattatccaaattagttttacacctccattcactctcatgtcaacgaatttaggtaataaaaaagttgtttgactgacgcaattataatttgaatgtttggaaaaacctaaaatatttctcaattatgttgctaagcggaagctaaaaggagccaccacatttttcctgttggcatggaaattactatattaatcgaggaaaaagagaaatatctattttctcaaccatggttggtccaaattacaattgtgtagattaatcaatatagttgtatacaaaatacagtgtacattccaaataaattttaatctagtccatgtgtaattgtgcggaaattgagcttgtttttcaagttacaagacataactggcatcattatatagtttacagatctctagcatagaggccaacaaatcatgaagatggtgaggagcaaatttagatagtttgctaataaaccaactagaaagctagagtactaaaatagcaaatctgccatagtgtcatcttgtgtcaactaacacaaagcacaatcgcatagtgaacaaaatatattaagaaacttttagatttctactcacaattcaattaagaaatattaagaatcacccaaaactaggattggacccaagtataagttgcatgcactagcctacaaagcttaatttgatgaggaaaggtgagcaatccaatatactttcaacatacaccctcatatgtaggatccacgcatgcattgagtggagtagaagtaagttgcactttgtaacttactgtgcttacttggaataactttaagacgtgttggccctaatatcaaattaagttgcatatatagcctattcatccaaaaagctcaagctaacaagaaaggacgcggagtcaactcatcatatagattgttttcaataatgagtgagatttatttaaccaagtttgccaaaaaatcaattagcacttagcttagaaaattcaagagatgactaaggccctgcttgattcagcttaggattattataatctggattattaggagtaagctgaaacaaacaagtagattattatgctagattattataatatataagccagattactataatccaataatctcctctagagaagctttttccagattattgagtggctaaagacccactacccttagatgcctctaataatccagagaaacaaacaactcgtagcttattttatgttagcttattataatccagcttaaagtaatctgatttaataatctagattacaataatcttaagctgaaacaaacagggcctaaagcactcaccgttcatacacgatatcaacttgaggttgatggtaccgttcgtcaaaagtatgagcaacatgatgatagtatgtgggaggagcatgttgaagctctggtaaatgagtcacatgccgagatcgaaatggatcatgcagagagtcggttatagcatgtctttctttaagaaattgtggatgacgaatatcttcaacatatcgtggtcgtcttctttcttcatggtcatacggtaatcttctttcttcatggtcatatggcaatctcctttcttcaacatgtcgtaaatgatgcatttcctcgacatgtcgtggcagtctccttccttcaacatagtgtggtaggcgaccctcaaagacatccaatcgtcgatgcctttctttaacatattgaatagatgattgaggcaagctaataggcttgaatagttctaacaacctatgaacctacaagatagcaccatagcttatgacatcagcacacaacttgatgtttacaatttaattttcttttggcactcttttaaaactacatagaagaatctccacaactcacttgtttaaggctgagttcctgggtgaactttccctttgaattgtagttctccttaatggcatgcttgaaactactctccggaagaggaaggcaatctttgtcaaccttaaatttgacctatatcacgtacacaagttagttggactacaatagtgtcacccttaaacattatccgattttatctactccctccgtcccaaaatataagattttttttgactctgacacagtctccgagatgctactttgaccaacaatatctataaaagtaagatgttttaaataaaaaaaagttgcatattatgatagtttgtttaataataaatctagtaacatcatttttacatgtttgatcttttttttatttttttgctattaatagtaagttgaaaatgtttaacttatcactatactaaaaatgcttatattttgggacggagggagtagtgtctatcatcgatgaaaaatatattagtatgattgttaaagaaagactctatattacctaaaatatagtaattcccacaaatagttgaaaaagggagaatgacctaccactctggtaggccatattattatattgatgtagattgatataagaaatgaagaacttcatggtagaattacatagagaactctaatgtagattgtaaagcaaaaggtacataatatttagcaaccactttagaaaataataatatattcatggatgcgctctagtaaaacacaaaaaacaccactatattgaatcaggataacccgaagttcgtgtgcaacttaacttggttccccgattctcatatgtatcatccatacgtactccttacatggaatttcttgcaaagaatatcattacaaacatattaaaagagtttctttctaggactgtatggacatactaagatgtttattataaatcaaaaggcccaaatggttataatactacatatagtttatgctcctgaaggttggagaaaaattaccaaactaattgttggtaaaattaaggtttggaacttacaactaaggcaattaactagttagtttctatttaacccaaggagaaatttgatcaaattttgagaaaataaactcaattgagagattagtttggtaggaaatgaactcgattaagatagtcctttctagcattatgaagtagggaatgagttaactcaataaacaaacttcgtcgcttactcttcaactaacataattagaacttcaaacaatgcctataaggaataaaaata

SEQ ID NO: 7339 - DNA, 84550 bp, Oryza sativa
tatatatatatagatatatatatatatatatatatatatatatatatatatatatatatatatatatatatatatatatatatatatatatatatatatatataaactaatttacatttgcactaaaaccggtggacccattatttaaatcatcggatctattgttaataatgtctaaagttctctttttggcccactgcacaatgcacgtctgcacctctacctttcgcacatgtgacaaagtgtcgtatttgaggcatcttgggtgatcacgaccgctgcagcgctaccacttttgttaatagcatgaaaaaaatattaaaggtgtgatgcagcgagagaagaattaagtaccgtggaacacttaactctgtttaagatgaaatcgagagtttattaaataataattataatatattgtgttatgttgtatttggattttgtattatttgttcgtacagttgaaagaaatcattatgttataattgtgaacacaatattaacgaatatcaatagaactcttactaggataagagtgttataagggagtttaaggccctattttttccctgattccatcttttgaattttcatttgcacgctccatgctttccaagttactaaatggtgcttttattaaacaactttttaactttttagaagtcaattcattcgtttataatctcaaatagctatcacataaataagataattcatcaatttcagttatcctaacctctaaagtacatattttttttcatgcgagtcatggtgataagtaaattggtgatcaacgcataatcaaaatcgtatgatgaatctgtaagaactactatgaccaattgtaaataggtgtcaaaattaattgctattaattaaacatctaatggcttgctagcgacatatttaatttttctctacatatatataaacatggacgaagctagaacgaatattaacatacatcccatacatatatattacatgttaatattctaattacatgtggtaagtccattaaaatttcttaaaatgccctcaagatgacacgtggtgctctaataaattagagaaaatattagaaattctaagaaaaaaaaaagcaaagtatctattacttgattttcacttgaatcgatgggtccaatagtttataaactattagattaaattgatattagaataaactaaatactacgaggtcccacctctccacctttggtacgcacctactcccctccctttttttattttttcatttcttcttttctccatgaatatgcttccctccctttcttactatatcatgcaccttcatgagacgatttaatctatttactcaagaaaaaaatatatttcaaaagttgtaagtacttaatccatctcccactcaaagtttgtaaatggatttttaagatatcttaacaaaaaatcgaacccttaaattattataaaataacaatatccgaactttagtttgcccttaattatgagatattttttttaacaaacaataaaaatcttacctttcaataatataagtgcccgcgcgtatgcgcgggccaccttcctagttttgataaaggttgcatcagtaataaaccaaacaagcgctttggtggttctacatgatcaaaagcagtactaccaaacagggcctttaacctcaaaatcactgtaactttaactgctctatccagtaatgatagtagaagcatggatgtatcactacatgattcattcatttgagcaaagccgacatgagaagaccagcaatccagcatttgatcgtggtcgtctgatggttgaaaaggcatttgtatcgacttatgctagcccctatcaaggttggttatccgtcagcgtgatcgttgattttgcacggaaaacaacaggaaaacataaggtctactggaacactacgagagtctacgatacggacgaactgaagggcccttgcgtttgacgccgggtttaggtcgccttggctccgttgatgtcaccgtttgggcgtccgtgtaggaggggccagccaagtactgcactgattagttcttgatcactctgctggccagtaatctctcttcatcttaggtcggcttggctactagtagttgaggagtaaggccctgccttttgtagctggcacacgcttgaaactgttgacaatttttgctccatcgaacatcaggttcagactttcagtcatcgttttcgatccccttgcttgttgcagcaatttcattcagagaaagcatgtgtgtcaatggacactcttcagctgcaagaatcaataatgtacttccttagagtaagtttaataacggagccaactataagcttatagtttatattaaagttaacatatatagtaagtgagctacaaggttatctctttttttttctcctcctctctctatctctcacctatgcatttaatgtatttatcttgaagtatgtgaattgctagctcttgtattagagccaatcctctctaattttcaaattctctttcatccacataagcttatagttggcttatagcctactagtatacttgctcttagtattagggtattcccaacccaatgactaggatggtgtccatagcattaaataagttaccacttaggataaaaaatgatgtggcaagtgaataaatgaggaaagagaaggaaaccatatcttgcatgggacatggttttctacacaacatccaagacatcatgtgagataaatagcattaaattggagtatggaatagtggtgtttgcattggaagagtagtatctaggactagtttcttgatgatgtggagtttatggaaactatgtctagtgttatgggttgggactgcccttactgcttctaaatgagacttgtgactgctggtctcctttgatttacttccttacttgcatgagatttttttcatgtgttattgacgtactacctccgtcccaaaataagtacagccgtgaatatccgtgcccaacgtttgaccgtccgtattatttaaaaaatttgtgaaaaatttaaaaatatttagtcacacataaagtgctattcatgttttatcatctaatagcaataaaaatactaatcataaaaaaatttcaaataagatgaatggtcaaacgttgaacgtgaatagtgcaaaactatacttattttgggacggagggagtactgaagtactggaacaaatatctgatgatgttccaatctttctttagttattgcaccggtaaaagattgcaataagaaactggagttagtacgcactttaggctaccctgaagaattttttgcatggtggttagtttattgaaggtgtggtgtcatccttgcgtgtagagattatcacattgtctaatcaagaagagccaggagctaagctaatctagctcggccgcgaacacgacagcaagttatcttgaaggaatcagtcagttgactaagcaggctctcgctctctccagtccagaaaagcttcggcatttagaatcccctgtttgcaacaggcgacaaggcaactttcatatggcaccaaacatgtcggtaacagctgatgaaaccgtctaatttatctgctaatctcgctgttttttcccttgtcaggatggctcacaagtggaccaagttgtagaatgttgcaaaacccgttgtttatcatggccacattcggctagcgatgcagagcgattgacagagaaatcccatgcgacttaagaaaagcgaaaccggggccctcgtttgccagccagggtggctaacgactggagtgtgtgcaactagccgctgacagacaacgcgacgcttgttatcattcgcaatgccgacctgatggatgtgagctcgacgtgactcagctacaggaggaggagtttggagtcatttgcgtttttagtccaactcggtgaagggtcatcccggatcatctgcactgtagtgtgcagggttcatgacttcctgtgttgcagccctgaacctaaggatcgttctgtagtcgtaggtccatggtatcatgattaatcatggttgaatgattcttttgctcctccgcgttgtggaggtcgatttctactgtatcgtagtccagattcttgtgcaatgttgaccatgttcattggcctggcttgagctccaaagagccctattatttctcttatacatatgcttatccttacagcttattaacaaatagaaaataatttacaaataaaactttcatataagtctcactaacgactcaaaaataaatgttgtaaaataaactgcgataaaaaaaataagttcaatatttagttttaaaatttaacttttgacttataattataagtataaaaaaatgaggccgtaattgaaagtcttttctgaagaaaatgggaataaagatgaggatttgatacagtaaaaggctgtttggggcgaattgggctatcggctcagtaggattgcttagttgatctaacctccatatgggctgacgctgatcatgggctttacatgggcgagttgccatggcccatgggctgtcttgcgcggaagaggcgtgcgtggcagttgatggcggtgtcgccgtgagagaacggagaagcggagaaaccgacccgtctccgcctcatccaccgctccgccacgatgctcgcgaccgccgccccgcgcctccgcgccgccgcgtggggcagcctctcgccgccggcgccagtgcgggcgcagttcgtgagtctcccgctcagtctccccggccgctacgcctcgctgcgcctgcgcgcctcggcggcggcggcggcgaaggaaggggcggaggagatggggttcgaggagatggcggccgggacgcggaggcgctactacatgctcggcgggaagggcggggtcgggaagacgagctgcgcggcgtcgctggccgtgcgcttcgccaacaacgggcaccccaccctcgtcgtctccaccgaccccgcgcactccctcagcgactccttcgcgcaggtcgcctcccccgtcgagcacctgctgtctcggttcgaggtttcttgtgtgcgtactgcgtagctaacatcacttcctgcctactcattttaggatttgagcggcggggcgctcgtgccggtcgaggggcctgaggcgccattgtttgcgcttgaggtgagcggtattagtatatgaaaatcttagggcatccatttgctttgagaagctttgggctatgcaacataatcatttagattgtaatgaagtgttagcatatgaacatcgtagagaacatccattttgctttgagaaactttgagctatgcaatataatcatttagcttctacagtaataagctgaaaacctctacctgtgaaattctaggatttgtttggaatcagaatgatttaatttagatcaaccttctgattgacttactctagatcaatatagatagtgcttgagtgtggcatattcgagttttaatgcagataaatcctgagaaagcccgagaagagtttcgtgcagcaagtcagaagaatggagggactggggtaaaggacttcatggatggcatgggactgggagtgcttgctgagcaggtgcaaggctgcatatctgtttactgtcgctctctgtatttcatcacctcccattatgtctgaatgttgtggtccttgtgttcgtgaatttgcctgaattgctttgtttaactttggtattaccatcttattccatatagctgggggagttaaaactgggggagttattggacacaccaccaccaggattggatgaagcaatagcgatttcaaaggtgagaaaaagcaggtcatgggctttacctggttcatcttgttgttcttcttctagcatgtgactcctacttgcatccaggttatgcaattccttgaagcacaagagtatagcatgtttagacgcattgtttttgacactgctccaacggtaactatcctatatatgtgaatccacaattgactccatacgcacattcacattattacctatgatttgtctccctcatcaacagggccatacactccgtttattatccttgccagatttcctggatgcatctattgggaagatcttgaaggtattatttgcttgattgcttctgcaccttttgctatcatgctacgatgtaaggcctgcagtacatacataattgatgaagaaaatgtgtattatcttgtgtaactattatcctgcctatcgtcacacaaaacaaagtcattttagaatgtgtgtagtcaacacaagttaactttgaccataaatatcacttaaaatataggttttggggctatgaaaaatgatatatttaagtttgccataacaagagatttcataatactacacttatgtaaccttcttttaaaaaaaatgctaaagaactaggtagtcaaagttgtataatggtgaccagagagagtagccactacaatcttgttatttttgtggctaaatggtagcgggaagcttattgcatttctgctattattcatttgtgttcgtttgcgcagcttcagattgtgctttttttttgttaacttgtgaaattggaaggctgcctatcttgttgaatatttatctgctcaaatacattgtttacatctttttcatcagagttttttagacacttgttagaagaaaccgcttatccttgttctgcttcatatgatgaaatatcatgtctctggaatttaataaggaattaatgcaaagttattcttcaagtcctgttaccaagagctaggcattccatctaagttgtggtttgtcatactgatttatcatctttttttttccagcttaggagcaagatcgcttctgcaacatcagctattaaatcagtttttggacaagaagttcaacagcaggatgcagtaagtatttgcctaaaattcctctgaacttggtgtttcttcaccatgtctttaaacctttgaatttgttattctcccccttaaggcaaacaaattggagcagctgagagaaaggatggtccaagtgcgagaactttttcgtgacacagaatcaactgaatttataattgtgactattccaacagtaaagattctgtgtatccattcccccaccaccttctgtatgtatttatcagtgtaatagccatctttatatttccttttggcatttttcaggtgatggcaataagtgaatcagcaagactacattcttccctaagaaatgaaagtgttcccgttaagagactcattgttaaccaaattctaccaccttcgtcatcagactgtaaattctgtgctataaaaagaaaggtagagttcataatctgccgaaatgattctctagtaattgtctgctgcttgtagaaactgtgttgcagggccatttaccatcttctttcatccaggatcaaacacgtgctttggatatgataaggaatgatccagagctaatggggctgaacttaatccaagcacctcttgtcgacatggaaataagaggcgttcctgctctgaagtttttgggcgatatagtatggaagtaacttcacaatggaaaatacgataaacttcatcacacctacttattgaagtgctttgcaatgcaaactttggtagctgcaagtatcagcatggatagagctagaatgcaagtgtgcaacttagcagatgcccaatctcatgtgagtaagtagcatctcgctgaaggtttgccggaatagcatatactagggggattgtgttctaaaaaaaaagggggggggattggatcaagctgcactaatatcaagtccattgaggcaacatgccggtgatatttctgcttctttatccctttaataggagcgattctgagggttttgagtccataactttgcactaaaattaattttgttcgtgcatcatgtaaagtcggttagagaatgaagaatggagaaaatcagacaacacttttaagtaaattttcttacagattagtgtgacttaaatgtaaatagacaatattgacaagacagctgcagcagttgagattttaatttaagtagctgaaaattctaggaaaaactatcctacggggtaagtttttcaaacagaggtaggggtagtatacacaatggacgttgcagtactgataaaccagtgactggggtagtaatcttcctttctgtctttcgtagtactacaagacggttgaagatcttttccatcctatcgagatgtactactccacttctgttctgtgcaggttgaatatatgtggcccaatcacatcttgccactaaaaatcttacatttatccatatactccacgaacagtagattttactcatccctgattagacccaaaacaatcatgagcacggtagacaacacaagcttagggcgtcttgcacgattaggtattgttcggtttagaggggattgaagaggattagaggggactgaggggtaataatttcacaccataataggtattgaataaatcccctctaatcccttcctcatgagaattaaccgaacaagcccttaccccgctacacccaaaaatgtttccgctggggtgcaatactgctatcgatggcttcttacgtaggaatttcatttttctaatattttttcattaaaaattgtacaaatatgacaaatctcttttataaaacaaaggtttctatagaaattatgcgagcacatatgttcacatatacacatatttcatatttatgactaattatttttttcaacgacaccgacaaatccgtcaataggctttatttttctttcacaaagcccgtaaacttccataggagcctactacatcagtggcttcgtgccgcactaacgaggcatctatagtgattgactttatcaatgtaaaatatgacagccaaatattttgatgggaggtgttcatggttatatgtacgtttatactccgtatgagtgagtagcactccctccgttctgagatatttactagtactacgaatctggaaatactctttattcagattcattgtactataaaagtatctcatatatccaaaaatttttatattttgagaccgagtgaatatatgtttgtggttttcctacatgtgagtagagtgcatcagtggatattagagcctccacgatatgggaatagtatcagccagtgtgttgatgacgtcaaagctcaaagggtagatgaaaagttcatgcttcaaaaatggcatgtcttggaaactgggattttcctaataatgagaaatcctatgtgcagagaggagacaaaagcactgctcaacacactgcaggctgcaaagatttgctagtactactactccagtacacaaacacatcattggccacttccctaatctcatttaacgtttgcataacgcactcattctgcggttactgcattagctactcatgaatgtggctatttactagtagtacaattctaagtgccattcccaggaggagtgagcagcttctccacccttaatcaggggcggagctaattggttttggcgatcaatctgcctcgtcgagtcgtcgttccgccctccacacttcccagttcgcgactgcgccaacgattgcgcgagcaccgctgccgcaactcaactcccgtgaccgacggcggcaatcggtggccggcgaggcagcgatcaggatcagggtaagtatatttcatctcctcctcctgtcctttggccctcccttctctgatccctcccgtcttcattaagctctaatcctaggtactaaattactaatttgattagtaagcggttaggccactagaacttgcgcccttgccgacggccaacacgacgctcgcaggccacaagacaaaagctgaatgaagcaccggcatcgcatgaactgatcgcattgtgttggtaaattctatacttctatgtcgacatattacatttatagtgttaaagaaaatttatgttcagttggaccatcctagcctaaaatcgtagctacgccactgcccttaagcccttgccaatggagaagtggaggttctatgggggccatcagtttcagagttacagctttcacgaagaggagaacctctttcaggattggaggtaagcagtcaaaatctcatgcaaggtttgtgtttttactaatactctctgaagatgctatcctttgcaaaactttgctcattttaccttgttttcttcaagatgaacttctttttgcactctgcattagaaagagaacttcactgatgcctgtaatttatgttgtactcttcattgacactgtccatttttgccatcttggagtcttgattacctgctgctgggagaggatgagccctttttcactcaccacttcagcactagtgttcatagcaacttcgtgcaaggtaatacaggtctctgtaccgaggaagaatgaagcatcatgtactcaagcaagtatgcagtagaaagttttgaaagttcatgtattttctatctatcaatgcagacgagctttacaccctcttcgacggagatatcctgagcatttggggcgacatgaaagaagacgcctatcacaggagcgacaaagatggcggcgagaaggaagagaagctggatcatgagaaggccatggagctgcagctgcaacgactcccgagcggccgtcaatcaggggaaaagacactgacgttcgagctcgtgtcccagtacttctgcctgccgatcaagcaggcggcgcaggagctcaacgtcgggctcacgcttctgaagaggagatgcagggtgctcggcatcccacgatggccgcaccgcaaggtcaagagcttggagacgatcatcaagaatgtccaggtagtatttttcctatctcattttttttctctcgattagatggaagaggtatacacaccagggtttgaaatttcggttcgaaattaatttcggaaatttcggcccccaccggtatgctcaaatctcgtccgaaattttcgtttttttgcaattttttgtgaatttgtcaaattttattcaaattcagttaaattttcaaataattccggccagaaatttccgaaattttggtcacccccggcataaaatccaatttcgaaattgaaaaccctgatacacacacgcccctgtagtcctctatcctggtgatctttgatgggcgaagtcatttaccaacaattccattaccttaccataagagttttcccgtaattttccatctatgtaaatagtatagtgtctaagtttatatctgagcaaatctgaatttcatgtcctgcaggagctagggatggagactggccaagacgaagataatactaggaacgcagtggagatgttgcagcaaacaaagaagctcatcgagcaaagtcctgatgctaagctggatgattggacgaagatgttaaggcaagcgtgtttcaaggagaactacaagaggaggaggctcctggcgattgaaggatgaagagggatatgtagcaaggtgactctgcttgtagatggtaacatcaggatagtgcaggtaatcaggttattttggctgatcaaatgtgtaggcagtaatttctagtcaggcttttaggtatgacccaaggcagaaaagtaggaatttttgctgtatatacctcttttctagccaagtcttcactgatagtaacagtactagtttggtatgttggtcatgggaagtatcatgtatatatctgttttcagacacgatctggcgtgtgaacaactagtgcttttagttctgaaaataaagatggcgtcttttgctgcacatttgttctgtggagaaattcagaattgcatgaagaacagctaaagtaaaccatttcatgtcattcaccattcgtcaggaaacatgaaccatgcagaaacatggagcttatatagtagtacattgagttcacaccgaagattggtgtgcttcagtaatccaaccaaactgcccccaagtctgaacatcaccttgtgttgtacaagaaaatcggacagggtcgatcggtacacagcctctctctcttatccatctctacttacgcttgttcaaatctgtttgatcagccgcgaatctgtactatacatgcacactgatccaccgcaaattgcagtttctaatgcctcaagaaaatgaagcaaagtgttcgatcgcggtcgtggtcatggcagctcaggctcacaaggtgaccttctccatctcgcggcggagggcggtggcgcggacgaggctgccgatggtgttgacggcgagcttgatgtcgtcgagcgggttgcccggcacgacgcgcttgtagaggtagctgtcgaaggtcatcctctggacgtagtcgtcggcgcacatctcgacgaacgcctcgcgggcggcgttggagcggtagaacaccttctggagcacgtcgagcaccttgtacgtcggccagtagaggcggtcgaactcggccaggtacctgcgcaggtcgctctcctccaccatccgcgtcccgttcgccgacccggccacgatcgcctccgcgcacatccgcccgctcttcgccgcgaagtagatcccctcgccggagcactttgtcacgtaccccgccgcgtcccccaccagcgtcaccctccccgccaccctgtcgaacaggtgtcaaccccgaccgatcgaccagccattgatttgatgcagaaatgcttgtggattctggcattgttgattacctcttaggcctcgggtgctcggggatggggtgagcctcgacgcggatgatcttgccgccctcgatccggtccttggcgcgaaggcgggtggcggcctggaacttcttgatgtcgggcttgtgggtgacggtgccggtgccgacggcgacgtggtcgcacttggggaacacccagccgtagaagtccggcgagacgtcgtcgccgacgtacatctcggcgcgctcctcgtagtacttcatcttgtcgtcggggatcttgacgcgctcctggaacgcgatggcgtactcgtagtcgccggcgcccatgtccttggcgacgcgggagttggcgccgtccgcgcccacgatcgcgtccacctcgaacgtccgcttctcgccgccggccttgccgttggagctgtcgtagtggttgtagtgcaccacgtacgacccgttgggttccttgggcgcctcatacctttcaaacaacagagacgacatgatccaaaaacatgtttattttccccaataaacttgtaatagtgttaatgcacagggcagcataaatcaagtaaaaatgttgcaatcacaccgaatgggcctagtttagaacatggaggtatttctttatacatgtggtgctgaattatgtttcaatgaaatttttgctggactttacggaaatcaatagttagaatcttgcaacatatccaaacatcaagccattatcattttttttcattatttcaacatgcacgtacaaattagtattgcttttttacaggtattagaaaattggggtttccacgcagatagactgttcctaagataaatttgcaacaaatattcatgctattttacggttgctagaattcagggtggttctacaaacatgcacaaatcttctgaacagtactagaaattttgggttttgcacacatgcacacagatcagctcttggtgaggcagtagtaataaacaaacatgtacattttcgtgcaggtactatataattttgttcatcatcgtgcaaaattagtgttcagtgcgcacaaaggttcagagcaatcagaaatccaacacgatggcagaagtttttactcacaaaattcacaatgcatgtgactgagttagcaatatacctcaggaagagaccattgacgacctcggcgccggccccctcggcgcgggagcggaggtaggcgtcgagcacctcgcggcggaccatgccgatgtactcgtgcggcgcgagcgtgccgccgatgtcgacggcgacgttggacggcgaaatcatcttcatcttcctcaccttcctgtcgacgaggtccagcggcaggtcgaactccgacaccatgcacagcgggatggccccgccgcagggcttgcagttgtccagcttccgttcgatgagcaccgtctccacgccgcccttggccagcgcctccgccgccgcgccgcccgcgggtccgcctccgaccaccgccacccgcagccgccgcccgctcgggagcttcgggctcgacgccgccgcgcgcgtcaccagcctcgccatcctcctgccgcggctcatgcccccacgaaccgacgacggcatgacgaaggtggcgcgcgccgcggcggcggaggacgacagcgaggtcatcgtttctgtggcttctcctcctcggattcggaaaagatctctctcgtttgagctcgacctggcggtggaggagtgagcgcgagagtgagacgcgagcagagggtgggagtagtgaagtgttaggtttggggggcgagtagtggataggatgaggggagattgcgggggacacgagccgttggatcgagcgattggacggcgcggattggatacggatgaggtttttgtccgctttctccttcgccgtttgatccgcgcgagtggctgacgctttgccaggtcggaattgaatcttttggatcgttgtgtactgtatgtgatggacgatactttgccacgtcacgtcgtactgtttgttgatcaacgtttttgtaccgtgacgcttgtgtagttgtaatagtacacagtgctacgcgtgctgacaagcttgaagaagtgcttgcttgattatctactgtatcaagtgtggcgggtgccacagtgatcgttgtattattgtatccatcatgattaaaatcttgatgcccacagacttgtcgttggtctctgtttttttttatcgtgtgctggggtgtctatttgcggaattgcgtgtatgtgagcatggtgtgcatgtatgcgtatttcgtgtaatcagaaaacatatttggtaacgatgagttttggcaataaaaagaattgggtggcaaatgattgtgttgggtatttttttaaccaatattttacggcaatgctagatatcgcatatcattcttagcttccagaatgagatcctcttcctccctcatgcgggtatggcaaagaaacgatgcagaggcagccagatttcacgggggctgttgcagtgcttcaatgaagagtgatttcttcgaacacgggattggtgtcacgccccgaactattaccgaccggaactagcccgtgacgctccaaattaacctgttaatcgataccagtcccagaaaacagtgctggtatcacaggaagacagaatatcacagcaacagaggtctctttattatagagtaggagtacaatcaagtcgggctgcggacagatcccgagctcacaaccgcattacaaaagggaagcggaagccaggacttggaccaaacaacacaggcgcgacttgggaactaggccgaaaccctaaaactcatcgtagccggcttgctcctggaagaactcctcgtcagcgggatccgcttcatcttcttcagcaactgggggggattatttatgtagagcaagggtgagtacgggagtactcagcaagccatgggaaataagtgtttaatgcaggcttcaaggaaaggctgttgtttttgtaattgattttatttgaactcttttctgaaagcaactaagtgagtgcttctcaaacgacatggatgagacagtgcgtctcgtccggttgaagtatgtgcaatgtatcagtctttagaattgaatcaaggttggcacccggccaacagcttttcaaacggccacccgggccaacaactttcaaacggccacccgggcctagctgatcccatcagctgcagatttttcaaacatcgaacccctttccacaacagcaatttcacaaggcagtagtcaaacaacactacgcaaggaatcacctcacatccgcccatgaccgtgggcacggctgttcgaacagtttgttaacctctgcagagggggtacactttacccacacgacattactaacccggatcacccagcccgtggggatcagccacgtcgggagacctccaagctttcatgacaaggcatttcgtaagccgacacaggtttaccatatgccgacgagaggggtcccagaccaacaacaggttaggtcccagaccatactatgccaggaagcccaggggtcctccccgacaccaccccggcgaatccacatgtctctcggcatcaaggctcccttgataagctagttactcagccaggggtgtcccattccacccatgtggtcgtacttgtcttatgttcggatgaaattccaaggaaacggtccttaggtgcaagagcgggaaaccgtacacccggtacgttccccgattcgcggttttggaaattcatttagttcgcaagcaccgactcaggtgtcgggttttccaagccttttgtaaaacccaagttttacccaagaagtttttcagattttaagtttgaaggcgaccgtcgatactcgcacagggtgcacgaatatcgaggcacaactagatggttacaaggggacatgatataacaattaacaaaggaaggatcaaatgcaacaaattaggtaggtccgccaatctgccttgcagacgggacaaacagattaagtgcgatcctatcaatgcgtaatatttttcaagtaacataattaaattcaaatataggctcaagatgctcaaaggtggcttgccttgctcgagatctggagcttgatcctcgaaatcctcgcactgcgagtcttcgggctccgaaactacacgcgaaacgggacaactcaacaaacggcgaaaataaagccctattaaagacctctaagcgtgccattagatagatctcgagatttgaggaattttggaagttgaacggagtcaaacggatttacggttgggaagatattgaatttctaagattattggatttttgggtctaaagtaaaaggatttaattaaatcctttttgaaaaagaaaagaaaagaaaagaaaagagggagggaaattagacttccctcgggcggctagggcgcggcccgagagaaaaggggcggctcggccgagctaaatgggccggccggcccaaggcggcccaaggcacgcgcgcgcgggaggggaggagagagagagccggtggaccgggcccacctcgcgtggtcccgagtgggacccgcttgtcagcggctcggctcaccgtgcggagggagcacgcggcgcggcgctaggatgggggagagacgcggtgcacgcgcgcggttcgcggaggacgcggatgcggcgggcccatgcgcagcctcacggctcgcggtggaacgcacgcacgggaggggctgaccggggtcggcccgacccgatctcggccgagctggcgccgacgtggcgcctacgtggttgccacgcgggctggcgggaggtagacgacgacgccggccggaacggatggcggacgacagcgacgagcggcggagcgaaccacggcgatacaggcgaaagcgagcgcaccgggtggttgctcaggacgaggggagacgagccaatggctcggattcgccggaggatgcccgacggcggcgaattgcggcggcggcaaccggcggcgggagaagggggaaacggcgacgaggtcacgaggggtcgattcccggcggcgagagcatctacgcggctacgggaatccgatgctagcgttggattgggcggagctgcgccgagcgaggccggcgacgagcggcgcttccgagctcgggcggcgacggcggcgagcacatggcgagcggcggcaacggtcggggcggcgccggctagctacggggaggctactcgtgctactacccgagtctaaggggaggaaatggagcgaggagggagaacggggagatgcactaccgtgcgggcgggcgcagtgacgagaggccgacagcgcgggagtaatctctccggcctcgggccggggaagaggaaggagagggcgcgctcggagtccccttccgcgtccttgctcgtgccggctcctccgacacgcgcaacgacgaacggcaacagcgaacagagcacgggaggcggcggcaatggcgtggaggcaaatgggagaggaaaggaaagggggaagcttgggtttataggatggcaatgtcggtttgggaaccgacttagggcggtcaaaggagagggctagcgctcggcggtcgcggccaaagcggcgacagggaggagggaggaggatgacgccggcgggaggaaaaaggggaaaagagggagagaaaaggggcttgtccccttgcctcttcgggaaaaggaggagggagcgggggcgacgcggcagagggaggaggagctctgcctccgtcccttggcagcttgcgcgcggagtggcgggggccgggcgatgacgacggcgatgacggcggggcggtttggagcggagcggcgacacgggcgacaggcgcaggcaggtgctgacgacggcggcgaccaggcggtcggccaccacggcacgcgcgcgcggttgcaacgggaggcgcggcggggcagcggggccgggcggcgcggacggctcaggcgcggcagggcagcggccacacgggcgtgcgcacgcgagggaggagggctcgactcggcgcggctcacgcgcacgcgcgcgcggcgcgcgggcagagcggagaagagggagagagagagagagagagagagacccggggagggagggggagatgggccgagagagattcggcccatcgaacccggggaggcaaattagacttttgcggaggaattgatttgggaaggatttggattcgggattgaactcggcgatagatcggggatttgagatctgagatggcatggacactagacaacaagcaaagaaacaaatttcgcaaatagagtttttaagagatagttttcccgctaggcgccacgacggaacgggcgctacaattggtgacggtgcggggtgggccgatcgagctgatggccacgtggtgcagagtagggaggaggtctcagtatacaagagccggagaaggaagaagaaagggagaaagaaggaggaagagaaagagatagacgggaatggataaggaaaggattgagcgagatagaggggaatggataagggaaggattgagctcccgaagtttggttttagccattgcatattagggaggcaccgggcttcgttttgtcatatagtgtcctcccttaaactcgtcattcctccggtgtttgaatttgatatcatatgtcaagcttcttcttcctcctcgagctccttcttcttttctccctagctagcaagacctcgccagtcttcagttggaagtctcatcatgtgggagtgagaaaaagggaagaggaagaggacaacactacattcatttgtctgtgttgctttctctccttcctcctagtaccaacaggccgatatctaatggcaccaacgagtatcaatgagtatcgaccagtggaaccgatagggtatcaactggtacagacggttaccaattgatactaatgagatgctgatggtacctatagggtatgagatctagtaccaaaacgagcatcaattggtacccatgggtatctagatctaatacctatttgatatcatatcgtccggacggaatcccgtggtatagcggtccaaattgtgatatgggtgcattgacattagcaatttttattacaaaatgaatgtggttggttgtcgctctataaaaccaacttttttttagaaatgcacgaaaatattcatttgctactttgatagggtaacaaactaaaagattttatagattatgcttgaaacaaatattatccgttgctcattaatcttgggtcttagtaactcttgaaactctcgaaccttcgtctattaagtgattgctatgggcgtatgcggtatgaacactcagaacattaaagattttactttctttcaaaggcatctactggagaccccaagcttcaagagctatatcatcaaaggttttggtttttctactcctcggtttttggagatacgcttcttaagggtaagtggatacctacaccctacgcaagcatactcatgtttgcttccacatagtaggaatatatgataccgatccgaccttcaacaaatatgaaaaccactatctcactgatgcgcatacatatgtgccatgactaacccaaggatcaaatccaagggtttatatgaggcgcaataggtaatagcatgggattgaacctagccacatggccataccttagttctataatctataatgtttagagctttcttcgatgattgacaatatgcaaatgagtggcaattgaaagaaggcaagagcaaatggtgaaaagtgctatgtgccacatgatagaaaagttaggtcgtaaatttttcatgtgttaagtgccctatgttgactcgatctcttggaagaagtgaagattatatgtcatgcatatgtggccaaccccatgtggattcatgcatgtgtttgtgtgtgttttgtgcatgtgtggtggagatgagctcggcaaatttgaggccatggagaaattacaaatattgatctcaacataagggtgtttttcagctggtgaaaggccatgaatgttagtctctttaaaagcatgggacaattttttttttagagaatggtattttttatctggtctctatacccaaccgaatatatgaagccttttaaattgagaacttagcccctcaaacaactcaatctaaaatttgctcatatggagatttgaactcaggacttggtgtactacttatgtcactgtaaccactaggctacatgcccattcgcaaagcatgagacaataagaacgttataacctaatatagtaagtaagccgatttgtgccacctagtaaggatagagcccatagaaatgtatactccacatagcatgttcctttgattgtgctagtgttaattgttgaatgacttgggcctctctgattgtcttaagttagcaaaacttattatgatatttttctagaacatggccgcctcatactagcaaattagttattttcttggatttcttgtatgaacatgcattcctctcaaattgaaatttattgttttattgtattttttggagcattttggagatgcatgtgccattttcattggtaggtcgaaacagagatatgcacaaaccagacatgaaatatttgaggcattcatgttttatatttcttcatcattatgatttgctccgagatacatacaaagtacctattgtttatcactgttggttggtttcaatacaccccttgcattgcaattgtatgtgccatggagttggtctaaacattcataattgagtgttatgttcaagaaatctcgggccacatcttttcgcttatacttatacttatcaatcaaaatttaaattttcaaccttaaatttgaagttgattttgggtttttttcatcgaagtttatttttcagcctttgcttttagatctctaaaaacacgtatataaaagttttattcacaaattatttttcatttgaaaatataccgtttgagtccgctcgatttgaacacagtatgtttgcctcagcgacatcaaacgatatatagggtttgttcggatcagctagacagtggctgtacagccgcagtgctgcagttgttttagtacaaatttacttggtagatcctgttggtgtggctgcagcgcagccactgctagctcttccgaacacagccataataaaagattttgttggtttttggtaagtaaacaagttgactggctgggtggatttacaatccaactccggctgaaatgattcatatccatatagaaattaagacgaaaatttaggccgagtataatgcacaactaattgtgtactttgcacaacggtaccgtaggaaaattctttgaagaggtaaactattgaattgaagtatgaaaattattgtttggagacgtgaattattggactgaagttgattagcgaaccgattgcatatgcactccgcacactgcattttccactagccacatcgccaccacatcatcaagtccaaagactggacagggccacgagcccacgacgtgtttcaggccggtccttctggcaccttctcccctctgcctgacacgtgggccccacaccatcacccaccaaattgaggccccacaggtcagtcaaaccaaaacccaatcttgttctcccatgcccctttccatggcccaccccagtacccacaaccaatcggagacggccattccaaacggtggggcccacttgtcagaaaatagaaaaaaatacaggaaaatatcctgaaaattttggtgcacaagagcggcgagccgtttgccttccctccaatctcttttctctcgtcgtcgtctcgtcttcccacctctcggattcccgagctccacacgacacgacccacctcggccactctccgccgtcggtggccagtggcctccaccccctccgtcccccggggaccacaccggcgtaacatcagccacacctccggcagatctttcccccgccgcttaattcacctcgtgcgcgcgcggcgccgctcgttgcctagctagctagctcggccgcaatctagtagtagtagtaggaggaggaggagcggcggcggcggcggatcctatgtcgggggcaatcgcttcctcgccggcggctactctcttcctcgctggctcctcctcctcttcgccgcggcgcaggcggagcagggtgagcggggtttggtggcacttgtatggtggcacggggctgcggttgcattgggagcggcggggtttggttcgggacggagccgtcgtgtgctcggcgtcggccgccggtggtgaggatggcgtcgcgaaggcgaagacgaagtcagcggggagctcgaaggcggtcgctgtgcagggcagcacggccaaggttgatacttttcctccattttttttagaaccaagcttgagactgttggcccacgtgtttcagactttcagatcgtgtcattttgatattttaactacttttcgtgatttgattatagtatgcgtgccagaacgtgcaattagttagtgcaaatagcgcagttacatgtagagccatgttgctagaactacagttgcttgatctagcgagctaggagctaattatttaccatttgttattcggaaatgttacctcgctgcactttttgacatgaatttccctatccaacttgtttagtatattccactacccctgtgtgacatttcatttttcaagttgataatgcttaaatgcttataactttgctgattctggttgagtgatggtgtatatgcattcaggctgatcatgttgaggattcagtttcatcacccaaatacgtgaaacctgccgttgcgaagcaaaatggagaggttgtgagcagagctaccaaatctgatgcaccagtgtctaaacccaaagttgacccgtcagttcctgcttccaaggctgaagctgatggtaatgcacaagctgtggaatcgaaggctgcactggacaagaaggaagacgtcggtgttgctgaaccgttggaagctaaggctgatgctggtggagatgcaggtgcagtaagctctgcagatgatagtgagaacaaggaatctggtccattggcagggccaaatgtgatgaatgtcattgtggtggcttctgaatgttctcctttctgtaaaacaggtatgcatatctaaactggaaattgggcctgaccccatcatttcccctttttgagcatgaccaatcaggcttttacttttaagcttaggcaatgttccttctaataactgctatcatgtgaaggtggtcttggagatgttgtgggtgctttgcctaaggctctggcaagaagaggacatcgtgttatggtacgtactccttcacatttgtctttgtttgattgtctcggaagagattaacaatctgtagtactagtatatgtgcaatccacaacgtaagagactaagaggtggtattttgattgttatatctgaaactcttaagtctcattcttttgatttgcgtgcatcatggaaaacaatcctcaaattgttaccctgttgtctctgtcagctattaaatgttgtttcacatatttaggagagaagtgtggaaatctatcttgtattcttgttagataacaatttttgagctgtatgatttagcatgcttgagatggatgacaattcttaagatagcatcttaaattgaaatgtagtaggatatgcaccgattgagttcagtggcttagttttaagtgatccaaatataagtggctatttcaattttaggttgtgataccaagatacggagaatatgcagaagccaaggatctaggtgtccgcaaacgttacagggtagctggacaggtaagaaaacattgaaacagttattgtgcaatgtgaaatgaaaagtttaaaggttcatgatagaatctttttttttctgtgtgtgtggttttcaggattcagaagtgagttattttcatgcttttatcgatggtgttgattttgtgtttctagaggcccctccctttcgacaccggcacaatgatatttatggaggagaaagatttgtaagtcccaatttttctatagcttaattgacttacaaataagttccttttaaatcttctgtaaatattttttgcacaattttatcatttgatggcaggatgttttgaagcgtatgattttgttctgcaaagctgctgttgaggtaacttcccattttattgctactagtctataaatgtactccttacagttctgttagattcgcagctcactccaccacgagtgggccacccaggtctcaccaccatcaatttccagtgggactaaacacaataatttcttactacagtccacaattagaatttcgtacaccagctggtcagtcgatgcatatccaagtttcttgcagcaagctgtttatgcacctttcactacttcgtagcaaacagttaatactaaaattttgatgtttgacaattagaatttagtacaccatctagtcagtcgatatatatctgagtgtcttgcagcaagctgtttgtgtgccattgactactttgtagaaaacacaagaacaattaatgataagattttcatgtttgttttagtttatgaggtgaatgagcctgatgttatgttctcgaataagtacaattcattcatctgatgaaacatttgcaggttccttggtttgctccatgtggtggttccatctacggtgatggcaatttagtcttcattgcaaatgattggcatactgcacttttacccgtatatttgaaggcatattaccgagataatggcttgatgcagtatactcgctctgttcttgtgatacacaacattgctcatcaggtttttcacctagtcttattctgcaatttcattcttcgaatattatctgaaccactaatgtacttgttttcaagtgatctgctcaatggcatttgtattttgcaagtgtttctccttttctttaataagggccatacaattttaaacctggtattcagataaagtacaaaattcagttcagagttgtgtactggaatacagcagagtgcacctgctattttaccctatatgtagaaaatataggaaatttgtgtttatttatgacaccagttttgttcttacgaagttgaattagttattgattttgcctcttgaaagataattgactatactactgtcatagtgacaccaatttagttctaatgaaagttaaattggcttctatttattttatgattgcgtttcgcaatgtaattcaatcttgttttcccgcttgtcatccgtgggcatttaccttgatgctaatctcttatagatgtttcatgattttcttctttcagggtcgtggccctgtagatgacttcgccacgatggacttgcccgagcactacatcgatcatttcagactgtacgaccccgtcggcggtgagcacagcaacgtgttcgccgctggcctgaagatggctgaccgcgcggtcaccgtcagccatggctatctgtgggagatcaagacaatggacggtggctggggcctccacgagataataaaccacaacgactggaagctgcagggcatcgtgaacggcatcgacatggccgaatggaaccccgaggtggacgagcacctgcagtccgacggctacgccaactacacgttcgagacgctggacaccggcaagaaacagtgcaaggaggcgctgcagcggcagctgggcctgcaggtccgcgacgacgtgccgctgatcgggttcatcgggcggctcgaccaccagaagggcgtggacatcatcggcgacgcgatgccgtggatcgccgggcaggacgtgcaggtggtgatgctgggcacggggcggccggacctggaggagatgctgcggcggttcgagtcggagcacaacgacaaggtgcgcgggtgggtggggttctcggtgcagctggcgcaccggatcacggcgggcgccgacgtcctcctgatgccgtcgcggttcgagccgtgcgggctgaaccagctgtacgccatggcgtacggcaccgtgcccgtggtgcacgccgtgggcgggctccgcgacacggtggcgccgttcgacccgttcgccgacacggggctcgggtggacgttcgaccgcgccgaggcgaaccggatgatcgacgcgctcgggcactgcctcaacacgtaccggaactacaaggagagctggagggggctccaggcgcgcggcatggcgcaggacctcagctgggaccacgccgccgagctctacgaggacgtcctcgtcaaggccaagtaccagtggtgagctggtggtatttttcgcgacgcctctggatcccgccgtggatgggcgcgctttttctctagggcggctctgcgtcggagacgctcagacgcatcgcgcgcgttcgcgcccacacgatgactggcacgctgctgctgagacggcggcacgcgatgccatcatgccaccggacggtaggagcaacggtggaagtgaactgtactactggtgctacactgctactacatgagatctgctcttattggtcacgtactcacgttcacgctgaattaccgaatgtgttgtgtcttgtgtgtgtgtgttaaaggcattgtcctggtaaatggtggagacgagatggccgggtcgcgggagttatatttgtatatgttgccagctttctgagtttttcaagccagtgcggctcttcagtgcaggttccaagcaagttcagtgccggatgttaaccatgttctgaatcttgtcttttctttcatataagcagtgaagcacagggcttctactgacactaccatgtcatgctgctatttggaactgtgttaggggataggaacaccattaaacaacccgggattcgcgcgctcgtgttaatgtcaatgactaaatgactgtgttccaataattgccatcccaagatactgcacgtacaaggaagaaacacagccggagacatctcagtcagacggccattgcggctgctagctcagtagtaccaacagtagtactctatccgttttacgatataagactttttaatattatctatattcatatatagatatcaataaatctagatatataactaaatatatatatatgtttatggtaatgcttaggttgtgaaaaggagtaagtagttttttttttcgcctgagcctgaccacaattaagcggcctaccaaacacgttaacatctcgcatatattgctcctactatcacacaggctgtcatacgcatgtagtagatcctagcctgggtacctagctagtactggctcgcatggcaccaacacaagtcagccaaccgcgtgggatgcggatatggctaaaaacacaaattgaccacaggtcaacaaagcatccaaaggctcacatggcagccataaaccaaaggcaatacttacccagctataaccatatgcaattatctccgataaaacaatgttacgcagcagctagcagctttgcataaatatcagctaaattcagcgaagagaacgtgccaatcgtaaacagcgccgtcttaccctagatctggaatatgcccatgtccatgtacatccaaagcccgattcaaccagtaacagtgcgcccattgccgtcatggccattcatgtcttaaccaccactgcaccaccacttgctctgctgcctcctcaatcaagtgtctgaaactgcacaagggccaggaagcagcagcagcaatgcaaggtagtagtacatcaatattgcattttgttccttctgatcctaccagcactagtgttcttgacttcttgtctccgactccaagaggcacctcacccgtgcacgatcgccgattgcatgcaggtgatcttgcgttgcgcgccggcggtgataggctcttggtcgccgacacggtggccgccgtggtggagagcttggtgcaggcatggcggcaggtgaggatggagctgctggtgccgctgcttagaggcgcggtggtggcgtgcatggtcatgtcggtgatcgtgctcgcggagaaggtgttcctcggggtggtcagcgcggtggtgaagttgctccgccggcggccggcgaggctgtacaggtgcgatcccgtcgtcgtggaggacgacgatgaggctggccgggcgtccttccccatggttcttgtccagatccccatgtacaacgagaaggaggtaacatggctttcaatcagttctgaactctgccatttccgggaacactgcagtgctctgtcgtttttttcagaagagcaaagtgataatccccgtttttgtcgccgcattcagcatcgtgttcagatttacatgcattaaacatttaaaattttgagcagaaatgcatgattgattagttagcatagaacaggcaattcttggctgtaggattcgttcacgggggtaaccttagctccacctgacaaaaacagtgaacaatgcaggtataccaactatcaattggggcggcatgcaggctcacatggccggcagatcggttaatagtacaggtcctggacgactccaccgacgccatcgtcaaggtgggaccatcgaatcctgaaagttgcccaaccaaaacgaagtaaattttggaagtaatcaactgacaaagtaatctgtctgtgtgttcttgggtcaggagctggtgaggaaggagtgcgagaggtgggggaagaaggggatcaacgtcaagtacgagacgcgcaaggacagggccgggtacaaggccggcaacctcagggaagggatgcggcgtggctacgtgcaggggtgcgagttcgtggccatgctcgacgccgacttccagccgccgccggacttcctcctcaagacggtgccgttcctcgtccacaacccacgcctcgcgctcgtgcagacgcgatgggagttcggtgagtcacctccgctttgtttgtttgttttcggggcaattgggcaggaaagaaagtagcctacgctgctacagcactgaccatggtacggtgtcgttattcgtttgcgccactcgtcgtagtactacgaagataatgctgctgccggttgtcgtcttccatccacagttgattcgaggagcagttgaagacttactgtactgtgctactaataaacctcgtgctctactgctctagtacagtttctgggtagtgatagaagtactccctctgcctaagaatattgtaatttctaagtggatggaacgtatcctagtcagagactcagggctccccaaatcgttttttagtggttaccagttacaaccaccctatgatttggcgattaccgcgatacccatgcggttatcacataccgtggtttcaaaaactgacaaggttaccgcacgtgataatcacgaaaaaccttgaccataatactatacaaactctctatctagattcataatatacgatatgtcccatccatttaaaatttgctatattttaggatggagatgtatgaatcttagccgagctaaacaagatgggcccagtgctagtgtccacatatggcggcctagtcggtattttagagacagacggcccatccacccaggcgatctcaacatctttgtcatgccaacttttcctctctttttttttgcagtggaccccatgtgtcatcctctcattatttttgccgcacattaccaatgttttagctaggtggtgttgcaatgtttgataatcaaccaatgaactaaacatggccgaagctcatatcaattattctaaatttttgaagtatgagagtgcttgtcatatgctgagagaaattctgtttaagctgccttgcagtgaatgctaacgactgcttgctgacgagaatgcaagagatgtcaatggactaccatttcaaggttgagcaagaggccggctcctcgctctgcaacttctttggctacaatggtatgatccttgctcgcctctgccactgcaattgctccttgctttccttctcctctacaagtttttcagaggttttgagaattttatatgctcatgaacgcatccaggaactgctggagtgtggagaaggcaagtgattgatgaatccggtggttgggaggaccgaactacggcagaagatatggatctggcactgagagcaggactgctgggctgggaatttgtctatgttggtagcattaaggtatttttacctcacttcagcagttcagttctaccatgatgacatggcaatccatgaacaaaaacattagcagattaattggataacttgagagtttgcttccaattccaggttaagagtgagctgccgagtactttgaaagcctatcggtcccaacaacatcgctggtcatgtggacctgcactcttgttcaagaaaatgttctgggaaattctggctgccaaggttagtattattttctcaagttgcacagcaccctggaaactgatgcatcgaaactgtatttgactcggagaattattgcagcattctttcttctagtgctagaattacctgaaagcccttatattcttccattgttttccaacgcagaaagtctcgttctggaaaaagttatacatgacatatgacttcttcatcgcacggaggatcatatcgacgttcttcacctttttctttttcagcgtactgcttcctatgaaagttttctttccagaggtgcagattcctttgtgggagctgatcctcatacctacagctatcattctactccattcagttgggactccaaggttagatcagtgctgtttacccttttttgtgtgtgtgtcaccagctactatgatcaaaaggatggtacatctcatgaactccatgtgcttcaggtcaatccatctgatcatactgtggttcttatttgagaatgttatggcattgcaccggttgaaagccaccctgatcggattttttgaggctggaagggcaaacgaatggattgtcacgcaaaagttgggaaacatccagaagctcaaatccattgtcagagttaccaagaattgccgtttcaaagacaggtaaattcttatatgaatataagaatcactttgaacttgatctgtgccatgagttatgcgctaatttctccatctgccggtgcttcttaggttccactgccttgagctattcattggtggatttcttcttacgtctgcatgctatgactacttgtacagagatgatattttttacatctttcttctgtcccaatcgatcatatattttgcaattggatttgaattcatgggcgtcagtgtctccagttagatcaaggcagggcaattgcaagatctgctccagaagcaggatccatgttaaagcagtcaatggggaactcttgtgccttgcatgtgacaggaaagctcaacgctgcggcaattgagggcttcaacaaattgcgataagcatatgggagataagaacacattgagcaagaagaaaatcatctagtattgtcaacgtatttaataggcaagtgctatctttagtgaagagtagcttcgcatcttatgtaacttagcatgttaatagtgacaattatcatttcagagctacagatattgtagcacgacatttaacacctatgaacttcaatggaatacatttacgataacaaaactggaggaaactatacgctctaaacccgatttcaagaagggggaaatctactgccaatgtactaatacagtgtgcttggaatcctacagtacttcgcaattctgatttgtttgtgttcataaaaatgcgctgaaaatatttgcagcagaccaaggctgtgtttagattggcccaaagtttggaatttggttgaaattgaaggcgatgtgactgaaaagttgtgtgtatgaaaggtttaatgtgatggaaagttggaagtttggaaaaaaaaactttggaactaaacacacttcaagaactcactaaagtagggtcaaaagacattgaaataacatctaaattggtcttttcgattgatgtgttgctgataatcagttagagaagggttccaagatgaataaaaacgaagagaactgggcgaaacggaaactcaccttgtgggttgcggattgcaacacgagggccgccgggagcctcaggctgggtgaacaagacgcgtggggagaggaatcgagttgagcacgccgcagagacgatcgagtcgccggtgatggccaccgccgccgccgccgcggccaaactgtacttgtagggtgtagccatcaagaagagccgagacggtggagcagttggctcttgggccaaaactcaggcgttctgatggctttgcattgggctattggagatttgatgggccatatatatcggattggaataagttcaagttaggtcccttaatttgtcaacgaattcgattttcgtccttcaaccggaaaaccagatacaacaggtcccttaattgtcaaaaccggtgcaaaataagtcccaaggcggtttggatggtggttttcgctgacgtggcgcatacgtggctaatttgactcgttcttcgtctcacatggcattaacgtgatgcttacgtggcaatttagttttgaaaatgataaaaacatcgggcccacatgtaagttacacaaaaaacaataattaaaaaaggcggggccaacgtggcccccacctgtcaatctcactcccctcttcttcctcctcactcccaatctcccctctgtccgtctctctcctctctcctctctcctctctcttctctctcgggcgcgacgaccgacgggcggcggagcagagcggaccgcgggaggcggccgaagaaacccacggccgggagcgcgaccacgtcgacgcgccccgtccgcgcgtcgcatgacaccctgggccaggcgcaggcgcggtcggcatcctccgaccacggcgccaataggccccccgggtcggacacccccgacttgaagaccaccagcgcaagtacgtcgtcgttcacggcgtccgctgcggcgaggatggcgacggctggacgacatccgttcggcacgagaccggcgtcggcttcagcctgcatcacctcgagcagcttcgtaaaatgctctatgagtagaagtagcatttagcatcactacatcactattagatatgcttgctgccttttcatgtgcttgacctttgaggtttgagccacacgaacatgttatattcgatccagccaacatccagtcgatcccactggagcggagacagactacggccttgacccggcgaagctgctcgaggtgatgcaggctgacgccgacgctagtcttgtgcccaccaacgtctgcgccatggtggactcctccacctcccgctgcgacgcggccgatgggtcgggctcccggcggaaggggttggcctcgagggagaaaacgaggcagtcggcgcggatgggcggactccggctgcgtcggcgggagcagcaacgacgtcggcggcggcagcgggcgctcagaagccatgggggactggagaggggagagagagttgaggagagggagatggggagagaggaggaagaaaggggggctgagaatgactggtggggccccaccattttttattaatttatgtgtaaaactgacatgtgggtcccacgaagttttttttttttggtcgaattgccacgtaagcgccacgtcaatgccatatcagatgaagaccaagtcaaattagccacgtaggcgatacgtcagccaaaaccgccgtcaaaaccgccgagggacctcatctgcactggttttgacagttgagggacccatcatattttctggttgaggaacgaaaatcggattcgttgacaagttaagggaccttaaatgaacttatttctatcggattaaaacctggatgcaaacaggcccgtctccttatggcccaatagggacccaaccttccgctatcctcggtgaacccgaggcacagagcacggtgcgatgcgagtatcgtgttcggacttccgacggaaccgacaagccacaaggcaacggcaacacgcgaccgtcggatcagttgatacggccacgaaacgtcgccgcagcgctcgagatcgagtccgacgagacgacgacgactcctccctctcggctcccgtgccggacgaggacgcgctggctcgatccatggaaaacgtgcgcttcggaatttcctctggtcttttggcgtactcttcgtcgccctttactgatgctccgtactcccttcctcttaaataaaacccattcctaacatcccaatataaaattagtatagtgtgagaataactaaaatacccttaattattaaaaaaaatagtaagggtgatagatagataaaagatattaaagggataaaacttttcgtttgagattaggtagaatgatagaagttggttttttatgggataaaatttaaactctagaaattaagttttttttaagatggagggagaatgccgtagcccatcgcactgtactccctctgttgagtatagtactgctctcttcttaactacacattcttaagaaaaaatattgatccaattgggcagaatcaagagtgtctatagatcacacctgtataattgctcactgacagtatcaggttaacgtcgcgcgtacattttaccctccaaaagaattcagatcaacaccaccacccacggaaaaacaaaggtaaaaaggtacaagtagtattagtaaaggcacaaaggcataccccaactaaccaccatctcacagtccacggcgacgcagtacacccagcaagtgggaggcagagacatcgcaaagatttcaatgcacagtagctgtagcatcatgtgcaccacgccatccgtatctcctccatgcggctgcaggctcgcatactgggttcagtgagacgagccaccgacactcgcacgttgcttgccaccaccaccatccctttcgtgtgagccgagtaaccgggacgtgtggcctttgtgaccgccatgtctcctctccgctactactagtagtacgaccaagcaaggggaagggaaaaaaaagagcccatcaatggcgcgcctgaccggcgtcttcctgcctcttttgtgaatcgattcaagacgccgcatgcaaaagcaaaacaatcgcagcatctttttcccatgccttgtatatgttgtcggttatctcctcagcgaaacctcctgcagatgccaaaagatttacctgtctgcaggacagtgttatctgttgtgcccggtatgtgtccaacatgctgagggggtgttttggaactaggtaacttttagtctctctcacaaaagcataagatagtgtttggaaagtagtgactaagctttaatctctctcacaaaaacataagtccctatagaagagactaaaatttttgtgagagggactaaactctagtccctccttacctaccctagagatttatgtttttagtttagccctctctcccaaacacccctagtttgttcgctgttgcctgaggttggctgatcgatgaccttgcaggattagcaaaagttttgatcggcctggtttgtgcatggcacgttaaattcaaatgctctactagtagtactcctgtactactcaaaacagagtctcttatctttgtcgctaacagcctcgttaatcttacacttgagtgctactgctcgacaacatcaaagaatccaatgggtagctcgctggcaatgacggtctctggtcaaaaattgggtcagagattggaatgacggttctagaaatccgcatcgagcggaaccagattccttgtttcctgaccattgctccgagtgttccactttctggagcccaactacttgagctctgcaaccttgcaggcacgagttttaccggtaagttgatgactggctggagtgtttgattgcttgacggtccgtgcaggaatctctatggctgtgtttgcaaccccagttcccaacccttctccctcgttttttcggacgcacgcttttcaaactactaaacggtgtgttttttgtaaaaattttctatacgaaagttgcttaaaaaaatcaaattgatctatttttgaaaaaaaaattagctaatatttaattaatcacgcgctaatagaccgttccgtattccgtgcgtgggtgataggttctcaacacccaccaccgaacacacccatagggatctgtatgccttctgtatgtaggagtagttctagtatgtgtatcaaacagtaggtgctctccgtatacatagtagtactacgctactttatacagttcatatcctgatttcctggagactggactggattagtacacggtttgagccggatacaaccaatgactaaaatggagcagcctacatacgcgcggatacaattgtgtatcaaacagtaggtgctctccatataatacgtagtagtactatgctactttagggcatgtacagtggtttttattagcggtctctctttattactccctccatctattttttaatagttacatttcatcttaacacacagaccaaggataagtaattctacttatcattcatttaagcatgctactattcattcctcgtaaacaagcgattcattaatatttacatttctcaaagcccatgtagccaatcatgtgtggaagaatggagagtcacgtattaaattcgagaaaatcattaagatgataggttgttggattgaaatatgcctatcaaaaataaaattttcagatttggaaatatgattatcaaaagtagatggagggagtatcatgcaagcatatttggtgacgtggaagagagaggaagaaggaaagagaaagatggttgctacgcatgacaacggtgtagagtcgactcttagcatttattaggaaatttttttattgcattgagtctaataaaggaaagatgactagtaagaaaatattttggtacattaatgattagagactgtaacttaaatattgtaacgtgatagcctctaattaacgtagagactttaccgttctctacttttgtacttgccctacagttcatatcctgatttcctggagactggactggagtagtacacggtttggagtcggatacaaccaaaccgtggatacatacgcgcggatacaattgtttttgccaatcccaaaatccaattgtttacagattggtattgacatttcacatacacgccggcgactgcacatggctttaacggcaatgtgttggtgatcggactcgtgaagtcgtgagtcgtctccccgttgctgccgtcgctccacacgaacaactcctacattcggtgagcccatgacacgcagactgaccggcgatgctgcctattgtcgccgactcgccgtgagccggtgaacactgtacatagccttgacgttgctcgctgccgacggtgcgttgggtcaccgcacttctttctctcgctcggttgaaaacttccgccaacgccgggttgttcatgtccccggcctgcggcgcctgtgcgcgtcgagcagctttggacaccgacgcgtctctcgtagaactcttgctcggcggtctaaccgagcgaacacaggaacgtaatccggtcattcgttttcccttcacgcgcgccacgccgctgtctagtctgtgtgcaacgaccacgcagcgccgtaccgcgcactacgatcggcacaagagattgatgcgcacagcgaaaacgagcagtacggtgcaatgggcctcgcacgagcagatgtacactaggctcgacacactcatttgcacggttgttgacgcagcaagcaaatcatgtacggcggtttcttggatttgtttcagattgtttcagattgtgatacggtggattgaattcaaatgcattaatactcccgcataagagaagcacgagtaaaaagaaattgttcataagcagcacacagggcataccccagatgcctaaactgtttggcacccccaaaatgaggtccggtactggggtccggtacagacaacaaccaggcaaaaccattactagcagaaggccattcccattaggcccaattttgctattttggcgggtgatacaaggcggcctctgtcaatcaagccacagccttaccaccacttccaatccctagccaaaagataccacaaaagctcaactaatggtacttgtaacaaactaccactagcagtgacaccagcacaaagcccatgttgatactaggccaaactacccactaaatactttcccaagaaccaaggcgagactgagtaccaatcataaaacaatggcacttcccagcacggtccagttgggagtactactgcaactaccacgacgatgctcgagtaaaattgagcggaatcagttgaactgggccccgctgaaggtctggccgaaggaccagccacgggggacggcgttgttggagacgacggagcggccgtcgccggtggtgacgcggaaggagagcgcctgaccgtcgaggagcgcggcgctctgccagttctggccccagttgcgcgacagggcctgccacgccgccgagcgctccgacttcacggccaccgcgtgcacgtcgccggcgccgcccacgttggtcaccagcaccaggttgaagtaggagtgcccgttgatggtgaaccggatcccgcccttcttctggcaagccaccctgcactcgagagcacgcacgccatggtcagtaagttccggtagatccaagaaagcgaaacgcgaaggcaagaaattgccggcgttggctactcaccggcggtaggagacggggacaatgccggccttgaagagagcgatgcgctggaagacgggctgggacatgtcgaagtgcgcgcgcggagggttgcaccagccgccgtcgtcggacgggagcgcgttgttcggcgggcagaagttggtggccgtgacgacgaccgagccgggcaggcacgagtggctcccgccgccgccggcgtcgcagcgcacctcgaagcacgcgccgcagctgaggccgttgttgaacagcgccgtgctcagcgccgccgtgttcgtcccgtacccctggctgtagaggttcccgtacccgcacgcccctcctgcacgcgaccaaaaacgcacacgcaaaacagtgagcacaacacgcagatgtaacaacatttcagcacagtgcacagcgagaaaaaaacgtacccatggtgcccgacgcgtcacccccgccgtagaacgtggcgtgcgccgacgaccacccgccgccgccgagcggcgcgtgctgctgcggcccctgtccctggccgtgtccgccgacatgcggcgcgcgccatcgcccgtgcccgtgccccagcccgtggtgccccagccaaagcccacgggacaacgccggcgggagcagcgcggccacgaggacaacagcgaggacgtctcggcgggacgacattgttgtgacggggatggagtcgtcgcacgcgacggggtgcgctgcgacgagagcgggcggaggcgtggagtgtggagtgcagcgaggttgttgggggcggggataaatagaggggtgcgtggtgggaacggtgaaacgaaaggaacgggtttgaaacggcgcggcgcagtagggtggggtggagtggagtgcggcgtaggccgcggcgtacgcgggtggggctcacagcgtgggtgcaaaagctcgcagctgctccggcacgtagggacacgagatttcgggggcgttgggaggcgtggcgggagtgtgaaaaaaaagggatggcgtggtggggtaataaagacggggaagctgccgccgcggcggtgcctttggaagtcgaaaccgagcgcggcgagcgggagcactgcttttgctttcttttttttcgccgccgtcccgtactactaccaaccaaaatcgctgccctccgcccctcccagcttcaaaacctaacgcggtgatacattccgcaaatgttgtcacggcaaagcttccatctttactctaaccctcaggagtacataccctaacccttacgtttggccatacaagtcttcttcacatacctgcactattctaacggagttgtcagctccaggagctgagctacacatccctccatattttaaggcaagggtttataaatggcatctttgactgaaccacgggacaacagtccacacagcagtctgacgggttttactgcacaacattattccctccgttaaaaaaaaatactcaactttcaaaaaaaatttgaaacttttaactttttcatcacatcaaaacttttctacacacataaaatttcaacttttccgtcacatcgttccaattttaaccaaacttctaattttcgcgtgaactaaacacacccttacgaggttgagtttattttttagacggagagagtactcattcacctttattttcaaatactccctccatccacaaaagttacacatattttatatttaagtttttctaaataagttgttcctattttagtctttatgcattgaagacttaaattaaatgaagagataaattaaacatttgattagaaccaaggagtcatctaaatacttattggttggattttgtatcatccaagacgatttaatttcttcttaatctttgtgataaaactaagtaacttttgtggatggaggaagtattacgtaaaaatataatgtgaccatgagtaaaaattaaaatcagttcattctttttacagcgtaagaccctatttagatgagactaaaattttcaagtctctatcacataagatatttggacactaattataaatattaaacatagacaattaataaaacacatccataatcttatactaattcacgagacgaatctattgagcctaattaatctataattagcctatatgatgttacggtaaatattctctaattatggattaattaggcttaaaaattttgtctcgcaaattagtttttatttatataattagttttataactagtttatatttaatactttaaattagtatctaaatgtatagactaaaattaagtatctgaatcaaaacaacacctaataatattcgcagtaactgtgtggcaggcttatttaatgcttccggtagaaagtatccatatttaatcattaatgtactccactctacttccacctctaccggttcacgaagacatgaagtccaattcattcatgggccaattggctaatgggccaaatgggtgtgcttgctgctcacccaacacgaaaaacggagcagatcattaacacgtgattaattaaatattaactattttttttaaaaatagatcaatatgatttttttaaaataacttttatatataaacttttttaaaaaacgtacattttagcagtttaaaaagcgtgcgcgtggaatatgacggtgagaggttgggaacccttgggtttgaacaaacccaaggcctggtttagttcccatctttttttttcaaacttccaacttttatatcatatcaaaaatttttctacacacaaacttccaacttttccgtcacatcatttcaatttcaatcaaacttacaattgtaacatgaactaaacacaccccaaatataaaggcgtacagccatagcggcatagtagtgataactgtgagtagagtagcataatatgtaaatactctatccgtcccataaaaaaccaatctaatactaggtgtgtttagttcacgttaaaattaaaagtttggttgaaattagaacgatgtgatgaaaaagttgaaagtttatgtgtgtaagaacagttttaatgtgatgaaaaaattgaaagtttgaaaaaaaaaattgtaactatacaagggcgtagtcaaaatacgtgggtagtatttccatgagagcattccgtttcaggtgccttcaatgctgaagggaagttctggctgaaccactgtgaatccagcaaacaagtcatgtgctctttcactcgtcagagcggaagaatccaaaaaaggccgagagaccgtgggctgctccgctgcttgcttgcccacaattgtgtaaccactctgtagatcggttggttccgtcttaaatttctccctcccccgataaaaaaaaaatcacaagtagaggaaagtaggaaggcaatattcatttcgtaagatggtggagcctattatgtagttgtaactgtttgctcaataagtggtactcgctgcggttttattttaattgacgctttgaacaatgacacgctctataaaatatatatttaaccttatttttctattataatatatacaataaataaatgcatgtttacttttattatagtgttttgaaagacaaatctatatatgtttttctagtttctttaaattaaatatttttaaagttattgatggttaaagttataaaagtttaatcttaaccttgtccaaaacgtcaattaatatagaaccagagggagtatatgtctacatactatgtaaatgtaaatatattaattatagagtaaattgcacccacggtagattaacttgttaggtgggtgcaatttggtgtaagaacttgagaaatgagcggtcgagtgcaacaacttggctggtatgtgcaatttaatataagaacttataagatcatataaatgcaacaacttacaaggtatatatgattttgatacaataaattaagaggttatgcggcaacttaatagtatttttttatatagattcaatttttaagtacttattttgacagtatactaacgtgtatttgtataagcatatttatatttttatcctaataactaataactgaaagtcaattaaacaggatatagaaattattatattccggttgatatttgagaaggtcaagaaaaaaagtcttaaaaggtaattggatgtaaattgtatgtgcagtataattcttaaagattaagttcaatattataaggtaatatccgtaggattactatgtaatggcatattgacaacgtggaaaaaattcacctagcatatacttagcaaagttgatgcataaaaatactaaattatcaagttcttgtactagaacgcacacacttatcaagttgttatatttggacgtttaattcttaagttcttgcactatatcgcacaaacttgccaagttgttgtactacgggcgcaatttactcttaattataaaacaggagagcttgtctacatattttcacccaaaaaaaatcaatcagatttgcaacaatgtgataataaatgtccttcgtagtttatatgtagtcatttatctataagccatttttacaaaaacaaaaacaaccaccaaccacctacaccaccagagtttaccaaatcgtgcggttataacgtatgataacattttcggttttactaaaccacagggtggtgataatcccaccctaaatagttcggtaaaccctgaccaccacacggagcctatctccaccagaccaccttacagacgatgcaacaccactgggtgctcactcattcccttcattcctaacaatacattaggtgcaaccctctgtgtggtctttcgtgccctctcgctagcatgctattcacataacattatttatttttcatgtccaatctcgttcgattccagtgtttttcatatgttccacttaaactcacattttctgttttcatatattttttcattccttgttcaggtcagaattatgtgattttcttattattccttttgtttcattctgcgattcaaaggggcatgagtagttatgtctcaatcatacacgagctgccaaagcaataagctttggtttttttttctctagaactatagagtagaaaaatttccacatttttccttttcctcgttcctatgaatcaatggtacgagcattgatttattttttaaagaaaacctctaaaaaattggcatagagttacatcctctatcgtcacggaagaaaaaaactgaccaattttattaaggaaaaacttgccctgcagtcatgcaactgtgaagttaattggtgagtaatcgccgaaaacctccacggcgagaacacacttcgaggcggcaagccaccgcaactgatgacccaagaaaattgagacacatcacgagtcattgttgccatgttttaaagtcaaagaccaagcaacaccgactttcctacgttgatccacaccctccacggtcaacaaccgaaaaaaaaaatcagcaaccacccaaagcgctactccccttcgtctaaaaaaaaaaacaaaccctggtttccgtgtccaacgtttgaccctccgtcttatttaaaaaaattatgaaaaaaattaaaaagacaagtcacgtataaaatattaatcatgttttatcatctaacaacaataaaaatacgaattataaaaaaaaatcatataagacggacaattaaagttggacacggaaacccagggtttgtctttttttggggcggagggagtaccttctaaggccgaatttagttctaaactttttcttcaaacttttaatttttccatcacatcaatatttttctacacacataaacttctaacttttccgtcatatcgttctaatttcaaccaaacatccaattttagcgtgaaagttagaagtttatgtgtgtaggaaagttttgatgtgatggaaaagttggaaatttgaagaattattttggaactaaacacgtcctaaatgaaacttctagagaggacatttgtcaactcttgctccgaacaccaggactaggttttcacccgaataaaaagggagaagacgacgttcatatgcaccaacatctatcgtcgacaccaatcaaaactaggacaagattttcacccaatgtacattctcacttcctgtcatccatgccctttacaaagtgtccctttgccgtggctagaatacgaggaattgaaattatcgttgtcaagctcaccacaggtaccatctttggttgcatactatagttgttctaataagcggcaactacgctatcatccgtaggatcccgattcctacggcatttccttcctttcgaaaagactataagaccattcacagtgcgtctatgtggcattcaacccccgactagtcacctaggagattcccctccacgtaggcaactagcgtggtcctagaaataatgattaccgctatgaggaatgagtagcattgtcagagaaagcatgagagtaagtagaaaaaaaacacaaacacacgtaagagagatagagagagagagaggaatgacgtagtgaagtgtcgcagacgacgatgccatcaccgccgagctccatgttccatcaccgttgggcaacatgtttatcgccgcaagctccatatccaccgtcgccccctcgatctacaccgctgaagaataaggaggcttcctcgtattggatagcttgcataggcgacaaggaacggcgacaactggagttggaagctagtggagggaggaaggcaccgacagtaggagggagggataatgtggcgtcgacaccggtggatggaggaggggagaaatggtgccatcatcgccgctagctggatgcaatggcaagaagtgaaaagatcaggtgaggatagggcgtgattttatattatttatagattttagggtgttgagtgtaaaattttataccactatatgtatatatagtagaaaacagaaggggttgaaatgcaaaaatatctataggggtttaaggctacgttcgttaggactggttttaaattgcatcactgtcactgatattggtagcagaagtaacaaaggctgtgtttagattcaaacttctaactttttccatcacatcaacctattatacacacacaacttttcagttacattgtaccaattttaaccaaaacttattaactttggaagtaactaaaaacagccaaaattgccatgtcactggcccgcgtcttctgataacgtgtcaggccctgacgctgcaagctgcaacagcaacaaaggacggaaggagcacatgctgaccgcgacaacgtgcatgccagcatctgcgcaaaagatcatttgtccaacgcacacaggttccgacggcgaaaacactggaccaggagtccagaagaattcaacatgcccaccaaacccagattacggggatcactacccagttgttttgccaacggaaatgcgtcgcccgtgccacgaaatgataaaaaaacaactaaacaaacgacgaataatttgaaggtctacttcacatcaatctctacctcttcatgcccatgccttgtttggaacgggaatagtactacagattttacaaattttcgcaaggggaagcagtaaagggtgccgcagaaacgggatgacgggccctttggcagaaacgggagggggacccgtgactggcccccagcaccggcacaggcgtagtgaatgcacggcgtactacgagccaaaccatcgttgctcacacttggcgcgtatcctcggggcgggcacatgcgaggcgcagcgccagcgcgctgctgcaaagggacgcggcccggcggccgcgccatgtgtcgcgcgggcgaagcaggggaacgtgcaagtgtcctgtgccgtgcgtgacacggggtcccctcgccgcgtgccccacggtggtcacctacacttgccacgtgccccacggtggagtaactaacctaactgaactggaatgaatgctgtgggctggtggtgaacacgtcgcacatgcacgcaggactactactacttttgcaccccaagttctagagcaatggtttggtgtgttcggttcacgccaaaattagaagtttgattgaaattagatgatatgacggaaaagttaaaagtttatgtgtgtagaaaaatcttgatgtgatggaaaagtttgaagtttgaagaaaatgttaggaactaaaccatgcccaaggttaatagtttcggcgactgttggcggcaaccgagtgccacgtcctctaatagacaactaatctacaatgcatacaacaacaacacttctttattttttttaatcgagctagtgcctactccgaaggaacttgcccagtattttacgtccccatttatttttccattggttgttgtgagagcaaatgggcccatggtaagtgaaatgtagaggctcgcgcaaaaagccggcgactaaatagttgctcacttttctctctccaagttttctttcttggccacgtatacaaaaatcctatatgtaagcaggctattagcccattgttgtacctgctcttatggttcacaatcgacaatttgaagagttccaagctgcaagaaatcagcagacaggacacgggcccagcccaacagcaacgaaatgttaacagaaaaggcccatttaatatcttcgaggcatccagccatttctgaagaccagcccatctaacgtgtggcatggaatattcagccttggaaacctagcgtgatactgtagctcatattgctgacaaataacaatttacacaattagatggaacaacgaaaggagaggaaatatcatttacatgctactccataaacatgggggctgaggataaatgcagtagacaagcgagtcgtgttcaggtccaagctcgagaacccagcatccctgatgatttcgcctgtttctctggtgaggtggcacccgtcagagacaaactgctgcagaggattaagggcaccttgcacgaatcggaggaaggatccatctattgcacggggcaaaaggagaaggagagtcaataatgcacaacaacagaaaatctctaaacagaaatggtcttaagccatttgtgtgtaaaatgtgaaagagaatagcaggtggtaccaggcgcagcaacatgctcaatgaatatgtagagaccaccaggcttcaggactcgttttatttctgtacaattaaaggctctgagttgtttagctagaaaatgattattataatttaatatagatgaagtttgttgtctatgcaaggcaaaaatgattatgccaaaattcaagagatgcaaaaatattgtggaaatatacagacaagaacagatgtcatacttcagttatgtaaaaggggatgaagagtttcacttctttttcagataatggaaatagtttacatttacggtgaagagtttaacacaaaacggtaaacttcagtttaaacctttcttagcattggatggctcgagttctaggtaacgccaatttcttataattgggaaaacacaagacgaagagtatgaagtgtaaaagtatccgacacatcatattaccttgttcaataatgtgcatatttcaagcccagtgacagtgagtgcatttatttttttggatagaaaatcagtgacaatttcaggtagctaagaaacaatagtaaaattaaaatattcttgataataattttatggaatattttaaacatcttgcctcatggacatatctaaagattccatatgttgcaaagctttgcagaaattataaagagcatttgtactcagataagaaatactgttgttagaaaagaaacaactcttacctctcaatgccatttcaacgtcacttacagaacacattaccagagtgccaacaacagcatccattgaattgtcctcagctggcaaagcttcaccaacctaaatacaattacgcatcaaagatagttcacagaactaaaaagagaaatagtgcgctaccagaaggcaccatacccctcttctgaaggtgaagttcgaaggtggaagtccagcagacactgcagctgctctggcatactcctccatgtgtttattaggatccaccccaactatgttaacgccatcggcatttgcatagtacttgagattagggcctgttccaacaccaagttcaagaatgttcttcccagcagtcatcaattgggaaaagagctttgatttatactgtgcaatctgcaaaactcattattgtgataagatcagcatgatcacggcagatgatcaaaatcacatcacaatccctgagaaaaaaaacagtgataactttttttaacagggaagctaaaattactgatgaagatttaagatcatgtctgctactcgcagacactctaggtgcttacttgtgaattctgatatagtgatatctatggaaaaaaattcagatactaagacaaattaccgagttctgaaaatcaaacgttagagcttatacagattaacagatatgtgatcgaaatggtcaacatgtcatgtatggaaaaaaattaactctgatgtcgaattgggcaaactgagttgagtgagcactgagcaccaatacagttgttcgtatagacaaaaatctactagcaaaccacaagtttcagaatggcagagtagtggaactgaaagtctgaaactaggggaaaagcaaaaatacctcagcctcgtaaggtttcatgaacttgtccatggccgtggcatagaacttctcgtaccactccggcctggcagggtgcacccgctcaagcatcacctgcacaacaaccaaaaacccaagtacgggcagctcagaagatggccatgaagccaccaaacatggagggcctcatcagggccagggccggcaagaagcttacttcggggtcgacgggcgaggcggcgggcgacgggagggcgagcagggggaggagagcggtggccgaggtggagccgatgaggtggcgccggccacagcggcagaggggagggagagcagcggtggtgcacacgcggctggttttgacggtgagggatggccggctcccgaggccggtcgccggcgtgagcgcggcggcgccctgctgctgcatgccgtcgacgagcggcggaggacgggggcctcgtctttgtggtggcctctcgcttcggttggaaattgcactttcggaagcgaggaatacgtcagctgctgtcgaaggcgtattttcgggtttacttgggattggcggaatcaaagcccatatatatgtaggagaaggataggcccatcaacggatcaacgtgtgtgggctttcttcgtgtgtaagcaaattttgaccagaaaaatcgccgcgcccacttcttccgatctgagtaatggagaacacggaatagtttgcttctctgtctgcctctcctggagctgggcaccctgaacaatagaacacagagtttgattattctattctctctatgtctctgcatctctatgtgcaaactgcaaacacaattttgttaggggcaaaaggccaaaaaaacacgcggattgctattcgggccgtgtttagttgttttgggaaaaaaaattgatgtatacggactcacatttgaactattaaacgtagactaaaacaaaacaaattacatattccgcctgtaaacagcgagacgaatctattaagcctaattaatccatcattagcaaatgcaaattaggctcaaaagattcgtctcgcaatttacatgcaaattgtgcaattggtttttattctgtccatatttaatgctctatgcatgtgtctaaacatttgacgtgacgaaaaagttgaaagtttgaatagaactaaaacacagccttggacgatttttctgtagtttttcttcggccggattgataaacgtacgttgaccaaagcaggtgtgccaactggaagaaggtggttttctcctgcatgtttgacgttttgtcgacggagattcacctacctggcaatttctcaggtgccatcaaggttcagtatctgcagcattttgctccgacggaccaggtcatgctgtgcaagtttggttcgtgtgatcatgttggttatctgcttaactaggattatacaaatcttttgcacgtgctgttatagcattacattgagtaaattaaactacaaatatttttgtcaaaactattactcactttacttcaattagacatttcataaggccgccataacaataggtactatctaataacaaatctgcagcttttaccctctaggtgtgtttgacaagtggactacccaattaccaatttgcaacaatgcaagtattacatatgcgcctggcaggtagaagttgacaaactttgcatttctttgacaaaaatcattagcaaatgatgcatttttatgagattacattgaaaattgtagcaaagtgacagttcctacgtattagttcggtttctaaattttgctctattatatatcccttgttttatttactgtagcggtactttctccaagtaggggtaaactaactcgcgcaagagtaggcaaataatgagtttctaagagcatctccaagagaatggccaaataaccctccaagttcaattatagtaagtttgagagaagaaaaaaaaacactcgaacaacctctctatcctgctggccaagccatcacgagtggataaggagagggaggggcggagtggtcgtcattatccactccactcgcctcccctcctctctctctctccctctctctctctcactagggtgtcgtggcctgcatagatctgccccaaggcagtgtgaggcaccgaggccaccgcgcgcgaggtgttactatgggtggtgcccatggaggagacggagtggtgccggcggttgggtggatccgatagtgaccaaggttcgtctgcgtagataggcggattcagctgcgaacatagcgtcggcagctccccgcaggcggtaatgatggagaaagaggcttgcccctcctctccatccggtgatagcagcggtggtggtggagaaggccaacgtagaggcgaggtagtggccaagaaggaggctctgttaggttcttttagtgtttttggatgtttttagtgttgggtttgttcatgtattcttggatgttcttgaatgccgattgatatttatggaatctgatcggggcgaaggggaactgctcaatgcatcggattgatcgaaccgacttttttattttttgctttcctgaaacttcaaatgtgtcggttcttaaatcgaggtgttgcacgctggataccgattgcgaaatctggcacttataaccggtttcgaaccgacacctaccccttttatgtagtagtgtcctccttaaacacatgttcgactgaaactaccgaacaaacacatgtcgtgtgtgaacttaaagagatggtttaggattctactctggatctgcagaagtgaagaaaaaaaatattcggatgacgggaagagcacatcagcgatgagcctgctctcccagcctttgcccggctgtccggctggaccgccggagcttggccccatctgcagtctgcctcctccgctactgcagctgcttcactgtcgtctgcttgtaccgtttcatcaaacctgacaggaaaagaagctggagacgcaaaaggcgccgtaggtttagacaggagctgcacaactaggtacgtactatacatgattcgatcataggctgcctgccagctgaccgagacgtgatacgtgtcggaattgcaagagaagagtaccgtctctctctccctttcatttgggtgggcttcgtcttcacaatgccatttggcggctgttagtactgtgaaaaaatagtgatagagtgatactagtagtagctgttctatacgcgcgtacagtatcatatcatcgggcagattcttggccagtgcaagtacggttcagcatttacgttggtactccgtcttttacggcagagtagtacagtgtcactgtactggtattctggtactggtactaacacatgggatcttcacaaatcacaatcattgtccctgtacatttattcattatattccccatgcatatggtgtcaaggttcacaaattgtgctcctaagctagctctcaagtggtacacataatatactagctagcaaaccgcattaacataagtgcctaacagtagcattgtactacgaaatactactccctaccaggctaccaaagcatgggcgatggatcgtaacgttgtgaagaatctccggcacatcatttcaccgaaatccgggctgcatccacggcggggcacacacgactaaacgagccagccagctacgacgtgcgcgcgatgcaagcgcacggcgcggccgcggcggttcacatgcgcgacccgagcgagcctcaaaagcggcctacccatgcgcccatgcaaagctagacgccatagcccataggcaaatggagcagcggtgtgtgtgtgcagagatctcactctcctacgtacagtaggtgtactagacctgtcagcgtgccgcggcgtcaaatccatgcaggccagggggccgtgcggtgcgtgtcgcgctgcggcgatcgaacgtactgtacgctaaacctgcgatccatcgaatcgtcgatcactcgttcacataattaaaggcacatcttttctcctttattatagacacccaccaacctcaccccctgcacacacagtcgatcgtcacacacaacaactcagggcttgtttagatcccttgcaagttttttcaccctgttatattgaatatttggacacatgtataaattattaaatatagaaaaaaaatgttatacaaattgcttgtaaattgtgagatgaatcttttaagcctaattactccataatttgacaatgttgggctgcagtaaacatttgctaataaagaattaattaggcttaataaattcgtctcgcagtttacaggcggaatctgtaatttgttttgttattagaccatatttaatactttaaatgtgtatccgtatatctgataaaacattgtaaaaattttcacccctaaatctaaacactgccacagattcaaagtgacgaggaacatacggtgatcgatgcgcggttggactgatctgccccgtgccctgtactaacggcatataaatacagtctccatcgattcgaagctcgcgttgcattcagcgagcatttgagcttcttcagacattgcccggtgaatgagagagagcttgtcttcctactaggtcgactcttcccgtacgtgctggacttctactgctgctggtggtctgcagcaatggagctagtacggcatccaccgatgattcctaggccgcagtggtacgtacgctcatctcaggtcttgcatgtggagacgaggtgtattgctggttgtgtagccaaggatgacttgccggcctggtttgtgttcatcagcaatccagcatatgctgtattgccgtgtgtgatcgatcgatgcatggaccggcaagttattttctttggctacattacaacctcgtcttctcatgctagacctcaagatgatacacatgcatgagtgcaggatcagatgcagcgataggatatgatgtcggtgctgatcgagggcactacttgttcggtgatctctctcttaatttctcgtacactagctagctaagctagttcttccatagttccatgtctggttcaatgcaattgcactttcattctttgaggggagggggttgtcgatcgagaaggactgatcgattgcagatttctaacttgtgtcctatgcttcacgtacgtcgccgatcttcgtatcacaaatgtttagattgctgcattgtccatttcgtgtctagcacatagtattagttcagttttgaaccgattattaagtaacttttgcatagtgtacacaactaaaaaaaggggtacaataatatgcatgaactaactacataaactacactgaactaggacgatagaaatacaagactaattactactccactcggtcccatctgctgtcatatatatgtattttttcttttgagtaattttacagttcttgacaaggtatcatgagataccactttttctattataaatttgatacctcttattacctatgtattatgagatatcaaattttacactaattttttgttatcttatagtacctcctaaaaaactgtaaaattcctatttttcttttcagggatataggctttcatattggacaaatatctagtgaaacattttagttaataaatactgaataaacatcatagtattgaaactttaatggcacctatttgtatccacaggaaatcataagttcaaagtataaaaggagtatgttgataacaaattaatctgataactttaaaacattgagtacaaacgttttgcatcaattaacaagtgaaaaatgtggaaacaagtgatagcaagttaatgtattgaatggtgtacgttcagttaatacactgaagtaactgactataaggcacgtttagtgacttattagggccagcatgtttgaatctctaatttgatttatctttttcagcggcatgtaaaaatgagataagcaataatgcacataaataattcagtatcaattattataaactttaaaataagtttatctgatttttcaaagaaatttttttatatattttttaaaaaatatcatttaacagcttaaaaaacgtcctaattgaaaacaaagaagttgttctctgaagttaaaggaatgaacacggccagaaccatgacaaggacgtcgtaaatgcatactcctactaaataatgaagtactcctactacatcttttctttcagagtccaaataatgaagtactcctactacatgtttatgcatctgccgatctgcgttcatctgtgttatcacaaagacaccaaccagtacacagtaggcgatcataccagtatcctgtgtgggatcagcagctagtcctactccttgcagctttgcgcagcgaccagtgtactagcacagtacatcgcctgatcgtttcagtctcgatcacgccgctgctgctggccggtctgttcgcgccgtacgcatgcccatctgctgctcctgcagccctactccggctcgccgcgacctcacccgcacatgtcgggagcgagccgatcacgatcgcttgcatcagccatggcccagccgattcaagcctgtcgagagacctgtgtcgaaataactattgttagtctctgatgactgatgagctgatcgacggaatactacgaagttctgcaccctatacaagtagtatatacatgtgctacctactgtggtagtgtggtctgtactgtacgttgagtgcagactgattgctgctggttcgcggcctgtagtggagcagctcaagtatgatcagcggttcttcttcctcgatcgaatggccgtggccgacgatggcgtccaattcccagcgcgcgaccaccagcgcaagcaggccgaactaacggagttttttgggccagtccatcaccgagcggcccggtaaaggtagcccataatcgctaccattctgtactggacccaaataaagttggcccgacaccgtgagagccgacagaacgaaagcatattggatcgccacaatttggttgcgatctgacaaaacttccgtctccacagggcacgtatatccaccatggtgtaggtctatatcagtcgatttacacaatttatatattttggaagcaatatccaccatggtgaacggtacaggttctttgattaacatggagtagtacattccttcttttagcctacactacaaatgcaatataatgcattcatgcagacggagcacctatttgctttccttttgagtctgatgccaacatttacaggcgctatcaggcaactgtgtatcttgctattacacagccgctctgtacggtattacagaatgcagccgcatcgcgccatgatcatgcagtcatccatccatgcgcaatctctcattcatccatcagtttgtaagctgctcctccttggctgcttcctcgagttctctgagccctccgaccctctgctcgatctcctcgagtagctcctccctcaggagctcctctcttgcagacgcctccaggtcctcttgctgcagaatcaaccatgggagagtggagatcgatcagcaaaatgactggttatcttagtagcttcgcacaactagagtttgtctaattgtctgaatgttctttcttcgtgataaaggaaaaaaaaaaagccgtaatgaaagacatacccggtcatagtaccagtgcacggtgccgtcacccccttgtcccctgtacgcctcactgtcgtagaaaggatcctgtaaattcacacaagaccgtgtcagtaacacatatcgaagatgtaatttcgttccaagttgtagtggcatatgttctgcgtgcttgccttcatggacgcaaagaagcagatgccccagactgtgaagaaggcgtagaaggtatctacgagacagacagagaaatttttttgtgaaaagtttcagtttcagacgtaacaacaaactgcaggaaaggtgaaacgacgacgacgactcacagacgctcttgagggcggcgtcgctgagatgccagatcgacttgtgcacgacgtagtccctctgcaggtcgacgtgctccaccatcgtcaccatcagcgtcaccacgtccaacggggacgcgttcgccttcactgaacccctcccggccgatttctgcaaacgctaagaccgcattactttgcctcaccaatcaccacggatttcttctttctcggtgaaaaaattaaaatgcactgggacctttcaccttgcaacggctggagttggacctcgggtcatggaatccaccgagctgcaaatttaacaacaacatttgaacaagtaggtgaaattcgcaaggaattcaggaaagcagtttttgcatgaacgcgaaggggagaatggacggtgcggtaccgttgcacggcagcggccatggagctgggctctgttcgcggagtgaagagcagagaagtggggggacgacttgagcagcggcaacgccattgctggtaggctgctgcttcagtagcgggttggcgatgagcttgttgttgtcagtgtagcgggctcacgtttggctcaggggtgaaacctgtaacctgtaatctgtatggaaaattttagtggataaggtcagacttttgggtggccaaccattgtctgatcttgggcagacgaaaagcacaagaattttgggcttggttgaagcgggcttgagcgttgctaggccttgcccggtcaaggtcatgtttgggccggatgggattaggttgacccgtgggctcgtggcccgttacgtgcatccgtccgccatttcttggagggcgctacggcttggcgtccggcatctcaccaaaaatcggacgcccatgcaggcatgtgagaacgaaccctgtcactgtaacgtatgtgtctaactgcttcttttcattcttttctcctctctttagatattttttatcctaaattacttatccaatttacgatccgatcacaccgttctattcgttgcaattaaatctttacaatgagatatcacatgattatattatgtcaaaagaaaaacatgtatttcaaaacgttaaaacaaaatgtttcgtacgtgatagtgatatgtttcaatatgtgtcatcggtgtgtttcacaaaattcatgaaactaactgctactactctctctcctctctctccacctcatccatgcacacatgtatgtattttagcaagcttcaaaataatttttctcttaaattacttatccaatttatgatccgatcacaccattatatttgttctaattaaatctttacaataaaatatcacatgattttattttgataaaagaaaaatatatgtttcaattcgttaatacttgttgtttcatatgtgccagcgacatgtttcaacgtgtattttcaccatgtttcataaaatacttaaatgtttcggttgttgattttttttgtttcaccatatataacataatgtttcacttgctggtcaacgctcacccccgcactgccgcgcgcatacgcatgcatgtaggccgcccatgctgcattgttcacgtgccacgttgcttgcctcccctgtatgtgttgcttgcgctgctgcttgcatacgctccctccctctcccttctattattacatgtgcctaattttttcctcaaattttaaatatttttttctccaaaattatatattctgatctaaatttcaatgataccattagattcatcatcattaaatctttataacaagatctcacatggttatattttgataaaaatatacatgtgtctcaaaaaataacttgtctcaccattgatagaaaactgtttcatcacatgtacacaaatattacaactcacctcgtgaattgtttcaaatttagagaaatacaacaatttactaactgaaacaatcacaaccactacacaaaacgttaaataccaatgagtgaaacataaaaaaaatcatatgaaaaataaaatatttttgcacaaatacttaattatgttgaaatatttttaaatcggacgctacaaatcgtacgttcaatattttttcaaatatcggagcctaccaatcgtacgttcaatatttttttaaagacgctgctcctcgtttgtatgcagggacacgttgaaggagcgaggttgtcgcatgcatgcatgcatgcaggagtagacctggttgccaagatgacgtgaggcatcattactctgtctctcttaatcaaactttaaacataattttattctaaaatatatatccaatctataatttataacaagatctcacatgaatatattttgataaaaatatatgtgttctagaaaaaaaacaaacttatgttgaactatttaaaaataattctttcatcacttgtggagatgtttcaacccacttcacaaactacaggcatagcactaagctcggcagcccatttttgcaagctgataagtgataaacacaaggacgcaagctccaagtgatactttcacacattggaaaaaggtccaattagcagtacggagtactgaacatagaacaagtctagctgatgctgtttatgtcgatggagcaagcgacagttggtaccaaccaaacaccatgcaccggccggtgagcgcggggcacgcatcatgccatgtattactcacgtcacaatcacctaaccccacacgcgctagtttcatgggtgcctcggccctgtcccttcctgtatactatctccgtcctataaaatacaaatttaaaaccgtatatattatattctaatatgatatatatatatatatatatatatatatatatatcagattcgtaatactagaatattacactttggcacacagccacacaagcttgcaacaccaacacgccaacacgaacacgtcgtatatcctgcttcatcaagaacagcgagtctgcatccttcaccttcgcttgaactaattaagcgtcaccaatggaaggaaaagccgcagtgacgacgtcgaccgagcacggcgacggcgaggcttcgagaacggcggcccgcaccgtggtgagcggcagcagccgcggcggagcggcgagcagagcgctgtccgtggccgacctcatcctccgcgtcgtggcggtcgtcgccatcgtcgacagcgccatcgccatgggcaccaccaaccagacgctcccgttcttcacgcagttcctccggttcaaggcgcagtacagtgacctcccgaccttaacgtgcgaccattcttgccttctagctacaatcgtcaatctgcattacttccgtttgcaagctcgtttattccttcctgttgtcaccaggttgttcgtggtggcgaattcggctgttactgcgtacctggtgctgtccatcccgctgtccgtcgtgcacatcatcaggagcagggcaagttacagtaggctggtgttgatcttccttgactcggtataaatcgatcgatcaaaacgtaaaatattactgaattttggctaatctgggggggctctcgtgatcgtgcaaaaggtaatgctggcgctggtggcggcggtcgcgtcggcgtcggcggcgatcgtgtacctggcgcacaagggcaacgtgagggccaactggttcgccgtctgccagcagttcgactcgttctgcgagcgcatctcaggccccctgatcggctccttcgccgccatggccgtgctcctcctccttgtgctcctctccgccgccgcgctggcccgccgctgagtaataagaaaatcaaggttgaattgtgcatcgcgcggctgaccgggagagacggtaacatcaatacatgtggctgttgctggttgttactgtagttgttaccgtgtcgcctgtgtatcaggagattcagagtccgtgagccgttgtcgagtacgtacgtgccggcagagaccggtgccttgctttgaaaattcagtactccaacatcgagtgcagtgacctgtactggtttacaaattttcaattttaaactcatctgcacaatgagaaagcagaaggtattattgatgtgcggatcaattttggacatacaactttcagagtatgcagacgcatactgttacaatgttttccgaatcataaatacatatacatgtgatgtctacataatataaatcgggcgtccgatttttttttatatatatatataaattgtgcgttgtttcaccaagtagatcgaaattatttcactaagtagataaaaaatgttcattttttaatattttaaaaagctgaaacacaaccaaatcatctcgtgaaacattttactacaacgtatgaaacaacggtttccaaaaaaaccggacgctatttcaccttatataaaaacaatgtttcagcaaataacgaaaggatgtttcaattaactgcaacatttcattcatacgtagtgaaacatcacaagtacacttactgaaacattattggcggaacaaaaaatgaaacgaatttcattaatagagcgtttctgtaatatgtgggtgatttgttgtaatgacgcgtgtggtggggtgtgtggtggggacgacgcaggaagcggtgagcgcccgatttttcttccgctgatcgagcgctcgatcggtgccatttccgatataaatcgatatgaaaacatgatatttgatgagtgagagccctcagggccgatttatatatgggccatcccatggtgggccggttagttctgttcctgggccatccacgaaggtcatgacttgggcctaaggcctaaaggagttcctccgtacgtgaacacattttactacggtaacaggttacaggctaacagccaatcaagttttggattaaacggttaaactcgactaaattacccgcgctattactgtaccgtgcgtcgattcgcttacctcctaatacacactgacggatgggccttggatgcaaaccggacccacatgtcactgactgataagtcgatcccacccacatccgcgctgatgttctagaacctttcgtaaacctcctctttctcatataaatcgggcccaaacgaaaactcccattcctccgactccaatccaatccaacgcttccttcctcgcaaagcctctgcgaatctcgcgcacgcagaaaccgctcccaaaccctagacgcaatggtggtcaccatcgatctccgggaggtcaccatcgatctccgggaggaggacgaggcggcggcggcggcggcgatgaaggccatcgctgggaggagcgacgaggaggtcctcgcggcggtgctcgcgcgcaagggtggccctgtcccgttcctccaggcggcgatcgacgccgcggcggcggcggcgacgaaggccatcgctgggaggagcgacgaggaggtcctcgcagcggtgctcgcgcgcaagggtggccctgtcccgttcctccaggcggcgatcgacgtcgcgcagcggcgatccgacctgttcctcgacccctccgcaccgggggtggtggcggagatggcggtggaagcccaggccaaggcggaggcggaggagaggcggaagagggcgaagggggagccgaggaaggcggaggagatgctgaaggaggaggagccgatgaaggcggaggagatgctgaaggaggaggagccgatgaaggcggaggagatgctgaaggaggagccgaggacgccgatgagagaggcggggagggacaaggtggagagggcagcggtagtggagcgcgtaagaggtgggtgatctcgcaccgtgaccttctaattgttcatcgtgttcgaatgcgaaatgtttgcgtgcttcggtgacctgtatgctcttattcgattatagattgtcatttcgcctgttgatctctacctcttatgcggaattgggggcagatattgagtttgaatcagcaaatgtgctttcccatcttgtgccaagctagggccacttgtctagacttcgatcagttttcgatctgtagtagatctatagtggagctataatcctcagatttcgaggttgcagatatggcggagtataaaattgccatgtagtagttttttattttcaggtccgatctcatgttgcacattggtggctgaagggagtaaaattttgatcaagtgcttactaattagtctggataaatcttaacattaaaatgggtggtggttctaggcatttatggcacatacagattatataaatccttcaagatttgcaagtagtttggtcttgttttcaacttatcaaaatttccaaatcgccatgatatgtttggttgatttaccgtgatcgatttcagatttatctcaccgcatcagtattcgtagagcactaaatgtgtagaaacaagaaggtccaaagtttggcagtagtatagtggttgcaatcagtttatatgcatctcgctatattttttttgaaaaattctctgtggattttcatattgttgctttaagacaatagattctgtactaagctgtcctcacgggtctaataaactgaatttccatcataatcgatctaattattgaggtttcataatttttactgtacatttgaatttcaaggtgaatcatgccttgcattttccaccttttgatatatcatttgctgataagtgtgattatacatgttatacctagtagtacacttttagattctgtatttcctgttcagtttgggtctgctgcttttgctaacttattggttgtgatttggaatttgtttctatctttaatacaaagatctgcagcctttctactgttctacatgtgtttcaaaaaggaatggttgtgcagtttataaagttgaaaggctactatgtgaagttgttattgtactggttctctattaatgggaacagcaacatttcaagccttcacatataactgttggatcatttgatcaatatcatcactcatcactagcagtattttttactgtgtttggttctcttacgttttctgtaattcgagtatcaacaaccgttgcaattttgtactgtagagagctcgctaccttattcctccaacaaaatatatgcgacatcctaatctttcgacttatagacaggaagtgctactgcattattacgaaactaaatgaatttattgtttctttaatcgctttgattgccaatttggagttcagtgcactgaaaggatatcctccttttgtattgcatgttagaccctaagcctaatgctggaaatggtctggacttggagaaatattcctggactcaggaaaggccagaggttaccataaccattccagttccccaaggaacaaaatcaagtcttgtcacttatgagattatgaagaaccatctgaaggttggactgaagggttgctcttttataattgatgtaagtggatatacagaatgttttatatagtctgctgctagattaaatacacaacaagaatatctctcatttgcaatagaagtatagaactgctggtataatgttctacttgtgtttcttttcagggggagctttttgagccagttaaagttaatgactgcttgtggaccattggtacatacatagtttgatgatacttgttacatttctcatcgatagcaatacctacatgactcttgttactgacttgacatgcattattttgtgataattccttcagaggatgggaatacactgtctatacttttgacaaaggaaaaccagaaggaatgcgtggacatcagtgataaaaggtgaccctgaacttgacccccgggacatgaaagtacctgaactccgtgattgtgatgttgaggccaaagagactattgtgaggatagtaagtcatggattgcccaaggcaatgaatttctgccccttcatgcacaatcgattcagttaccactgatcaagtttactaatttgtcttcacatttctgattgattcatcagagagctatggatcatgcaacaagtgatgatatccagcaagaggaacttctgaagaatgcccaggcgagtttcaggctttctgctacctttcctccctttttctttaacctctcattttctgaatcctgtagttctgtttgtactttgccaccgtttgtttgttggtgcttcaatgtatctgatgcagctatttcttgcagtactcgcatatggattcctaaggcaaaaattgaggatgttgaacccaagaagtgtacatacatcatcctttgacagagaatagaagttcagacacagaacagaaggtcacatcatcttttttgtaccgggttaggaagctcaaatactgaagacttctctgctagtacgatttagctctatggtaactagtaatcctcgaatcatagcctggtagtcacacaatgttagtctataaacatgaagctgcacctattcagaaaccttcctcttaaacaccttatcctgtatctactcagcagtaacatggtcgagattttgtgctctaagctctggtggttgtgcaaatggatatcggcatctacaaagcaaatgcagttcctctctctttggtttttgctcttgtttctggggaatcttttatcctgtattctgcagtacgttgtagtactatagtagtagtaggctacgagtagttcttatttgtactgaatgcggccggaattggtatgctggcctgcgagccctgagggcagcctatctgggcggattgttggtggcgggtgacagggggactaacatcagcagcgccaaggtgggcaaagattctgagccgcgactacgaccatccagcagttggcggctgctgctcgcctactctctgatgagatgcgacgctgtactaggatgctgccgcctccatcaacatcaggaacccaatcaactttctcgtacgcgcactgccccggtttctctttctcctccccatagccaaacagtggcgagcgaaacggacgcgcacaggcggaggaggcacagccgcagcactacgtaggaacagtgatgcagctgatgatatcatgatacagctattctgcaagggacatcggcagcatggccgggcgattgaacgttgccatggactgatgaaccgccgtaagttgatctgttgatgcctttgcatagttgcttggatgggaatgaggaatgggcacaacagggaggcatggcgaccacgacaacgggtcctgcctaatctttggaagccctatcagattatcaatgcggccatcactacacgatcttggagttgctgggcttcccacatgcacgggctataattaatcgatattctaaaaaaaaccatcacatttgtatacaccgtacactgtacaacagcaagtaaaaacggctgactatgtagccatttcctagtatggccttagcatattctccaggtccagggccttgaagagctccgcgacagagaaacctttattccattttacattgaaactcagcgtaagaaacagtgtcaaatcctctgattacagcctctgtttacgctggtaaaagatacgcctatctagtagtacagtaaattacaaagctactgtgtataattaactctgtggtgggtgctatcaagagcaaacatttgcacaactagtctcttctaataagatggagagcctgcagaatgcagggttttttttaccttctgttgttacacacattgcctacatacagggcaagacccatggccaacgagccatttgtccacgcaaggctggtggaaagtgtgggagcaattcggcaatctcctcgccgtttcaccggttacaatatcctgcaaagcggtaattaagcagtgacattgagtgtgtgtagggagtgagcaagttgcaaagcaaatcctaaccacattgcatttagtagcaggcataatttggtatgcaagttgccacaaaaggggaacataaaaacggaggtcgttgcatctccctgctctacatatcacaccataacaatcatgtcatatctactatccagctatatatatgtacttgaatgtttcatttatcaatctaaaaaatgggccgcatttcctggttcaacaaggtcgggaaaagctttggtttctggttggaaatcattgatcaagtaatagaccgtattcaatggtcaggacgagttaggtttaaaacgttctatgaagaaggtcaaaagaatttcatgaataatttgaagatgtcttcccatttacccccttggcaattatgtttagaacagttactactatatgtgatcagccatcactaacaaccagatggagacttgtagtggtatgctatcaccaattttcaaatcactggtgatcttgattttcttaacaaactttgccaaaaaggagaaagctcaaatatgctaactaaacattcactatattgtctgcaatcatgaaatggatgttgttttgcttttattatcgttgttgaacctaaaccatgtgcaaaattgtgcaaggcagccaggcaggtttgtcgacaacataaagctaattttgataaatgtacctgcaggcagatagtgcaagagaggtcttcaccaaacgagttccgtgtttggtcagtgaccacatagtgtggtaatttattcagtgactcccgtgaaagccctttggatgaacaatctccaaaaatatcatacagatcatcatgaccaaaatctgaaatgctgacctgttgacaaagaacataaaaaaaatcagtaaaagaaaatgcttcaataaataacgatgtgttccaataaacggtgattctgcgaaccgaacatcgtttccaaagtacccgggcctactagccaataaatttgtaccgttgtctcaactaaataaagtggtttaaaactaccaattttgcaaatagaataatgaaatgatggccagcagatcaggtttttcacataaaaaaacattttataaaatgagaaccatggcaaacaaaattgcatcagcagaacatgtaactgacctgccaacgatgcgttgcatatcctgaaggtacaatttgctcttgcacaaaccgcgcttggaggagctgctctatgaaatctgcctgaacaccaaatcgttatgaatttttcttagaggcgtatcttacaaacacagacgagagatacatttcaaaatcatggtgtcaagccgtcgaggagtaaagtaaacggcacagcatattggaagaagttacatcaggctaatgagcatatatctttcagagaaataaattcgtcaaatacttcaggtcacatcatctgaagtcaaacgcattaatataacttcttggacaaacaaatatgcaagtatggaagaagcttactgaccatggaggatgtgccatgagagcccagccggtccgagcaccaataagcacgagaagcctcgaggacctcaatggagagcacagctccggcgaacgcccccaatccagctccccggagcacgccgctgtctgaagcccttccggccagcgcgccggtcaccgctccggtcaaggccccagcttttacaaagcaccacatcaaacaacggacataaaaaaaaatcggaacacgtacgcgacgcgaggccagcaaagaacgagctctcacgggcaatgctcgctgtcgctggcgtcaaagaatcacatgaacagctcgagcaaggggggaaagaaggggcgggtgttttggtgagtaccgagagcgaagaggccggtgagagcgccggagatgacgccggcgagaagcctggggaggtacaccgccacgccgctctcctccagcgcgtcctccgcggccgcgacctccatcgaaggcaggcgcccccccgggaagcgcgcgccgcgcggtttcttggtatgccgcgtgcgtcgcgcgggttggcgtggggaggcggtgatgagagagagagagagagagagagagagagagagagagagagagagagagaggaggccgaggcgagaggagaggagagggagaggctctccgggagcagaggaaggtgaagacgtgaagtgaagctctctccaagctttgcttttcttttcgctgttgtttcgcaggcgactcgtgatgatgagacgatttatttgctttgctctttccctttttcttttttccttttctttgtagacaagagaattatttgcatttctttagttttctcatacggttgtagctttcaaggttggctcggggcccttttttttgttttgttttattctttcagaaattttcgcgcatgctccaaataaaaggcacaggattatgccacatagttgtcgcttaaatttacgtgcaataaccttttttttttgtgagaaaatatcctctcttgcgatagttgcgagaagagtctagaaagaagaatttcaataaatattttggttgcaactaagaagccagcgagtatatataattatgcgtatctctactctgcagttcggagtgcaataacaaaatgctagggccggccgaatacatttcattgttggatattaacacatttaaacagaactttagttgctagtttttattgtaacatatttataaaaccaatacgggcataatgccatcacaaagtacttctttaagacatactattcacaaattattttcatgcgtccaacttaaatattgaaaaatatataggtcatggtgtaaagatagttactagctcctattaggttttcaaattgtaggtcaatggtaaatttatgttttaatattttataaagagaaatttgttgtatttaatatatttttaatgtaaaacttgatattttctctcacagtttgtctaaaggacttaccgtcactcttgattaatcaatgcctaagagatggtttttggccatcaaacacaagaagatatttgttaagcatgtcctcatccaaatagcttgtgagttggaggtactccaaggtccttgtcgaaagctattttccttaaaagaaaaattgactgatgctttttttaagggtacaagggaaacgtacacagcaccattactataatatcgaagtattgattaaaatatgtttggtttctagcctatcaaaatacggcactgaaaatatgtctatattatcaaattttgataaaattagaagcaccaacaatatgatctcataataaaatctagggccactagagaaaataccttgcactcagcgaataaagcctgtgcgggtcgccgcacagtggcagtgctaactggccacttcgatctcagcttgactgaaactccccccgaatacagaaatgtatgggtacgccatcgactcaatgcaatagagtgatactcggggagtagtattaagaaatgcttcatcgtggttatatgtgtgctaagagaaaacccaacgaaatgagtgcttggagcatacaaccaaccaatcatgtctgttaggtaatgtctagtgtagatgaaactaagattatcacatcataccatgccacatatggtttataatatcttctctctccttaggctacattaggcagtgctccctccgtcctataatataagagattttaggtggatgtgatctaattgggagaaatactcgctccttcttcacgcacacgcttcccaaactgctaaaccgcgtatttcttataaacacattttatagaaaagtttgctttaaaaattatattaactctcaattaatcatgtcataatggatcatctcattttgagtattttctcaatcttctctttttctcttctctcaaacacatatgcgtagcagtgttcagtggacccacatataaataaaaaagactcgacaatggtgtacatttgttctaataaaagactctaagtgatgacatcatacatatgtaagcacgataccttagataccaaacctggtataagtaataccggacacatacccattgataccaaactgtagtagcaagctaccacatctagtattgggtattagatgtgatacctgtatatgccaaagtctgatacctagttaccatgtttgatgtcacacacgcacaaactattgcattgaaacggtattactgttttgtagtatttttatataaaaagcactacctttggttttaaatatctgttatgctatgtttaggagttcaagtttccaactcttctccctcgtttttcacacatactctttccaagttaaacgacatgttttttttaaaaaaaattctacatgaaagttgcttttaaaaatcatattaatccatttattagaaaagatatagctaatacttaattaatcatgcattaataaattgctttgttttacgtacgccatattaattcccaactcaaactaccgaacacaaccttactcttgaagcgcacaattttaactttcaccattgcaaaatttaaatgtttaaataatgatgtttgaaagtttcgtggttacatttaagatgcaatatacttagtatggcatatttcttttatatatatatatatattatatttatatatataaatatatatataagaaatcatagtttaaaaataaaaagtatataatgataagtatttgaaaacgggagtaattgaagttacgcgtagcgaatttggcaaagttagaaaataaagaaaaatccatggagcctatgcatcagcgctaacattttctttatctagcatctacctcttctattgtgtagaatcggtgttgatgttaagagtttctcaaatgtatccatgaaactagagattatgcatcattttttcagattcgtagtattaaaatgtctcaactttaattctaattctagattactatattttaatattgtagtaacaactcactatgtaaattagagaagcaaaaacatatatattctattagttagtatatcattatctaaaaatatatattagttagtatatggtattcattgctgttattttacttcaaagtgatatttgacgaataagagtacacattaatctggctgcggctatcacctatcagtaagtcttcaaagagtgctatcctgtaatcaatgtcggatgtaaggctgaatccaacgtgtgctgcacatacttcgctccatccatgcgggcgcattgagttttcttgaaagatacactgccccctattcacttcccaggacggagacggtacgccggtccagcccaatcttcttcttcaagcacgccacgcccagcatgctcgaaagctcgatcgatccagccaactaatcggggccatccggcgatgaccactcggcctaccggcacgcgcgcgtacgcgtgccgcagcgcttcgccggacagagagcggccccggccggcgaaacgagctagcggctggttccctgacgccacggcgacgtttatatcaacccaaacacgtagtcggcatgtgataacatccttccacttcaacaactttctatcgaagttgaaactttataagcatgtacatattcctctctcttaagtaaatttggtccggctatcatagatcggcccggctaaagaaaacacatcgtccgaccacgcctgtgacaacatcctttcacttcgacaacttcttatcgaagttgaaactttataaacatgtacatatccctctcttaagtaaatttggtccggctatctcagaccggtccggctaaaaaaaaaaacacgtcgtccggccaaggatcatgcacgccggcatcagcgtcgtttttcgaaccaacgtgacctgcagtaggctggtacttggtagaatgtcactagctcgatcagcgacaagtctgtcgaaccatgcttcttcacgcccaataatgctcgctggctttacgtatcgtcacagactcacagtgagagttaaaagcaaaccgtttctgacgcaacatcctcttcgcctcgcactattgcagaaatgcagagcacgccagtggcatgcacggttgcttggctcttcttcttatttccattttttttgctcagacgtcatggtgcacgtgagagaaggcgagcatgggcagcctcaaatgcgatctggttagtgctaggtgtgagtgagttgtggtgacgtggtgcgatatcattaggaggatcaaaccacctgtcaattcggctactagctgttttcctgttcatgtatctgtgagcttgttgctaccagcaaccaggttgatcagatcgattgaacactaattttggggagaatattaatgatgcttacctgccgcatcaaagattgtcatatacccattcgtcctttaatataagaaattttaacattttacttacattgtttgaccactcgtcttattaaaaaaaattgtgcaaatataaaaaacgaaaaatttacacacatttgaagtattaaagtagtctaataataaaacaaattacataatccacctgtaaactacgagacgaatttattaaggctaattaatccgtcattagcaaatgtttactgtaggctgtagcaccacattgtcaaatcatgatacaattaggcttaaaagattcgcctcgcaagttacacgtaatctgtgtaattagttatttttttcgtttatattaatactctatgcatgtgtccaagcattcgatgtgatatggtgtaaaattttaccaggggatctaaatagaccctaagcatattggatgaacattgcatagtttttagagaaaaggcatcatttcctcaaagagcattgaatagttgcacatacaaaggcataaaagaagtcgaatacattttattcaaaaggatcacaagcataccattggaagctgatcagtaatcagatagcagcaaattaagaacacagcaaggcaaaagttcgattattttcattcgccaaaaacaataataacttgctcatttagcagagatatatatagcatggtgtgcgagccagtaatagcgtcctcacagcctgcttaactgactcgtgctcgtccgatcaatcgtcgtaatcgtggcggcggcggttgttcttctcgtagcgctgcttcctctcgccgtcggagtcgtcgtcgtcgtcgtcgcgcttcttgtaacgcggcttcctctcgccgtcgtcgtcgtcgtcgtgcttcttgtatcgcggcttcctctcgtcgccggagccatcgtcgtcgtcacctccctaaatgaagaacagaggcaaagttaaggaggcctggaaggccggagtacacaagaacccatataaggcccgtgaagctaacgggccgggcccgtggaatgagctcacatgcttcttgcggccgccgccggaggtgtgccgccgctgctgctcgtcgtccccgtacgccggcttgggcttcctgtacccgccgccgtgcgtcgcctcgtcgtcgtccggcctcctgccgtggccagccgagaggtgggtctcctcggcaggtggcctccggccttgctgggggcggtcgtacgaggaggaggaggaggaggcggtggagatggggtggcatatctcgtcggagggcgggagggcgcggccgaaggtgagggcgatgtcgtagccgccgccgtacggggtggggtcgtactcgtcgaagtcggcaacctcgtcggcgggatggccgcttccccagaacacgctcgccatatcggtggctggctggctggctcgattcgatcgatcacggtgtacgttggcgggaaggcacggagggcgggaagagatagataggcgcggcaatgggccgcggcgcgcttggttcggggagttttcgtggctgggaactggtcaggtcgcgcgaccggcggccgggcatccattgcgttgcgttttcggtaacgagggccgcagtagacggtaacatggagccgaacaaaccgcgcgattgagtgtttttttttaactggaatttgagtgcttttagatgaacttgaaatagaaatttcacagcaaacttttttttgaacaaggagagccaaggtccccgcctatctatctattatatattattaaaggaatagaaaaaggaggctccacgttcgctctcatgacctagaaattctcacaataatcagagaaaaagaaaaagcaaactccatacaaaaatacaatttaggaacagctaaaattctcacattaatgggagaaaaagaaaaaacagagtccatatagaaataaaatttagaaatagctgaaattcagaattaaaaaataatgaatattagaagaggagactagagtccatatagaaacacaatttagaattaattgaaattcggaattaaaaaataaggaatattagaagaggggactagagtccatatagaaatacaattaagaaataactaaaatttggaattaaaaataaggaatattagaagtagagtataaagtccatatagaaatacaattaggaaataatagaaattcagaattataaataaggaatattagaagtagagcatagagtccatatagaaatacaattaagcaaaaaaaatagaaattcagaattaaaaaataaggaatatgggaagtggagtatagagcccatataggaatttaaaattaactaaaattcggaataaaaaggagcctccacgtccactctcatgacttagaaattctcacattaatcggagaaaaagaaaaagcagactccatatagaaatacaatttagaaatagctaaaattcgaaattaaaaataagaaatattagaagaggagactagagtccatataaaaatacaattagaaaataactgaaattcgaaattaaaaataaggaatatcagaagtagagtatagagtccatatagaaatacaattaggaaataatagaaattcggaattaaaaataagaaatattagaagtagagtataaagtccatataaaattcaattaagaaaaaaaaaattgaaattcagaattaaaaaataaggaatattataagtagaatatagagtccatgtaggaatttaaaactaactaaaattcggaataaacataataaaattaaaagtagagtttacagtccgtataaaaatacaatttacaaataactacatttcgaaattaagaaaaatatgggaagaagagtttaaagtcaatataggagtacaatttagaagtaattgaaatttgaagttaaaaattaaagaatattgaaatatgagtttatatagaaatacaatttagaaatagctgaaattcggaattaaaaataaggagtattagaagatgagactagagtccacatagaaatacaatttagaaatagttgaaattcgaaattaaaaaataagaaatattagaagaggagactagagtccatatagacatacaattaggaaataactgaaatttgaaattaaaaataaggaatattagagtagagtacagagtccatatagaaatacaattaggaaataatagaaattcggaattaaaaataaggaatattagaagtagagtatagagtccatatagaaatacaattaagaaaaaaatagaaattcggaattaaaaaataaggaatatcataagtaaagtatagagtccatataggaatttaaaactaactaaaattcgaaataaacataataaaatgaaaagtagtgtttagagtccatataaaaatacattttacaaataattaaaattcgaaattaagaaaaacatgggaagaagagttgaaagtcaatataggaataaaatttagaagcaactgtaatttgaaattaaaaattaaagaatattgaaagatgagtttaaagtccacatagaaatacaattagaaataataaaaattcagaattaaaaaaatattaaaagacgagtctagagtccatataggaatatatataatttacaaataaccaaaatttgatattaaaaataattaataactaacacgtatataaaatacaatatgaatattacacattagtagtttcgtaaagttattgcaaaatttaaaattatgttgtcattgtaatatattttataatataatgagaaaacatatattttattatatgagagaaaatataatgatactagccgtgcaatctgcgcgggccaccatgatagttaatttattaaagaaatagaaaaaggagcctccatgttcgctctcacagcctagaaatttccacattaatcagagaaaaagaaaaacatagtccatatagaaatacaatttagaaatagttgaaattcggaattaaaaaaataaggaatattgaaaaagaagactagagtccatatagaaatataattgagaaacaatagaaaatcggaattaaaaataaggaatattacaagtagagtatagagtacatatagaaatagaattaagaaataatagaaatttggaattaaaagtaagaaatattagaagtagagtatagagtccatttagaaatgcaattaagaaataatagaaattcggaattaaaaataaggaatattagaagtagagtatatagtccatatagaaatacaattaagaagtaatagacattcagaattaaaaataagaaatattagaagtagagtatagagtccatataagaatttaaaactaattaaaattcggaataataataaaattaaaattagattttagagttcgtataaaaatacaatttacaaataactaaaattcaaaattaaaaaaaacatgggaagaggagtttaaagtcaatataagaatacaatttagaagtaacttaaattcgaaattaaaaattaatgaatattgaaagatgagtttagagtccacatagaaatacaattagaaataataaaaattcagaattaaaaataaataatattggaagaagatcctaaagtccatataggaatataatttataaataaaaaaatttaaaaataattaataactaacacgtatataaaaaacaatatgaatattatacattagtagttttgtaaaggtagtaaaaaatttaaaataatgttgtcattttaatatatttgaataatacattgagaaaacatatatattattatatgacagaaaatataatgatgctagccgcgcaatctgcgcgggccaccacgctagtttccattaacaaaaatgagatttacagtataaaagtatcatactccctccctcccaaatatctagtcgtacaaatgattttaggatggatgagtaaaagattatgctatttcaggctgtcccaaatatctagtcgtacaaattattttgggatgaatggagtagaaaattatgctatttcaggttgtaaggctagggggacaacaattttaagcaacaaaggatagctacaacctcatcaccccacgtcatttaaccatactccctttgtcccataaaaaccaatttagtaccggatgctagtattatgaatctggacatacatactctctccgtccacccaacctaggaggggttatagcgtctatttgtccagattcgttgtactaggttgggtttttttttaacggagaaagtatgtttatatttgtaaatctataatatgacacatctgatattagattaatttttatgacacggagagagtacaactgaaaaggttttattcaaaaagactcagggatcagcatctctccctagggcacaaaaatcaacacattcaatccccctcagcagccttcattaaccttgcaggcttcttggcatgaccttcttctgcaagatggctcattgggaaataattgagatatagtgaacaacctgaaaaataacttccatgggatctttaggtaacttgttctcaaaacatgatttgtttcttaagccctgtttagttcacgaaaagaaaattttttagtgtcacatcggacgtttgaccggatgtcgaaaggtgtttttggacacgaatgaaaaaactaatttcataactcgtctggaaaccgcgagacgaatttattaagcataattaatccgttattagtacatgtgggttaatgtagtacttatggttaatcatgaactaattaggctcaaaagatttgtctcgtgatttccacgcaaactgtgcgattagtttttttttatctatatttaatactacatacatgtgtctaaagattcgatgtgatgtttttggaaaaaaaattgggaattaaacaaggccttagcttccaaatctcccaaagaaatgctgcatcccctactgccacaagttttttggtcctcttattaaaccccttcaaccagtccccattccatttgttatcccacaagcaaatgcacaactgagaacactccaaacacacctggccaaatagcaatgtaaaaacagatggtcttgtaggataacaattgatataataagatttgctcaatctttaaaactttctgaaaatgctggccatcagcacagcagggaagggagcactgagcacgattgaacaaccgttttctcctttttcattttcttgatggacagcaaatcatttttttttctttttcttgccatattacacaaataccaccatttggtggagaacacgagataaaggaaaagagagatggtatgaaaaaagcatgtgtaacttccgcccgccatgtgatttcctgagactggtgtttttggggaagaactgtgctaaacatttgattcgcgtttgcacagtttcttgccgctgttcaattttcctccatcgtggacgggtttggcagcgctggtcttcacagatggatacccagcacactaacatcatcacgctttccaatctcgaacacacaattggtgttactatacaaaaaacaaaaaaaaatgctatacttaggccttcgggcagctggtaacatcctcttttttcttactcgtcggtttgttgtactctctgccttggcgcttgagcggtcatgtttttcagcagtggtttcaatgaggccatgatatctgcaaatgatggccgcaattttgggtccctacaccaaatacaggaagcaacactgagaaaatggttgtgtattccgaaaatggaatgcaggttttagtgcgtccggaagaatgcagatgagcgacaaagtgagttaggcacactaacgtctgccagcattttgctattatttctgcaatggcgggatcagtgttatctggaatatcaaggcgacgattctgaaacccaacagctccgacgacttgcatggcgttcatgccttcccaaggttgcagtaatgtacaaagttcccacagtatgaccccatagctaaaaacatcgcatctgccaatatgcacagccatttaagcaatcacaaactcatttaaggtacgaatacatctgagagcttagtttttagaatttagaacttacttctcgtctgatggttcattacgaagtacttcaggtgccatccactccgcctgcacaccaacataaatattcagtgccaacaatgttaacagtcaatagcatagcacaaagatgatacccatacatagcataaatctcattccatagttcacaagaagtcctgacacccttaaatcatgtcacaaactactctaaacaatccagctagctatgaaatcttgcacagataaacccgaggacggtggactggagaattgcttataaagcttataagcttttagaggtctatatattgtttgtcagcatagtctttaatgcttagtactccctctatctacttttgataatcatatttcatcttgacacacagaccaagtataagtaattctacttatcatccatttaaatatgctagtaccagtcattcctcgtaaacaagcgattcattaatatttacatttctcgatgcccatgtagccaatcatgtgtgaagaatggagagtcacgcattaaattcgagaaaattattaagatgatagtttgttggattgaaatatgcctattaaaaataaatttttcagatttggaaatatgactatcaaaagtagatggagggagtatctaattagatagcatagtatttagtgcaatcaaggatcttattgtatgaaaccaagccaaactacacattgccttaacataaattgaccatagaaaatcaggcgaaaccagaagaacaaaaaaaaagtgtgattcaggcacaaactttatgtcacaaaaggctttcagtgaacactgcgtatccactacatggtaatatggcctttcagctggtcatttgtggggtggtcttattgaaaagatgatttgagtatcaatcatataaaatcctcaaagaacaaatgggcttatgggcataacacaaaaaatttccacagagagtaggaacattgctgtaaagtccaaaatatattttgagcccctttgattcatcactatcatcatcgatcttccttccagactaggataattggagttattccttcattccaatctttttttatatacatggatcacaatggattatacttcaaaatatttcaatcccttgttatatgcacatagcataatgaagagggaaaatactatgcacaagagtaatatatcatctggtataaaactctcccaatatgagagctgaaaaagcagacaacccaggctcttgccgcttgacatttctgaagagatgcacacaattgcaaagcataaagtatgttattttcataacaatgcacaaataattaagtgttgtagaacttaaaacacttcaaacaaatttaatcatgcagacggaagtacttcttaatctccctaaaattgcacaacatcgcaacaattaccattttaaatgtgcacaggattggtgctcaaataaagttataataaaatttctgaaatcgttcgagcttactgttccagctgttgatcttgatgacaagaaggtcttgttcttcattttagataaaccaaagtcgcaaacctagttgcaaaaacgtaagtggtttgcaacagaaattgaaggaaaatgaatttcattgctatcgtgcaacttgtgtattaccttcacaacccaattcttgtcaaccagtaggtttggagacttcagatctcgatggactatcaccggtgtgcagttatgtagataattcataccacgtgcctagggaccattcaaggaatcttagtaaacaatatttggcttctccacacttatcagttatcagcaactgtgttaacaataagttgagatttagagtcacaaatcatgcataccacatcaagtgccattcttaagcgctttctttcatccaactggttgttgggacgatgaattaaccgaaataagctacctctgcaagaccaatagaaaaaaaaaggggcaagaatgattaataatatagagttcctaaaaaaagtgagcaactatccccacaattaatgcactgttctttaaggggttgcaggtgaatgttccaaaatatgtctgatactatgacacaggtcaactgagtcagctcgaattacaaaacaggaagtttatctttttaacgcatcaaattctgaacaaaacattaactagtatatgatcctaagttcctatttcctacatgaaataaacataaatgtgatgtaaaaatttacaccaataacaacaagacataccttggaagaaattcggtgacaatagaaagattgggtacacgagtaatagcacccatgaagagaacaacattcggatgccgcaacctcttgattattcgcacctaaacatgaaaagtaatacattactataaggctcatatggtgtgtgcatgaggttaatatgcaaacatgctgcaagtgcaaacatgcacaataaaacacatgagcatgcacacaaacatatgaacacaggcaagaagccaaaacatctgtacttcagactatttggtcatttgaactaaattatggagtatatggtatacctcagttctaaattcttccagagcatcacttgaaatatcttgttgcagaaacttcttacagcaacttcctataaacaaagcgattttgatacactgttaaacataagatttgctagaactttcaagaagatggtgcataacaaaagatgggtcttcaaactaatgataacagctgaatacaaaaattagacatattaaaacacttttttcacaaaatattgaagtctgttgcgaagaaatcatacgtagctttccaggtgaaaacattttgatacaagactgggcaacagaaaactaatcaaatggctatagtggtttctcaatgtattatctttaaagctgaaccttttcattataaaatataatcaagttttttagaaaaaaaagtagggagttattctattcggtacaatagttgacagtggcatgaacattatgtatgttatctcagtgaacaataattcacatctttcatcctcgagagatcaaacagttaacaaatgtgccgattgcattcagataataacatggaacttgttgacaaattaaaatgtaagagagcatatttttactgaaacacttactgttccatgccactctcctctataaacttctccaaatgatcctggagcacagaaggttggatcaatttaagagaaagaaaaccacaataagattttacagacagtcaacggaacagtagcatgactaagaaaacaactgtttgaataaattgaaagaaatttaccaagaccaatgcgttccccaatagtaatttcttcccattggatttcaaactccgcaacatcatccagagtgatttcagattttgcactctctgttccgcttgacttatctgaggttctttcagcatcctggcgaacttcagctgaatctttttcttgatccaaagtattatcttgaccatgatcaatttcaaaattctgtttatcccaaaactcatctgcacttttctcgattgattcattcccttcggagggacttggtaaactatgcag

SEQ ID NO: 7340 - DNA, 889 bp, Oryza sativa
atgtgtaagggttctcaattcactcctcagatttcaggcatcagttctgtgcctccatatgaatacactttttgtgctagagagagcccagatgtagctgacattgaacgttgttacgcagaataaaagggacagagttccgaatcatatatcaggatgaaaaccaggcagaggtctcgttcgtcagaacatgggatccttctctagaaggcaaagctgttcccttgaacattgataagaggtgatccaatagcacaggcatacaatggagttgttctcagcaattcatttggaaaaggcaatcatgtttaacagagcaagtaattgatatattttgacagcgcaagtatgtttgtataggttcatcgtactccggggctgctcaggattctatacttacggaatctatgagcatcaggaagggtggcctggttttagcatggtagagaccagggtggccttcaagcttcggaaagacaagttgttctagttcctgaatttaagtttttttttcgattttgctatatctcactcgaaagttttttttcttatctctcactcgattttctcactcaaatttatagtgcattttcttgtaagttacaatgtaatttatgaaacttacgctgtaacttttacaatgtaattttgaatcttaagttttgaaatttatattggatttggtctttttcttgcagatatggtaattagtgtctattatggtgtttcttagacgcaatgtgtgtatgacaggtggtaccgggtattaatagtatagcaagcaactattgtatgaattggctattacattggttatagatgatttagagctggcagtgggttataccattaaactcgctctaaggggagtactagtgtgcatcaggca

SEQ ID NO: 7341 - DNA, 6253 bp, Oryza sativa
aatgatgcaacaaaaagattcttctgcccatctcctccaccaccattccacacaccaccaaatgtacatttcatgtgagtgcatgctggttcgtcaactttgagagctctcacagcaacagccctgcacttggaataacttgcaccagatgacaaacctgatgcttcgaatatatcgtcaccatatctgtattgtcctgtgtacaatttacaaggacaattagaatccggtaccatctttccaagaaaacgtaaattgatacaactgaacaaaaaaaaaaggagagaatttcagaaagctacaactattttgttaaaattatcagtatgttacaaatttaaccaagcatttcagataactccaactatagcatatatgattttatcaaaaagctgcaaattttatctgtttgacaagtttgggcccacctgtcatatacacatgaaatactcatgctgttgtaaattggacccagatgtgacacgcacagagtgaataaaattgcagtttctgatgaaattatttgttgttattgcagctttgtgaaatacctagttaacgttatagcataatgatagttttgaacaaacaattgcagtttgtgaaatttactcagaaaacaattatggggtaaatggtgcgtgtgtgtatacatattttctaaatttatacattgcgaccataatttgccaatagaatagtcattcttttaccaaggccttcagaatatcgaaaatgatcttaactaatattcgatgattgcagaatttctcaaggaaatccaaatgacattctgtatcttggtttctgtttcaataatgagcttttgctctttcatgttgacatagtttcaatgaagttcacaggaaatctatttaaatttccaagcaggcagatgaagataatatcatgttggctttgtggattaaagaagatgcgggcaaccataccatgatgtccttccaacatacagttgcggtaatcattgccttcacctgcttttaagatctctgctctagccgccagcaatccataacgcaaataactgtagaaagcaatgtttcttgttattccatgatcttttacttgtgatgttggttccaacatttgttcatcaaaatgtggtaaaaagaaaatgttccatttccatgtcagatttagagtaacaaaaagaagtgatagattggaatcgcagtgtaaataacagtgcagaaatcactttgcagtcatatgtacaatcttcactgatttcatagatggaatagattttgcgatgccagtgccaacaacagttcatcagaatattgtcaacaacattgttcatgtcccattgaaagtaacagcaagaagtaataaaatcaattgaaggacatatgtactgacatctgcattgcaaggaaacaatatccttaagttactagttcaacttctcaactttcttttagcccaggtgtgctttattctatttctgtaatgatcagcttctagttgcagcttcctaaataatgtcagggttcctctctttacagttctaaaacacctaaggattgagattaaaaaaaaattacaagatactgcaaggcaatcctactagaaataaagactagtcaaaaattagtttcgccaatatttcaatacttatgacagattttagacatcattagtacgatatcttggtacaaataataacgatgtaaaatatctgtaaaaaactggaatgcaacaaaccatttgacgtgtacctgtgaacataaagataatatgttgttcccttaagtagaagctccttcacatatgaatcttcaccttctgcaactggaggagcctttcctgcatccttctctgagatggcataagccatttggacagaaccaccacctagatcaaccactccaaccgtgtgtgagtaaggctttcccaaatttcccaacagataattgatggtaacctaaaaaacagcaaagaagcactcatgtaatcatgttgatttttttttttttttgtatggagtacaaaaagagcagcatatggagtacggacaactttgtacttccatataagaaggggcaagcaggcaagtggtggcaatgaacattgctaaatccaaaggaacaccaatcatagaacctttttatatttgctaaaatagactaaataagataatgatctggggcatagaaacaaattaactttccatacccactggaatgcaccttcctgagatccatctagaacggtaacccattctggttgggatctgaaagagctcttgtcttgaagaagatcccttacctaaagaattcaatgaccaagtaacaaaaattacaagagagtacaaagcataataaatcttacaatctcaagtgagattataataaaaaaaggcagtccaatcttgacaggaataagatatgctacagctagcttatcacaaggacaatttaccgcttgcaaaatttcttcagacttttcagtccctaatgctctcaggcctgcagtagcctgcataagggtgaacatcacttcacagaaaaaagatgttatggaaagtcaaaaaaatgtgtttttcagcttccattccatagagtgaaatagaatggcctccacccaccccaaccctgacaggagtttgctcacgtaattccacaggaattactttttcagcttcctctagaagagaaacaagtgacttagcagcttcttgtgggtccatggcataggcactgaggcctggttttttctggcaagaggcaagagaaaaggatgaaggttcagataaaattgtacattcccccagttctatccttcttcatttatatttagaagttaggagtctccgcaacaactgtatgcatgaaatttttcgagaagtagaacatcttaatcaaggaagtaaactagtggtgcatacttctctgaacaggatgtagctcttggcaattttacaatgtatctacctagaaatctataatcgacacatactttaaagcttcagataagctttacccggcatatatagcccaaggcccagtgcctgtcagcaatttatacaaatttcagagaacagttatctacagtatataagaatgttcatacactctcagattttaattcaacgtccatcttcaaataatataaaggggtaaactgatcaataacactagaaagatcgcatgttgtaaaatcacattgatatgtcaatgacatatcgaccttggtcccaattctcacctgaatgctgttttccaatctatacatgtttgcaaattgcattgttcctagaaaattttcccaaatattaatgcacttgcaaaaatattggagcatctggatggcatccacatatatgtgtatttgcttgccactagtttcagctagtttggaaatacaacccagttcagtactaagtagtcttaaatttgaagttaaaaaaattcacaaagattattttctacaccgtatcttttgtctcaatactcttacaaaagaccagctaattatgtgtcacacttacaacgttgcctggctgaatatgaagcaatgcatctgatcacaggcattctaaacttaagcagtgcgcctaattgcagcaagccaggcataataacaaagacaggttaaattgttaaatagctgtgaacatcaataggtggtttcatggttttaacggcttgctgtcaccaactagcaatgtcagcaccaaatgctacagttcagcatttcatagtatgttactcacatgtgcttgctttgcagaaacgaaatgatcccatttcaaattctaaccaggatcaattatccctataagcatgctaatataagatcataacaagacctatcccgatcggatccacctgatagcaccccatatttcacaactaaagataatcaaccaaaaatgaaacgcggccaattcacctgcttgaacagctcgatttcctttccaataggcagcagatccaggttcccatcgaagcagtacacgtgcacgcggctcccggagctcccggcatcaaatatcacagcgtacctggtggatccgtccccaagtccgctgacggcccgggggccccacctccgtccggcagcggcgacgagctcaccggcagagccctcgacggtagcggaggcgggcgcgcgaggcatgagaaggagcacgagcgagatgaggagcaccggcgcgagcaccacgacgaggaccccgcggaagcggaggacgcggtcggacacggcctccccctgctgctgctgctgccgcgccccggcggcggccgagaagcggcgcatcctcgcggcatccgcggcggaggggccggcggcggcggcgaggtcatcggccgggagtaggtcggccgccgagggcgagcggtagcggatgcggccgttggtcggggacggcttcaccgcctcctgctgcggcggctccagggcggcgggtcgggtgcggccgcggcgcgcggcctcggcctcgtgggggcgcgtggctggaggtgcggctgcgcgagatctcccccgtcgcggctcacggcgaccggcggtgcgctcggcgccggggcggcattgcgtgcggtgcgagcgatcggagcggcgaggtaggcggatcggtggtggttcgatcagggaggacggattcgtggtggagtcgcgcgcgccgctcggggagagcgagaccgggacggatcggacggtgcggttcggctcgggagtcgggacgaggtggtttgtctcgctcgctcgcgtcgcgtctccggggacgggaatgggaacgggaggtgcgccttgggccgcggccgccacttggctgcacgctgcagcctttggctctctccgcctccggtggtttttacgtacctttctgggttgaaactgcgtgtcacgccaataatcgtgctctcatcttcttcttctttttgtctttttgtcataattgtgtgcatatttatatgagcgtttacgtttgtactgtgttttgtaagtgaatagaagaagtaacttatgttttgaaaatatgtaaaaaaaagggggtaaaatgatctcatttggcgtccgataacacggctcaaccggttagatttttaatggtgcaaccaacccattctggttcacatactagatttgacgcacgtgcttctattttcgactaattgtttatttcagtggcaggcaacatacccggacagcgcggcgcacgttgtgattttgtcaatcttaagatatatcagcaaagcgtctgtgatgattttgtcaatctcaaaatacaccggttcagtctttcggatatgctcatagggatagggtgtgcgcgtgttcataaaggagattatgtgtgtgttacgggtacatgcttttttattatgcttctaaaaaataaaaattttaaatttgaatacacatctaccaggggaaaagcattactaggaaaaagaacccggtctattgaaggatatcgagcttaaactgaagggccgttagtttggcgcattattttgttgggcctttgttggaaattaagagagatgatgggtgggaggcgatcagagtaaatgggccagaacattactctaccggggaaaaagtgcaccgaaagtccctcaacttgtcatcggggtacagaaacatcctcaaaccacaaaaccagatacgcgggaaccgatcatccgaggtccttcggtggttttgactccggttttgtctacatggcagctgagtcagtgtgggacccacgtgtcagcgtgccacgtcatctctctctttcccttttctttttttctcttctttttttacttctctttgcggcaggggagtagcaagaacgggcggcggcgggcggcgaaggcggcgtgcgagcgcgcggcggccggtgagcatggtggtcgtcggcgttgccatggtggttgtcggcgtcctcctcgtctcctcctcctccgcgtccgggtccagccgcggcgcggtggccccgccgcatcgacggtgtgccccgtttctccctccctcgccagccgtcgggacgacccgcagcgcttgccgcgacctccacggccacctcctgcgcggccgcgagctccgcgtcggcctcgccgaccggccccagcaggaggcccctggaggacggggtggcggaaggggcggcactggaggagccggagccgatggagacgacgaggaggtcgtcgacgccggcagtgaggcggaactcctgcttgttgtggaggacttgggtgatggcggcggcggtggggttgcccatggtagc

SEQ ID NO: 7342 - DNA, 8140 bp, Oryza sativa
tggtcgaggtacgactacgacaatagcgtaacggtcctcataccacgacttcagatggtcgaggtacggctacactggtcttcgaccagcagcgtagtggtcctcgcaccacgacttcaatcggtcaagagataaggctactcctggttttcggaccagtaggccgtagcgatctctcgtacctcaacatcaatcagccgagagatgaagctactcctggttctcggaccagtaggctttagcgatctctcgcacctctacttctagtggtcgagttaaggctacacctggttttcgaccagcggtgtagcgatactcccactagcttttcttctcgtggtcgagttaaggctacacctggttctcgaccagcggtgtagcgatactcccactagctttacttctcgtggtcgagttaaggctacaccttgttctccactagaggtgtagcaatttctcacactacatccacttctagtggttgagttacgactactacatggtcctcgaccagtggtgtagcgattctcccactacctttacttcaagtggtcgagttggggctacaactcatttttgaccagcagtgtagcggtcctcccattacctctactccaacaaagttgatatcaggtacacaatatcgccaagtgttttacccagagatcccttaccacgacgacacttagagttgaaaccaatcctactgtccctttatgccgccctggcaaggcctccgaggaacctaagggaacttcggctgggcacgcctagagcggataaggccttgtcaggtaatgcagagatgaacgaccatgtaagatctggtcatgtaagagttctcaccgtgcgtattaaccaagccgtgtaatcggaaattgggttttccaacttcacgactgggggctagggtaagcgctttttcaaccaaggcaggtcaagggtccaagagcattctcctccgagaacttatctccgatgacaaggctgggggctagggagagtgtatgactcaacaaactgactgattgaagtcgataaaagagaagacgcttgtacacaaaacattggtctgtaaatttaattaatttttagtttttcatacatattataacatgtcaccctttgagcattcgctcggggggctatttttattaatattcttttatgagtattgatttcaggaaaattctattcgacattgtcgaagactccatgtctctatggttctacaccaagattcactaaggcgagtacgacaaatgttgacaaggcttcgtcgcagactctgcgccttctcgaccattcgagaacggttggtggatctcgacaaggaatacggaatgaaaagatggtatacccgccgagataaaatttcttgacttcaatccaaattctcgattacagcaagacgggagacttagtcgtatgctctgtaccttcttggttgacgtctgagatttactcagacaaaccctatacggtgcccacacgaggctgataagggaagtctaatgttatctctgaactcaccaagaacgatcacgtgagcttgacaacagttattccgaggtcttcggattaagaatatgaactcgttcatttgcattgaagtcgggggctactgtcagggttatggataccacatacctaatagtagttgactaaatctcggtaggacccaccacataccatgttttatacgaaaacaaccttcgggtatagaaggagttccggataaggaaagataaatagagttctacatggaaacgacaaggattactcggattgtatccatattgatttccctagttctacttggaaaaagggaacacctatgggtataaatacaagacccctaggaggagaggggggacggaacagtagatcaagacacaagatcaacatacaagccaacatacgccaagacaatacgctggatatcgactttagagataagcatggctagtcgcctgcggtgtctacggatactgataggagagacatagcgctgtctttgaacttgccggatgcggattcgaggaggaaggctaccctgttgtcgactacgagtcagcacttcagaccgccaagtcgacaacagttagataggctaccccaaatattgtactggtgtgattatggtgaataagagcaacgaccgggttcggccaacaggagtagggttattacctgacaattcaggagcctgaacctgtataaaaatccttgtccccatctcttttacctcaatatcgtatatatcctagtaccaacaatccccatactatgcaaataccgtagtcgtgacatcaaacgtcgatagatagatagatggattgataggttagataagtagatagatctatcaatagacagggagggattcaaggtaaggatttgatattttcttggaaacggggaaaagtatttggcatggattcaaaggaaagatttgaatttcggaattgatataggaagttgaatcggaaggggaatttcgaggaggcgatttttgattttgacaggagggaacaaggaatttaaactaagatccatggcacgacttagactctcactcaaagaacgaaattttcgcaattaggattttattgatttagtttttaacgtctcgcgaaaagcggggcgttacagatgctatatcattacccattaacaattattacatttaaacatcatgcaagcatattatattatctataatttaatagtttattaaattttagagatttaaaatgtaagcatgttaaatcatcccacatatttcacataatatttcaatatatatctccatcatctttttataatatcatataaatctatatatttcatcctcactaattccatgttatttttcttttctctcattaagtcatatcatataaattgtttttagtcctcagatgattaatctatggttcaaattatctctcttcttttcttctcccataaagccatatcatcttaattctttgtagttcttagatgtatggtctaaattatcttccttcttgtgttttttcataaagccacattatcttacttttacatttgatccaacgtgggtgctgagtcgctcgagtccctctaccccactggataaccattgatagaagaagacataaaagggagaaaaaaagggatatgagaaattgtgggggttgggtgtgggggccgaaggaggaagaatgagatgagtctccctataataggctatgttcggcacgcctggttcccaacatgaatagtgtgtacggaaaatagagcggttcattagcacgtgcttagttaattattaactaaactttttttcaaaatggattaatttgattttttaagcaactttcgcatataaatttttttgcaaaaaaacacaccgtttagcagtttgaaaagcgtgcgcgtaaaaaaaagaggaagaggggtaccgaacacaggcataatctagttctagatcctatttggatgcgtatgttacgtgcctcttgcgtttgaacaacgtttctaaaattttttttaaaaaaattggaaaataaaaaagggcctgaaaatggtataggaccaatttgcccccagtcgaccggtgaacgtgagtagcagtagccccaaaaaaacacaagcaaaggaaaaggacacgaggctgaggtaccagttgctcgctcgctcgctcgccccagatccgggggaatccccgcaccagatgcgcccgccggcgatgctccgatggcccgccgccgcggcggcgctcgcgctcctcctcctcctcatcgccgccgcgccccccaccgcggccttctacctccccggcgtcgcgcccaacgacttccagaaggtccgttcctcctccccctcctcctcctcctcctcctcctggtaatggctcccgctcctgcgcttgctggatctcggcgatcccgcggtgcagatccggctcctcgtgattctagccctcttcgctcttcgggggatgctgtttcgtaggcgtttctgtggatgttggtggggtttggttttgatgaatgatgaatctgtgtgctgcttattgccaatgctgaaaatgaactgtatatttcagtgctgtttgatgtctgggtgtggctaatcagtgctaaaggcgtaccgacatttggttataggatgcctccacggttgtagttgcatgcatctggaattctggatggacattagcatccttagattagatccattatttcacaagcctcagcgctgaggcaaaacatgtttttaactgaaagcgaagcaaagcagtggaaaaaacctctgcattgatcctagcatatgcacttcgtattatccctctgaacattttcagaacaaattatattgttgactatagctttatttgaacagtgcaattttttcaagcttgcgcattgagtaaacgtgctccaattttcaagatcttctcagcctctctatactgtaccctgtttatcttctctcgtaaactgttgccagttgtatgtttgtcctcaatttcgtcacttatgaatggcatgcatgtccttgcaagtcactcttttactctaattttttgcccactatcttttagtcattagttttaagaatgactgtgctactaggccttttctaggttattacatgtttattctattctgttacgtagagaagaaaacatcatgaagttgaccaaaagaaattattttttagtctgtgaagaaaaaaaatatctagtaatcttaaaaaacatacctttacatttacctgccgtactgaagtcatatgttttagatgtgctctaatggacatatatactacaatgcctgcagaaagatccacttcaagtgaaggtgaacaagctgtcatccacaaagacacaactcccctattcatattactcccttcctttctgcaagccagatacgatagttgacagtgcagaaaatcttggagaagttctacgtggtgatcgcattgagaattctccttacgtggttagtactggactctggtttacagattatctgagtgcactcacgtattaatgtacctaattatcatctattttacttctttggactatagtttgagatgagagagcccaagatgtgtcagattgtctgcaaagcaaccattagcgataaacaagcaaaggagctaaaggaaaagatagaggatgagtaccgggtgaacatgtatgcctgtgtggattgtgtagtttgattgaaatttattttatatgatgggttctggagtaacatggttaaattaccttacaggattcttgacaacctcccgctagttgtgcctattgcaaggacagatagggatgctcttgtttttcagggtggatatcatgttggtgttaagggccaatatgctggagtaagtatctgtgctcagcttaccattttttgtttggaaggtgagtaatgatcttacaaaaatatattttgcagagcaaggatgagaagtactttattcataaccacctggcatttttagtgaagtatcacaaggatgaaaattcagatctctctagaattgttgggttcgaggtcaaaccatttaggttcgttcacttaaccttttcatgtttgtttcatacaacgtctttgacatattgggcaaattttttattagtccctcatgtgcatttactaaattccctgactcagtgttaaacaccaattcgaagagaaatggaatgatgcaaacactcgtttgagcacatgtgatccccatgccaacaaaatagtaataaactcagatactcctcaagaggttgaagctgggaaggatatcatattcacatatgatgttggctttgaggtgatattttcatgacatctcttcttttcttttgtactgtgactctgttccttcacagctgttcttcgagtgttatctttatttaaacaatctcttttggttttcttggctgggtcttgtaggaaagtgatatcaagtgggcttctcgctgggacacctatctgcttatgacagatgatcaaattcactggttctctattgtgaactctctcatgatcgtgcttttcttatctggaatggtggccatgatcatgctccgcactctatatagagatatctccaggtacaatcaacttgagactgaagaagaagcccaggaggaaactggttggaagcttgttcatggagatgtgttccgcccaccaactaactctgacttactctgtgtctatgttggcactggtgtccagttctttggtatgctgctggttaccatgatgtttgctgtcttgggtttcctttctccatcaaaccgtggaggattgatgactgcgatgctgctcatttgggtcttgatggggctgtttgctggatatgcttcttcccgactctataagatgtttaaaggatcagaatggaagagcatcaccttgaagactgctttcctgtttccgggaattgcttttggtattttcttcgtcttgaatgctcttatatggggggagaaatcatcaggtgctgtccctttctccacaatgtttgccttggtgcttctttggttcggtatctcggttccacttgtctttgttgggagctatcttggtttcaagaaacctgccattgaggctccagtgaagaccaacaaaatcccgagacaggtcccagagcaggcttggtacatgaaccctgccttcaccattcttattggcgggattcttccattcggagcagttttcattgagctatttttcatcctcacttcaatctggcttcaccagttctactacatcttcggcttccttttcctcgtgttcattatcctcatcatcacttgtgcggagattgcaatcgtgctgtgctacttccagctctgcagtgaggattacatgtggtggtggaggtcctatcttacttcaggatcatctgccatctatctcttcctgtatgctgggttctacttcttcaccaagctgcagattactaaactggtgtcaggcattctgttcttcggctacatgcttctggcctcattctctttcttcgtgctcactggcacaattggtttctgtgcctgcttgtggttcacgagattgatttactcatctgtgaagattgactaggcgcagagttgctatacatccggcttccaatagttctgtatgattattgtggagaattgtgagacgaggatcagaatccactttgtattttgccgattttcaagaaaatttatatcgtagttcttagtttataaaccactgatgttcattcactataaatgagatgatacatctttgatatgaggttatataaggctaattacgattgttaatttcatatggcagagcatatttctcaattcttatggaccactgtatacattcattttattatatacagttgccgaatactactgttttctgcataacgtgcttggtagtaattggtactatcaccagcagctgctttgctccggtttttctttgggtgagttgaaaagttgccatattgctgtgtgacgtacgtgtaatcagtcagtcagttattgcggtccaaccacgtatgtcgtgaccagagaaaaccagtgcagaaggcaccgaagcttagctgctcctccgccgccgtccgccggccaactcgtcgttgtcatatatgagtgaggcttagtgcttctccctcctcaacgtcgccgccggccgactcgccgtcgtaccgtgaggctttattggctccgatgaggcagcggttgatgctactgttcatccacgaattcggcatcggatataaaagggcatccaaaaccttaaaataatcaaattcaagctgttcccagaaaaatcaaaatctcaacacctgatatccaaaaacctcccatatgcctcaaatgttaccatagacgacacgagtttgatattgacggctagctactagataaacttgatagcagaagaaaacacaacatgccatgttgccatccatttgaaccaatcatatgatctctcttgttttctcaatcctcattttgatttattagttttacatagtagacaaataaagagtaaattgtcccggtatatctgtgatggtattttcaaactcgttgacggataaaactaatgatacggggcggggggggggggggagg

SEQ ID NO: 7343 - DNA, 3481 bp, Oryza sativa
gccgctcttttctagtggatccccctcactggcacaattggtttctgtgcctgcttgtggttcacgagattgatttactcatctgtgaagattgactaggcgcagagttgctatacatccggcttccaaaagttctgtatgattattgtggagaattgtgagacgaggatcagaatccactctgtattttaccgattttcgagaaaatttatatcgtagttcttagcttataaaccacttgtgttcattcactataaatgagatgatacatctttgatatgaagttatataaggctagttacgattgttagtttcgtatggcagagcatattattctcaattcttatggatctctgtataaattcattttattatatacgggaccgaatactactgttttctgatcattttttacccttccaagatagtatcaccagcagctgctttgctccggtttttctttgggtgagttgaaaagttgccatattgctgtgtgacgtacgtgtaatcagtcagtcagttattgcggtccacccaggggtcaacggtcaaccacgtatgtcgtggccagagaaaaccaatgcagaaggccgtctcctccgtcgccgtcgctgtcgccgccgtccgccggccaactcgtcgttgtcatctcccagcacttccggtatcatatatgagtgaggcttagtgcttctccctcctcaacgtcaccgccggccgactcgccgtcgtacgtgaggctttatggtgcgtggtggcggcggtggccgcgctgctcgccgcgccaccggtcgcagctgtgttcatccacgaattctacaaggtactgaatctgatacgctctacatggtatctgtctcctttggaattgatctgctgaacattaattggtctaatcttctgaattgtttgctttgtttcttgtgttcattttcacagggagatgaggttttggtgaagatgaacgagctgatgtccatcgagactcagatcacctactcgtactactcacttcccttctgtagacctgacaatctaactgaaagtgctccgactctttggcaacttctccatggtgatcgccaacagaggtccccttaccaggttagtcacacactgccacctgccagggttttatcttgggttctatcattttttttttgtctgtgaagatcttggattatcatttttggactgcgaattgatgatccaactttgcgttttcactgtagtttgaaatgagagtgcccaagaagtgccaaattgtctgcagagtgcttgttggagaaaaagaagcgaaggagctgacggagaagatggaagatgagtaccgtgtgaacatgtaaggattgtagaggttagatttacattttctaaaaacaccgcaaagtttgtgagagatttaatgaagttgaattacagggctcttgacaacctcccattaagtattccaatcagaaggatagataaagatgattttttctatcagcatgggtaccatattggtgtaattggccaattctttggagtgggttcatcttctcaaaactctttttttagatgaaagatcattatattgatcttctcaaactctttatttcgctaaaatctttagttaaaaagaccctcatgcataagcatttttccgcaggaggagcataagaggtacttcatccacaatcacttatcatttttggtgaggtacaagagggatatcgacacaagtgcttctacaatagtggcgtttgaggtcaaaccattcaggttttgccaactttgcttcccacattttattcagcatgaatgagtaccatctttaccgttcttctggttaatttccttttgtcccagtgttaagcaccaatatgaagcgcaatggaacggtgcaaactctcgtctgagcacatgtgatgctaatgccaacaggttcatcttatcctctgattctccaccggagattgaagtcggtgaagaaatcatattcacctatgatgttaactttgaggtggctttcatccttcccttttatcatcctttcacctgtaaattgtatcttctccctaaaacagacattaatcagatattaaacctttctctaatgatttatcacatgcttgtgctactgctgttacaggaaagtgatatcaagtgggcttctcgctgggatgcctacctgtcaatgacagatgatcaggctcgctggttttccattgttaactctcctgttaccctgattggtctttctgttgcaatggccatgactatgcttcgaagtctgcatagagatatctttagatacagccaacttgaaacccagaatgaggctcaagtggaaaccgggtggaagcttgttcatggagatgtgttccggcctccatccaaccctgtcttgctctgtgcctatgcagggagtggtgttcaactctttggtactcatcaccgtagccttcgctgcgctgggcttcttttctccatcaaattctgcaggcctgagaaatgttgtgttgctcacctgggtcctgatggggatgcttgctggctacacctcttctcgcctctataagatgttcaagagcggttcagagtggaagcatatcaccatggcaacagctatccagttcccgggtttcgcttttgttatcttcgcaatcttgaatactcttctacaagatgagaattcatcagccacagttcctccaaccacaatgtgtgccttggtcctcctctggtccggtatcacgccgcctctcgtgtttcttggaggatatcttgggtacaagagacctgccattgagcctccggtggagatcaacaaaactccacgaaagattcccaagcaagcatggtacatcagccctgtgttctccatcctcattggtagtatctttccatttacaattgttttcattgagctcttctttggcctcatcttcatctggtatcaccaattctaccgtggatttgggttcctcctcatcacgcttgttctactcctcgtcgcctgcgctgaaatctccgttgcgttttgctactatcaactgcgaagcggcaactacaagtggtggtggagatcattccttacaccaggatgttctgcagtctatctcttcttatatgcgacattcttcttcttcgcgaagctgagcattgttaagccagtgtcagtcatgttctactttggatacatgcttgtcgtctcatatgccttcttcctgcttacaggcacaattggtttcttctcttgtttcttcttcacgaggtttatttactcacagagggcatttggatgaacttgagattagaattttggaattggaattagaattctgctgtgattgtaactccagtttgttacagtcacctctgtgtcctggaacaggagagcttgtcaatggcaattccattccagttattccaagtcccagggataattttttttccaagctaaacatgagaatgatagtatagcatgtgtgctact

SEQ ID NO: 7344 - DNA, 15120 bp, Oryza sativa
tattttgaaatcatgtactgcatagcatgcaacaatctattattacatttttcttatccttgtatttaagcaacgtgtggtaaagactcttgtaaaacaactctactctaaagaatatatggaaattttaaaaatgatttgaatcctccaatgtttgtatgaaaatcatctgttaaaatttttatgaacaagaagggggtttttccaatcttacaaaaatctcagcagcaattctaccatccaaatgactaaaattccactttgaaacaatggattgagaatatggaatgaaatttcctttagagattttgaaggaaaataatcatgaggtttcacctcaagtttttcctataactttaaattcctatgtatcaaccaaacgataggtttaggaccttgtttttagaaaaaaatttaatgagaacgtcattctattttacaatcattcatttagggccccctttgattcaaagtaaagttagaggaattttggaggatttcattgctatggatttttttttcataaatggccctttgaatcaaaggaatggacaaaattgaatgctataaaattcctatggaatgcttcatgccatgcaattttcaggaaatctaacatgaggtagaacctcatggaaacgttcctttgagtttttatctctcttataatttctgagtttttcttgagatccaatcaaacgattattccggtgttttttctgtgtttgacaatcctttgttttccacttacattcctgtcaaaatcatacgttttctcaatcctgcgattcaaagtggcctaaaattttcggagctcacaaaatgaggcaagggttgtgagcgtcctaggactaaggaatattttcctatagtacagtaaagttctttgccttgttcaaattcaggaactagggcctctttgaattggagaaaaaaatacagaagaagcaaaggaattggaatcctttagaaaaggttaatgttcattcctttggttcttaagaatgagcaaaagaaaaacacatgaaactcgcatttcctaatgattctgaaggcactactatagaaagtgtcataggtgtcagttaagaagcctctatacgtgtggattttctagccagcaccacagagacggcatagatgaccccgagtcattggtgtcatttccacaactaacacctttgaggcactcgctaagcgaaaaaagattggctcgatgcatcggctcgaatcgaggttctcccattgccccaaatccaaattcaaatccccgaatcaaaattagatcgctaccaagattgattgacatcacaaaatcatgaacatatatagaatcaacaaaagaaaaaacatccaaatcagcaaaacccgtcggtatgcacttgacgacattgagataaggccgacgccaccacggatatggtgtagggcaacgacgcccccggggggggggagcagatccggaggccctcaaggttgggcccgttggatctgtcatcggtgccaccaccctcgccgtcgctgatgaatccactggctggggagaggccggccgttacctgctagggaaaggtgccagcgaagagggagagctggaatgagaggaaacggtgctcgcaagagaaaagaaagagggaggcgtgggcgagagagagaacaggctaagggataaggacgggagagagagggtggctaaaaaaatttctcgtcctgatggtggctcggctcagtttttctaatagatgttggttgttttagaaccgactcctatactacatgtgttggtttttatctagaaccgacacctataatataagtatatatgctattttttttaaaaaaaccaacacctatactatgtgtgtcggtttttatctagatttttgcctgatagaagtgataaatggaaaataggtgttagttttaataaaccgtcacttagagccgtaacctataaggtattttgtagtagtgagggaaacatagggcatttaacatcgactataagctcatgtttttttttctagctcacgtaagatcgaggcaaatctagggcctgtttgggatagttttacattctgagaaacagccaggggcggatccaacgtgggtgcaggggggactcaaaacccatggatacctcaggagcacccccttcgattttttcaccataaatgataaactaaaggtctttaaatagctagaggttgaagaaactgtgtaattgagcctccccaattttttgttcctggatccgcccctggaaacagcgagaggggatttagcttgtgagagtatgaagaatttgggaaaattagcttttgggtgtgtttagttccacggccaaaattagaagtttgactaaaattgaaagtttgaagaaaaaagttggaagtttgtgtgtaggaaagttttgatgtgatggaaaagttggaagtttgaagaaaaagttgggaactaaacaaagactttgtcttctagtttatttgctgaattcaacaactacttgttctcaaaacctaaggccttgttcggttactagggatttaatccccaaggggaatcaatccagggagggattgagtgaatccctctcatgtcactcaatccctgttggggatgaatccctccctacccactaatccccctctcaaatccatgtgttcggtttggtcaagatcaacaatagcaggattggtgctttcctgcttcaacgctgctattgagttgatgttcagcttggcagtttatatgcatcaacttcagagcatcaaatggaggaagcatcaaacatagcaacggaatttgataatatcttatcgtacaaacaaaatatactcagtggagtaattactgtaatctccaatgaacatcaaatgtcacttttgcttttcgtcgaaacatagcattatctaatataagttagaatatcgatcagtcctagcttctacagtctatgcttgacggagcgtggggctcctcaccgggagaccgcgcaggcccccctttgccggttcggccggggaccctaggtgagactctaagctcccaatctgtatgtggaaggttcgcgagaccggaagcacagaagacgccggcgatgtatacaggttcgggccgcttagaagcgtaataccctactcctgtgttttggtggattcgtgtgtgaaggagctacaaagtatgagccagcctctcccttgttctgggttcctaatctggaaaagtccagtccaaaaaaaaaaacctcccttctctcagtgggcaaggtcctccttttatatcttaaggggataccacatgcaccatccccccctctctgtggggacttaccctaccttttcataaatggacggagatttgcatggttgccgttcgagtcaccttctgatgggacggcccgcacctacctccactttcgccgggagcaggcgcgacgcggaatcatggctgtctgctgacgacatgacctgtgtcagactggtcacaaatcggtcattcttgtccaccacgcgtcagcttagcaatctgcacgttggcccttcttcacacaacattttgcctgtaatggttaggatgaagcctggcatatatctgaccaggactaacgtgccatctctgggaggtaacacgctagctccagctggggacgagtgcctagaagccctcgtcctgacgggatggggcgaggcgtgcgtcagatcgcctgtcgccacctaacccgcgatctgaccggtctgtgactggtcacagaccggataaatgagtgcactgcaccgcgttacatgcggcgtgacacgctcagccaaaccgcaataaatgtggttaggtgagccccactgtgcccacctaacccatacacgcggagcgaaaacccacgaggggtcggggcgcctcggccctcggggccgaggcgggtgcggctcgaccccctcggggggactaagaggagggcgaacaccaccctcgggcccgacgtcccccgagggtgccaggccacgtgggcgattgtgtctgcctcaaacctctagtcatgatactcccgatcccatgtcaccgacagtagcccccggcgttatgccagggcgatcgccctccttaagggaagcggtcgggcgtgacgccactcctaaggcctggtgacatgtgggaccggtctccacaattgggcagaaacccaacggtcaaaaatcacgcacatcggcaatggtaactcggctgtcaataatgagcggtctcttcaagactgccacattactcgagtagcacacgaatctggacatggcgattcgtttcatctggagatatggtaacgtcgcttcggtcggcgagcgtaattaacgcgcgcacgatatgatctatctcgacctcatgcaccgcaagcgggcgaatgggattagtggaagcgtgggcgcgagaaacgagggggcgaaatagtgggcgcgagaagcgaggagccgggcacagcgttggcaagagtataaaggcactgaggaagggatttgtttccttcctttcgccattattccccttgtcttcgccgcttgcgccctaactccttctttcctgtgccctaccttcgccacacgcgctcgctcttaatcttctcttccttccggcgccatggcacggggctccgctctgctcgatggtagcgtgctgccgccctcccgcatcgtgagcgagaggcaggctgggctgccgcgccgcttcatgccggaatctgccaccggccgggagatagtcacgctgggcgagggacgcccggcgccagactacccggggcggtccgtcttctttctcccctttgcaatggcagggctggttccgccattttcttcttccttcatggatgttctggagttctacgatctccagatggcgcacctcacccccaacgcgatgatgacattggccatcttcgcgcatctgtgcgagatgttcattggggtgcgcccatctcttcggctgttccggtggttcttcaccgtgcagtcggtgtcgccgccatcggtagttggtggctgctacttccagccacgggggccggtgccgaaccgctacatcccctgcgccctccgcaagaagtgggacgactggaagagcgactggttctacaccccccttgccgacgaagtgcgcctccgacttccgagccagcccccggctcaggcctccagctggcgggcgccggtagatctgggggatggctatgacgccgtcctcgaccgcctggcgggcctgcgatcccaggggctcacaggggccatggtgtacggcgactacctccgtcgtcggattgcgccgctccagcggcgcgctcgaggcgcctgggagtacaccgggtccgaagacttcatgaggactcaccagggagtgagatgggactgggctcctgaggacttcaagatattggtccaacgggtgctgaatctcaactccgtggaggcggccctcattccccaaggaatcctccccctctgcagcgatccagaccgcgcctccatcctgaccattatgatggcggtcggggcctcagaggagcgagctccaaagggccacgacggcgcaggcgggagccgccggggggaacaatctaccccgagagggggtcgtgcttctgggtcccgcgacaggggcccggggagcagccgccctgccgacgcccgggggaagaggaagcagggaggaacacctcccccatctcctccccgagggggcggggcggcgcgtgccagcagcaggcgcccggagggggccgcgccaacatcgcagcccgagggggagcgcaagaagaagcggccccgcaagatgggggagacagaaccatctcggggaaacctcatttcccctccaaagtggtcgtttaaccgaccccctcgcaggttcgtctctcacccatcgtggctgtattcattctctcaacgcgagttttcactcacccatctcgttcgtcttctggtcttttcttttgtttcagcgagatcccgtcgcgtccctcccgccattccaagtccggccagcctgaggccgaggatccggcggccgcagaggcccggaggcgggaatctgaccggcgagaggccgcggatcgcctacgggtagccgaggaggccgtccaggaggccgcccgggctcgccaggccgaggaaaccgctcgggagggagccgcccgggcctgccaggccgaggaagctgcttgggaggaggccgcccgagcccaccaggccgaggaagccgctcgggaggaggctgtccgagcccacaaggccgaggaagccgctcgggaggaagccggatttcgccaggacgaggcgatggcaacttccgaggcagctcgcgacgaggccgcgggcgcgtcgcttgggcccactccctcgggcaacgctcaggcccaaccaggtccggaggacatccccgcgtctggcacgtccatcggcgggccgagccgcgtggcatcttctccgaggcggcttttccccacgccttctgctgccctactgagcgcagagccccttctgcaagccttggccgccgcaaacaccacggtgttggatgggttaagtgcccaggtggaggccctgcaggcagagcgggcggagctcgacgccgcgtgggcgcgcgtcgaagaggggcgacgctcggtggaggccatggtggaggtgggccgtaaggctcaccgccggcacgtctcggagcttgaaacccgtaagaaggtgctagcggagatcgccaaggaggagcggggggctgccctcattgccaccaccgtgatgaacgaggcgcaggacaccctccgccttcaatacgggagctgggaggcggagctagggaagaagctcgacgccgcccagggggtgcttgacgctgccgctgcccgagaacagcgggcggcggagaccgaagcggcgtcccggtggcgcgaagaggcccttgaggcgcgcgccatggcgctggaagagcgcgtctgcgtcgtggagagggatctggcggaccgcgaggccgccgtcaccatccgggaagcaacgctggcggcgcacgaggctgcctgcgccgaagaagagctcgcgctccgcctccgcgaggacgcgctcaccgagcgggagcgagctctcgagggggccgaggccgcggcgcaacagctagcggacagcctgtccctccgcgaggcagcgcaggaggagcaggcgcgccgtaatctggaaggtgcccgcgccgagagggctgcactgaaccaacgggccgctgagctcgaggcgcgggagaaggagctggacgcaagggcgcgcagcggcggggcggccgcgggcgaaagcgacttagccgcccgcctcgcagctgcagaacacaccatcgccgatctgcagggcgcgctggactcgtccgccggggaggtcgaagccctccgcttggcaggcgaggttgggcccggcatgctttgggacgccgtctcccgcctagattgcgccggtcggcaagtgggcctctggagagggcggatcgtaaagtacgccgccaaccagggaggtctcgcccagcgcctctcgaagatggccggggctctccaacggctccccgaggagctcgagaagacaattaagtcatcctcgagggacctcgcccaaggagcggtggagctcgtcctggcgagttaccaggccagggaccccaatttctctccatggatggcgctggaagagttccctcctgggaccgaggaccgcgcgcgtgcaagtccgggatgccgccgaccatatcgtcgacagcttcgagggctcggcccctcggctcgcgttcggccccaactccgacgaggagggcaatgccggtggtgcagacaacagtgacgacgaggccggcgacccgggcgcatcggattgagcccccagacccccgccattcttcagttttttcttcttttctttcttctaaggccttcgggcctcttttttgtatagatcaacttaatctgtaatcaaaaatgaagaaatttttgtgtcaattttatcttgctgtgtatatgagatgaggatgatctgtgccgtggtccttttgtgtcttagcttgattaagggttcgtgcccaggtcccagtcctcaaaaggcgcgggtcggggctagtgcctgggagatccacatgtcgagactggccaggccgggaacgtggtgaccgagggttatggatgacccgattgtgggtttttgccgattcccccccggagttcaccacgccccagggcacggctcggttctgggccccgtttggcgaatttagccgacccgagcccccgagggcaggattgagcacgagtgacctatttcaagtcaagattcttcaaaaggaaaaaacagcacagacacagcctttaggaaattgaaactgcttttattgaaatactgaaaaaaaaaagaaataagaatgtgcatgtgtggcagcccccggccaaccctgcacgcccgagggggtgcggggttggcccgagcccgaaacctgacacccgaccccccctcaggggtagaagcgacgaaggtgttcgatgttccacgggttagggagctcagtgccgtcgcccgtggccagccgtatggagcccggccaggggacgccgaccactcgatacggaccctcccacattggtgaaagcttgctcaatccagcacgcgtttggacgcggcgtaggacgaggtcgtcgatgcagagtgatcgggcccggacgtgacgctgatggtagcgccgcaggctctgctggtagcgcgcggctcggagggccgcgcgccgccttcgctcttccaagtagtcgaggtcatctctgcgaagctgatcttgatcagcctcgcagtacatggtggctcgaggagacctcagggtgagctcggatgggagaactgcttccgcgccgtagacgaggaagaaaggcgtttccccggttacttggcttggtgtagttcggtttgcccagagcaccgctggcaactcctcgatccatgaatcgccatgcttcttgagtatgttgaaggtcttggttttaaggcctttgaggatttccgcattagcgcgctccacttggccattgcttctggggtgggcaggtgaggcgaagtagagcttgatgcccatgtcttcgcagtagtcgccgaagagttcactagtgaattgggtgccattatccgtaataatacggttaggcactccaaaccgggccgtgatgcccttaatgaatttaagtgcggagtgcttatcgatcttgacgaccggataagcctcgggccacttagtgaacttgtcgatcgcgacatacagatactcaaacccgcctggggcccgcctaaacggtcccaggatatcgagtccccagacagcaaatggccacgaaagtggtatggtctgcagggcctgggccggctgatggatttgcttggcgtggaattgacacgctctacatcgccggaccaggtcgagcgcatcattgagagctgtcggccaatagaaaccttggcgaaaagctttaccaaccaaggtgcgcgaggcggagtgggctccgcattcgccttcatggatatcggcaagaagcacaacgctttgttcccgaggaatgctcttcaggaggattccattagccgcgcgccgatagagggtcccttctaccagcacgtagcgtttggagatgcgatggacgcgttcactcccttcgcggtcctcgggtagagtcttatctgtgaggtatgcttggatctcggcgatccaagcaatcaatctaagggagctgggagcactcccctcgggtcccgaggcctggactccgacgggcctcgggggccggtcaggcgcatccgtctcccctaaggggtcgggtcgcgccgacggctgggcaagcctttcttcaaaggcgcccggtggggtctgggctcgcgaggacgcgagccgtgagagctcgtcggccatcatgttatcccgtctgggcacgtgccgaagctcaatcccgtcaaaatggtgctccatacgccgtacttggcgcacgtaggcgtccatctgcgggtcagagcaccggtactccttacagacttggttaacgaccagctgggagtcgcctaacaccaggaggcggcggatccccagtccagctgccactctgagtccggcaaggagtccctcgtactctgccatattattggtcgctcgaaagtcgaggcggaccaagtatctgaggacgtctccactcggagaggtcaacgtgacccccgcaccggcgccctgaagagacagggagccgtcgaactgcatcacccagtgggcggtgtgaggcagctgcgaggggcccgagctggcttcggggaccgagacgagctcgggagccggggtccattctgccacaaagtcggcgagggcctggctcttgatagcgtggcgtggttcaaagtgcaaatcaaactcagaaagttcgattgcccatttcaccacccgtccagtaccctctcgattatgcaagatttggccgagggggtaagacgtaaccactgtaacccgatgcgcctggaaataatggcgcagtttcctcgaggccatcagaataacgtaaagcattttctgggcctgagggtatcgggtcttggcatcccggagggccttactaacaaagtagacgggccgctgcacctttcggtggggccgatcctcttcgctaggggccgcatccctggggcgctcttcacccaagcggcctcgcggggcgcactcgtcttctgtgccgacgacctcgggatcggaggacgacaggggcggccttcccacagtggcctcggggccgtcctgggggtcgggggctcctggcgtcgtcggacaagcgggcaaagggccaactccggtcgtcaggggccttaggccaccgttcggctcgggggcctcttctccctgctctctcccgggtcgaatcggcacagggttagcctcggggtcagagggcgataggtgcggccttcccgcagtggcttcggggccgtcctgggggtcgggggcacctggcaccgtctgacaagcgggcagagggcctgctccggtcgtcgggggccttgggccaccgtccggctcgggggcctctcctccctgctctctcccgggccaagccagcacagggtgggggtgcgcggaatgaggattgtcctcatcgcactccacaaccaacgccgcactaaccacttgcggggtcgccgctaagtagagtagcaagggttcatttggctccggggcgaccagaactgggggagagctgagatacgccttcaactgagtgagggcacgttcagcttcctccgtccaagtaaacggcccggagcgtttgaggagcttaaataagggtagcgccttctctcccagcctcgatatgaaccgacttagggcggccatgcaaccggtgacgcattgcacatccctaagcttgctgggggggcgcatccgctctatagctcgtatcttctcggggttggcctcgatgcttcgggcagagaccaagaacccgagaagcttgcccgcaggtataccgaacacgcacttatcggggttcagttttatgcgggcggagcggagactctcaaaagtttccgctagatccgagagtaaggtctcttggttgcgcgtctttacaaccaagtcatcgacataagcctcaacattacgtcctatttggctacccaaagaaattcgagtagtacgttgaaaactaggacctgcattttttaacccgaagggcattgttgtataacaataagttcctatggggtaatgaacgcagttttttcctcatcctccctagccatgcgaatctgatggtaaccagagtatgcatctagaaaacacaaaaggtcgcaccccgctgtggagtcgacaatctgatctatgcgaggcagggggtaaggatccttaggacatgccttgttaaggtcggtgtagtcgatgcacatccgaagcttgccgttcgccttgggaatgaccaccgggttcgccagccactccggatggatgacctcgcggatgaatccggcctccagaagtcgcgccacctcctcgcggatgaaggcttgacgttccggggcctggcgccgcactttctgccggaccggccttgcgcccggccgtacggcgagacggtgctcaatcacctccctggggaccccgggcatatccgccggtctccatgcgaagacgtcagcgtttgcccgcaggaaagagacgagcgtgtcttcctatttgccgtccagaagaccaccgatccgtgtggtcttggacgggccgtcgcccagggcaacctccttgaccgggacctcatcgcacgtgactatccgctgcctcggggcggcgggggcggatgtgccaagcctctcgtcgccaccctcgggcttggacacgacggcgaggcggtccgcgcgctgctccatacaagcgagcgcgactttgaggtcgccatggacagagatggggccatcggggcccggcatcttcatctggaggtaggcgtagtggaccgccgccatgaactttaccaacgcgggcctccccaagaccgcgttgtagggcagactgaggtccgcgacatcaaagttcacccgctccgtgcggaagttggcgggtccaccgaaggtgaccgggaggtcgatatgacctagcggccaagtgtgccccggcgtcacaccgatgatcggctgggacggccggagcatcatccccggggccttgatggcgtcaaaggctgcgggggaaaggatgttgagggctgctcctccatcaatgaggacacgccccagcttcacgttgcaaacagtgggggaaaccaccattgcgatctgtcctccccgggcaacgcacggtgggtggtcggtctggtcgaaggtgagggcaacctccgaccaccgcgcccggcgcgtcgcctcatgagtaggggccgcggccagaagctctcgcttcatggccttgaggctccggcgagaaacgtgagcacacgctcccccatcgacagtggcaacgatggccccaggctcttggaaacctaggtcatcatcgccgtcatcgatgtcctcagcgggggccttctgcttggcctcacttcgccgattgccggaaggaaccgccggggacttgccctctcggcgctcctgcctcctctcctcctcccacttcctcgtccgctcagccaaacttttgactgcacggcagtccgcgaggtcgtgaagggaagtgttgtggacggtgcaccacttgccggtcgggcgctccctgctgggagcgccggcctccttctttttgtctcccgcaggcctcccctttcgggtggcccgcggagcgccctcgacggcgaggacatgaccctcgtcgtcggtatgggctgacctcttcttcctcctcctgtcacgccgccctgtctgagcagcggatccgggggcggctgaagctgccacaccggaaccggaggggttccaggtccatgcctcctccttacgagccactcggtccgcgagctgaaaaagctccgcggtagtctggggctctttggaggcgatcttttcgagcatacggttgtgccgcacacccccctgaacgcgtaaatcaccgcgtgtgcagggatgcatggtatggtgttgcggacttgacagaaccgctgaatgtacgatcgaagtgactcatcgtcccttcgctgtactgcgtgcaagtccgcttcctcaccggggcgcggatatgtgccttggaagttcatggtgaactgttggcacaaatcctcccaagagtggacagacgcgggtggcaagttcattagccaaccccgcgcctgtcctttcagggccatgggaaagaaattcgccatgaccctgtcgtcacccccggcggcctcgatcccggtcgtgtagacctggagaaactcggcggggttgacgctcccgtcatatttttcggcgatggtgggccggaaccttgggggccaacggacattccgaaggctcgccacaaaggctctacaaccgacaccaccaaccgggggcacggagggctggtccccgcgtccgtgttgaggtgacactctggacgaggaagcgccccctgttgcgtgggcagcacgtcggtcattacgccggcgctcgatgctggtgcgggcgtccggccccccacgcagatcttccgggtcgaaggagtcgacgaaggagtggctgccgaatggcgaacagcgcctgccgctcgtcgtgccctccgtcttgacgacgcggagccggtggtagcagcaccagaggccttggtggcggaggaccgcccaccagcatctaggcgctgccgtgcagtcatgaccaatttggccacatcgtccagccaacgttgggctggagactccgggtcatgggcgacgggcgggtgacgtaggagcgcgcctgcagcttggagcgcgccctggggcgtgctgccgtcgccgtagacgaggagacgacgctccccatctcgccgcccttctccacctcctgtggatgtcgaagtcgtggatccttcagccctctcgagcgccttttcccgcctaggactttggcgtggagggggcggtggagtacgagctcgacggcgtgggtttggctccccatcgtcaccgctcatacttggggagaggtcgcgcgcctttgctggctcggccattgggctgaacaggaaaagcttggtgcacacgaaggagtgcgagagctcagaagatcactcgcagagtcccctacctggcgcgccagatgacggagcgtggggctcctcaccgggagaccgcgcaggcccccctttgccggttcggccggggaccctaggtgagactctaagctcccaatctgtatgtggaaggttcgcgagaccggaagcacagaagacgccggcgatgtatacaggttcgggccgcttagaagcgtaataccctactcctgtgttttggtggattcgtgtgtgaaggagctacaaagtatgagccagcctctcccttgttctgggttcctaatctggaaaagtccagtccaaaaaaaaaaacctcccttctctcagtgggcaaggtcctccttttatatcttaaggggataccacatgcaccatccccccctttctgtggggacttac

SEQ ID NO: 7345 - DNA, 13777 bp, Oryza sativa
aatacagaatcagcaagtattaacgaccaatgatgctcttcaagttctctgtttctggatgacataagccactccacgtaccacgtggatcttcagaagaatgtttgcttcgatttgcgtcagaacgatcagctttcgaaggcagacaagtgctactacttattcacactaactggggtgtggctcagcaaaaatatgagccttgacagttaaatgaggaagtttgttttgcatttcctgaaatcagctgatcagactattagaatgacattgaattgatactgctttaccgcaattcactttggtctcctatgtacctgcagcctaccaggcagctttcatatctcagtatgttttagcttctcccttcgctttctcgcagctccaagacattcatgtggattagcatagaagtagtcctcttcctttggctgcccggcaatagctttccttctggtgggttcgctcattcggccctcgtgtagctccttcacagcagtagagaattcgtcccaggacagctcctgatcttcaagaagatctataagctcaactagctttttcctatcaagctgtatggttttgtgaaagcccataaacctgcatttccaacataaacatttgcagttaacctagtggtggtgttcttctaaactagtctttctcactattgtgatgattcttaaaagcaaacatataccatttctcggacaaaaaaaggaacacctataaccttgtgacaggacacagtgcagatgtaagtgtgcacgccaataaacattttgttccactccttactatacttaacatattgcagtaatacacacacaatggcaagtcaaacaagaacaaacagaaggaatatcgaagtggcagacctgcgatgtccttctacaaccttagccatgtttccgtcattactggggataaaaacatcactagcaatagacacaagatagtccagggctgccatttgagtcgaatgcttctggaaggggcgtaactcatcagcagataaaagcatctccttccgaatctaaaattgcaatagtggataagcatctttctagcattagtatatgttttcatgggcgttaaattatgatgtgcttacaatgttagggaattctgtcttcagttcagttaatcttttttcaccaccatagatttcacccgaggcaatatatatccgagtgtccctggggaaaccaagagctttgagtagtaatgttgtttctccgggtgttagggggcataatccttcgagccttttcttttcagaatctatttctttttctttccaccaagggtacgcatacctgatgtccaaatagcagataacagtagagattgattagagtctgggagaagtaagtgcagacagttatgaagttcaatatcgaatgaaacctcattctcgtgagctctgctgtttcttcgtcagaacatccatgtgtacaaccagagaatgcaagcatatccatctcgtatctcagatgaagcacaataaaagatccagttttcctaagagctgatatcatctttttgccaagagcctcaattgatggtgcaaattgtagtgcattgtagttaacacggcaacgaagcttttggagctttaaaggaaggccattatttgcaaggcgagaatctgtcctgctaaaacgtaccaccttatgcttccgtactagaggcaagatctgaaagcaagagcactaaaaaagtcaaaagaagcagtggatagcatagaaatgtaaggccccctttgaatcataggaatgaaaaaacggaagaataggaaaaacataggattctcacaagaatacaagtgtaaaacagaggattacaaaacacaggaaaaacattgaatgaccgtttgattgagccgtaggaaaaacacaggaatttgaggagagataaagactaaggattcttaacatgaggttctacctcatgctaaatttcctctaaaacttgcatgggaagaggcattccataggaatttcataggattccataggattcatttctttgattcaaagggctatataagaaaaattcctataggaatgaaatcctttaaaattcctatgaatttcctttgaataaaagggggcctaaacctatgccttggaggaagattagtatcaacctgtctcaaatagtacttctcgctagaccagctgattggctgcattgagaatggaactttcctgctgaatttctgtggcagttccctgatgatctttacttcatcttgtaaagaattgatgaagtggtttacatcaaaaatatctccaaaatcactggaaaatataactacattgaatcaataatagtgcattctaactgtaaaatcaatcatgaaggaagtgagaatgtgggactggtgggaaaaccacacacctaggatcagcccagaaggactgcttatcaagttcaggtaccaccatagtcaggttcatatagcgtgctacagttaccatgtcacatatctgcagaaaacaaacatttctgcaacattagtaaaacataattacacaggttttattgtagacagaagcattgtgagatactaccgcagctcgcatttggttcagaccaccattgcatgaaataagaagataaccattactcttataaacccctgcatgagagattgtactttatcagactgaacctatcattaaaaccaagacatgctttgtattgttctgttgatattgctaccagaatgctgtatatgccaagggtgaagctagatggggtaaattcaagtaaaatcgagcaaacttcattcttgaggcatcaggtcctctcgcttacatataatggtaaaaaggaagctagaaattatttctttttgaagcctatcacccacatggtgattggaattttactttgcaagggaaaccacctcctaatttctattttccagcttcatgtgaaaataaccaaaacagctatcctggaaaaaaaaattccaaagtgtatccaggtatacaactatttatcgaatcttttttcaggaaacacatttatcattttgttctatgaaggatgcaaatccctgtgtcacatgatttaacaaggaataattaatgaagagagcaatctttatatactactactgctaaaagtgaagcacattccaggttttgctaatcagttacggcttacagcttccaggttccaagttccaacatgtgaagatctcaaattctgacataacgttaacgtatcactagcttcagagaaccaaaatccatagcacaaaatccatcacaacaaaccgtggaactccgttttcgataaacaaactaaaatcggtagcacaaactaaacggtaaatcaagaactcaaacacccagaaccaagaacaggcgctgcgagcaaaaataattcagtcgcaagtctgtcaagacccaaatccccgaacaacaccagtttaacgatccacaagaccacaaccaatgactcagtttagctaagcttattcagttacttcctggaacagttcgatccaactcatgaatgctcgagagcttccacattccactccatccattcagatagtgggaagcgccttacccaagaaccccaaccaagacccgagcaaggaggtcatgattccaagaaccaagaaccgcccagccgcccacagcagcgagatcaacaagacaagaaccactcactcctgcgaggcacagccgggggcgcgaggcgcccgacctcgtcggcggcagcgacggttacagcagaggaggcgctggagttgctgccgccgccgccgcctaggcaggagggccgggcggcgaggagcggcgggcgggggaggccgaggaggctggataaatggaggagggccgtccagagcacgatgctcgaggcgacgcgcaccgcccaccggagcatgccgaccccgcggcggcggatcgccggcggcgagctcttgtgcctggccatggcgccttcttcctactgctactggtataagctacgctttgcagtgctccccactactagtggtggaagggcaaagacggtaagagcagtgtccgttattttgacttgtgcgtgacgtgacggaaagaacagttgggatttggatcggtgttagggtgattattaactgcaaccggaaagtttggtggcctttctcattgcaaggggactagtgtgccgtgcactagtctcgtcctaattcaaatatggcgtgtatattaaccattttgaaggacgtggacacgaggggcagctagggctcggagagagggataggagaatttcactgttttatgtcaataaaatatcatctaaattcacaccacttccaaatttttttatcggagatacaaatttctatccctccgtaccactccctctgcacagtttttggattttgggaaacatgcagaaagttttggcaagaagttttgggtcctgacagaattcctgaattgctcatatttaatgccatgcatgcatggctgactttcaaacttgcttcataggcgatgttgctacaaacaaataataaatttggcatacatgcatggtacagcaaacacagctgccatgcgacgtcacacacatactgacatacaacataaatctcttggcttacatcctccataacagtagcacattacaaatgcagtcaacaattatgcaagcaatagaaatccacaaataagttgtcaaacatacacatcagccgcatacatgacagtccatacgcatgttccaaatgacaaacaaaattcaagaaccgtgtaccaaagcaagtgcaatggaatcacgaaatgcattcatcagatcacaatcatcaaacacttcttcggtctcaggttgatcgtcactagcttgtggcggcacatagttctcatcacagtcacaacgatcgaagtgcttgtcacgtatgccacttttcctaatgaagttatgtagcgcacaacatgcaactataatttgtgcctgtttacgaggatcataactagggatcttctccaacatcctccacttcattttcaaaactccaatgacctttcaatgacattcctaagagatgagtgtgcatagttgaagttctcttccttaccttgtggttcaggggcatcgcgatactcctaaagatgatacttggttcccttgtaaggagcaaggcaacctggccggttagggtacccagagtcgacaaggtaatatttccctacagcatcaaacatgagttagtatgacatatttcaaataacaaagaaggaacaagtaccattcaagcatatacctgtaggtggatgtagaaacacatgggtgtatgttgtgtgggcatcatcaaatactctcatgtcatgtaccgaacctggccatccagctagtacaaatgtaaacctcatgtcaaagtcacagacagccatcacattttgtgttgtcatgcccttgcggcacaagtgctgcacaaacttgttacttggcaccacgcaaggtacatgagtcccatctatagcccctatgcaatccttgaagtagggaaagaacctacggttcctcagtcttggatgcattgttgtgaattgtgggtcagccggctttatgacatcaacggcaagcttgatgacagactgcaaaactttgttaaacagcctacttacagtccccattgacctctcaaatctgtcctcagcttgtctaacagattgtggggcaccaaccatccaaagaaacatcgtaagtgcctcaaccgaggttgacttgctactagatttaagctcatacgactgtaccaatagatcatgcaggcgaaggaacatagttggactcattctaaacatgttataacaggcctttctatccccaagttttttatgtacccattccaaaccagtcatggcaggttgcctatactcagctctagtcaaatgcttgtcaatgtgcatggcatacttgtacataccgtacacataaccgtcgtcatcatcatccatcaatgcaatgatcaactcgtctatctcatcctcccaacgcttaagccgacggcgcgactcctcataacctgattggtcatcatcctctacataacctgattggtcatcatcctgtcaaaacaagcaatgcaaaatattagcaatgaaaaatatatagacatgattaatatgcatttctttctcagccatgcattacatagttcaaatcagcagcatacatagaattcatcaatagtagtaccatgctgatgtttaaataacacacatcgggaacatagtccaaacacacaaatacatgcaccatacatccgagtgaacatacggccattagtacataaagtaggaaatatagccatgacaaaacattagctggactagttgtcgacccctgcatatttcttgatgatgagcatccttccttcaggctcggtgacaatgaacaagtccatcacactttgatacttgatgatttcgaggacacccatgaacaatgttggggtctcagagggagttaccccacactcctttcccagctcgttaacctttgccaccttccgctcaatagctttgcgttcttcttgcatagcatcctgctttacttgcatcatggtctgcaggacactgagtttgttccttgaaatttcgttgtactcactcatgtttctgtccattaccctcactgctggactcctagacttcttacttggactcgaggctgtggtgctcgtgctgcttgtccttttgttgtcgacactaagaggagtcagctcatcgtcgtcctcatcatcatccgcttcatcagagctgtcacactctacaggctggtcggcagtcgcaacaaaggatgtagaaccatccactgcaacaccctcaaacattctgtccatttcaggcaaatattcaggcaagcctttcctgaacttcttccaatcgggatgtccctgtccaacgaaagcacatgtcatgacctgctgaacttaacatgtgttcacaacattagagagacatgaccaatttaccttggtgttggcagcccaccaatcatcttcggcgacaacagtcccatcagggttcctccctaagccagagctggagcgaagcttattacagaatgcccattgcttcctaagctgcctgtgtctccccatgaattgctccctgttgtgaactaaaccagtggcttggaagtacctcttaatgatgtccctccagccatttttttgcataataccgcgaacacagtttcctatgtccatttgatggcaccagatggaacagaaggtgcgagtatttctcgctgaccaatttgccttatctttcctaacctaaatgcatcaatagtcatggaaaacaacatcgaacatgtgaactaagtttgcatttaacaaaattttaaactagtcggaagcaggcaatcaattgtaattggaattgttgtacgtaccggaataccgtcgttagcatcggagtgctcggccgcaaggtccgagacattgtggcacactgatgcgcgtgatgcaggccgtgcgctcacggccacgcctcctcctccgacgactgcgcctgcgactcctcctccagcgcttgcggcccctgctcgtcctcctccagcggccgcgccttgtactcctcctccccccgcactgcgagtgggccggattccgagggtgcgagatattcgccggggaggaacttgaacgggcggtggaggaatttcgatgttgtcgtcgtcggcctgcagcatgcccgcgtacgtagccatttctggccacccgtcgctgtcgttgaggtcgagcgactcgaaccgcacccgggaggtgttgccgctagaggaatcaggcgggggatgcgccgcgtcagcgccgaccgcgccccctcggcgtgcgcaccaaggcccggacgcaaggaagtccttggtgcagccgtcgtggccgtacacgtcgtcatcgtggcctttgccgccttcgttgccattgtagccgcccccgtagctggccatcacgggaatgaaggcggatctgggcaccgacggtgaatcggaagggtgggcggcggcggttggagggatgacgtgtgtcggcgggggagggacgaccacacaagcggtggaagaattggagttgggcggcggcggtgtgagagacgacgggcggctccgctatgagcaacgaatgccggagcagcagaacctgctggatctgggcggcgggggtctcacggacagcgagcggcggctggctattttagggagggcgagaggcggctgagagaaggagggcgagcgtaggggaggagggggtcgatctgggagggggcggtgtcagggatggcatgcagcagcggtgggacgaacgaaggggcgagcggctgtgttggggattttggtggagcgacgaggagcagggtgaggggtactactcgtccatgggtgaacagtaattgcacatctgccaaaaaattttgccccccgtttagttcacaaaacgcaaaaagtggccccatgccaaaattttttggcccatcctaaaagatttcaccatctaaaccgggcactatccgtgcataaccgttcgacgccaacgagtcatcatacctgagcttaagcttagccactgcatgtgtcgtaccccgctcgcgtcttccctgagcttgtgccattcccaagcttggtcaatagctgccgcttgccccataacccgcttgcgtcgtccgcgagcttggccgccactaatccgggataccaccattgttctcgagctgttggttcaacctctacccgccatccccaagtcagtcttcgcctgagctatcccaggctcaacctcgagtagtgcttgcagtcggtccattgcctactacctagcagcaggaggagacagcggatatgttgccattgcagttgcgtcagcctacaacaacagacaaagagtttgaattggcggctcgcacatggtgatggcatcctgaagtggcgatgggcatcagacgaatggtgcggaagggcagaaggagtggcacgaaatcgagaaattcacatcttcgatgtatagatggctaaaaggcccggcccaggcacggctaggcacagcccaccagccatcaggctggcacggcccggtcggcacatcgtgccagaccgtgctggcccatggattgcacctctggcctaggcacggcccaccagtagtcgggccgtgccgggccagcccaacgtgccagtggaggggcccaggcacgacccggtggtcgggccggaccagcatgggtccaacccccgtcgggccgtgccgtgcttgggccggaccaaaatgccatgccgtgggccaggttgtcgggccttgggccttttagccatttatacttcggtgacacgttttaaaagaagggtgaatttgaggtaatttctaaaaaaaaaacccgatgaattgaatggcaactagtaaaatttatggggagagaagattaggaaggagccgaaaactagtttggtctctggtggtattctaacatgtagacatgggttaagggtaacatttacgaagtgccatttgggtgaagcctaatataatttgataatctcatcttttactctacaatgtatcaaccgctgacaaaatttaaatttaaagttatttttaggatattttcaaagataatatttaattattttttttagcattgacattttagggctctgtttggctatagttatagcgcagccagcacgaaaagcgctgcaaacatataaacaccaagccagcagctgcatcatcaattttccaaacagatctttagtcgctaagtatcttatatataagttctaccccctccgtcccagaatatattggatacggttattaagaaaatatgtagaattaaataggaatgggttatgattggctgagaaatggaggtaggtgagaaaagtgaatgacagaagattatgattgattgtgaagggaatgttggtgaataagttgttatattgtgcaacaaatcctaagtgctcaaagttgttatattttgggactgagggatcagtatttataaattattatttgatcgctaatgagccatttgacatgcaatcaatcaacttttattcgtgaagtaagcgtagcacaactggttaggtttcttatagtggaaccagttcacccacaatcaaatcctaaatttaacatgagtgctctcatttatagctaattattattttaatggtaggcgacgtatccgtcgacaagtccgtagtgacttcgtcaatctaaaaaaatgtcgacaacgagatgtccgtagtgacttcgtcaatttaaaaaatggccagtcttttgaaggtgtttagaggagtagggtgtgtacgtttatagggatgtacatgtgttatgagtatatacatttttattatgttccaaaaaaaatgtaagcttttcttctactctctctatcctaagtgtaattgtaggtttctttgcccaacgtttaaccaaaagttttattttaaaaaaatatgataaaatttaaaaataagttattatttgtgttttatcatctaataatattaaaaattatcaaatgttcaagaaagaaaaccgcaattacacctaaaatgacacgaagggatgataggtctgcagcctgcagttacagctatcccgccctcccatgcttcgagcgttccttccagtgacttccatgaccggcagctagatctcatctcgcaagtggaatgaccgcctcgaggtctctcctcgccgtcatcctcctggccgcgaccgccgccgacgtcgacgccctggtgttcgacgtgccatcgggcggctccaagtgcctgaccgaggagctccgccgcggcgcgctctcccacgcgtcgtaccgcgtggccgaggccacgtcggcggcgtcctccgcggtctcggcgcgcgtggcggggccccgcggcgaggagctgcacctgacggagggcgtggaggccggggagttcaggttcgaggcggcggaggacggcaggtacaccgcctgcttctggacgccacgctacttgcgcggcgccattgtctccatcgacgtgcagtggaccaccgaagtccgcgaccacgccggtggtgccggctccccgccagccgtcgcagccgccaaggaaggccacatcgatgtatgctctctctctctctctctctctctctctctccactactactacttgcagattagttgtcactagatcagatagtgtaaagatcagatttaatttaagctacaaaatttgtgtcgatatagtgctggacaaagctataagtaattaatgggtttaatgtattttagatttcgtccagcggtttgtttagaaatttgtccgcgtgttccgtttatgaaacggaaataagacaactacaaatctcatttagatggtcaatgaaaatggaagtgattgatccgtgtggtgcgtgaaggtgattctggtgccaaatgcagtgtgtacaggtgattttgatgtttcacttcattgtaattcacacaagcataatggggattaggaatgtagatgcacacgcttctgtaagttgaaagtcaaaattaggtgaacaatggtagcatgtagtgcctctgtctcaaaatataacagcatagaataagataggatatatccgtactacgaatatgtactggctttatcgagatttgtagtagaggtgtctaatctgattttaggttactataatttagtctgttttttaatagctgacgttcaaagattagaaatgtgcctattcattgtgttgagctcagtaggatgtaatttaatctcaagggagaattaaatttgaaaatatactattcattcgattttttctcacgaatattcgggatgcaaaattttttacagaaataaaccgtcggtctcgcacaaccgttgcacgaaaacgacgtgggaatgacgtcgcaggcggtatcgcacgcagaaagcgcgagccgcgcgggcatcagcgcgagaccgcgcgatctcgtggattagaatatcaatactgagcagattgaaagggatgtctcgcggtctcgctcattgcatgagcgatagcggttcaatgccgatgtaattagcggttaattctaattagtgattaattatcctaattagtgatttgattaatcactgattaggataattaaccgctaattattattagctaattgtatattaaataattaatccctaatcaaatcgagccgttggatactatagttgtttgattttgcgagaccgtttggtctcgctcttccattccacgagaccgtgcggtctcgcgctttccctgcgcgataccgtccgcgatgtcattttcgcgcaatggttgagcgagaccgacggtatatttttataaaaaaaatttgcatgtcgaataatactgagaaaaaattgtatgaacagtgtatttttaaatttaattctctcatgggaggtctaaaagcagtattataagaattttcattttcgaatcagtcctgtacgatatttttttttcattttcgaatgtcctttcctagtcgatgattggagagttgaagaaattggaggtttctactcggctcatacatgaagagatgatttctctccgacggaggtacggtactcgaagactattccaagttctctttccaatgtaacattgttgcttattgatctcttttttttttctctgccagcgagggtgagatgcaaaagctcaacgaagacacgaccatgaaaatacactcgttcaccctgctatcgctggcagtttgcgttggagttgcagggctgcagctgtggcatctaaagactttcttccaaaaaagacacatactttagggactagatggaacaaggagggccatgccttactgattttttttttcaaaaaaaaaatcatgtacaaatataatgaactcggagggtcttgcctctctccgagttcatcactgtacatttattcttcagaaaggaaattagtgcaagtccatctcatacgtttgcttgttttctgcagcattttgttggctgtttcacttatcggtaatgtgctccaagagttccagaccttgaaagtgcctggtgtcatttggcggtttacggaagagcgctcaccaagctatacacatgtttagtctttgggatgttcgatgctttctgtaaattataccaagctaacaaaagggtcacaatgccggcatattttcatgaaactaaagcccgcataagtacataacagaaatgggactgaaggagacacatctatgcatcagattataagtccaaaagaatgaaaaaaaggctctgatatggctttgcattaatacaaaaaaaaaatccttacaatggtcagtacttaacatctgcaagctatattcctcatgtgtacgtcaaggtgtaggcggccaaacaaatagaatcgaaaatggacaacaaatggtgaatcaagtaaaaaaagaatctaacctcaaacataggatctacactccctactaagtcggtgaactaagccaaaactatatgctgagaccttcctttctttcataagttatagccaagctatttctgctatgatgaagatgcaacctcaatggcactaccaaggggccatgctgcttcaacaaatgaattgctataaggcaccttctttaccaatgtaatatcctggtagggatccacacctgaaagaacagcaaacagaatgaatttaaaaatgtctaaatcttacaaaaagtatcgtgttttttttcactttgcattaagatataccaaatccatccacaag

SEQ ID NO: 7346 - DNA, 17314 bp, Oryza sativa
tattttgattttccatgcatgcatcatcccgatcactactccaataatgtcaaaactgccaatgtattaatttcctccatatcttctatactctctacttctcatcagtactgccactactagaacaacgatttttgcatgtagccaaaacgaaacagcagttggacgtggtggtggtggtcatcattgcagggaggattgatgccgccattgccaccgagaagccgatccggaagccggctttccatggacgccgcttctaccaccacctccagtgccaacattgtcaccaagaccaccacgaggaagacgaccacaaacagcgcgaggagggtgcgcccttgccaccatgacgaggaggaggccaagacgaaccatcgccagatccgccgcctccgccgccctcattgctagatccaccaccctcgtcggagaaccgtgcgccacggccgggggagcaccaccgctgctcccttccccgccaacactaccgagccccgccgttgctgccgttcgggtgaggaaagaggagcttgagagaggaaaagggagggagttagggacttagaaaaaactggtgtttcagtttccttttgcgtctatttaaatgccacaaccaaatttcaccatatggcttaagaggcccgcctgcaaaaataagggtattattgcaggcggcccttttaagccatctgcttgcaaaaatgggaataggatattcccaggcggtcggccattggactcctctccacacaacaactacacagccaggcaatcatagtcgaaaataagatcttcctgtgaaaatatatgtgttcattgtagaaaatcgtttttctagtagtatgccacccatcatcagccgcaaggagagagagatgaagcaatgagcaatggctgatcttcttgcaatgctagctatctactgtggctatgaacaagaaggcagacatatggaaacaaacctagctataaaaaaaacagggagaaaaagatgcctactaaatttgggcataaattaaataaaaaaatcatttacactctttgaatggaaaatatgaataggatcacatttttcccaatacttttgtagaggaagctagcaggtcctagtccttgaacactaaaatacattatgtaatgacaaatttaattagtttatcataaataaaagaaaatgttattagggatggaactctgctaattaagggttgttcgagttcaggctgctccttaagatcatctcggtgcggttttatggattggcgaagcatggtaaaagaagattcaaaaagcttacttttctacattttttttgaaaaaaaatacctttgttttgttttgttgtttcttagttaagatatttgaaaactaacgatttttgtaagttttgtctatgtatagtatatctatttatggtagaaggtctgggttctctatctattatattgagacagagagagggagagaacaaacaagtgcagtgctttccttccctcttttcttcattggcccggttcttagcataaaaccggctattgtttggtgaagacaagcgctcacgagccggcctccttggtcctccccatccttggttgtattgcattggaggcatatgattgaacattggcggtgttgccccccatggcatgtagtaaggaaaaggataacccggcgacggcattggataaggcccccatgacatgtcttgaggacgatgatatgttggtgattccgaccgtcttggtgaatgaccaaatcactccctaggaggtgatcttggtcttttccctttattgccagctttctcaccaccttgcttctcatacttgtccaaaagcatatcgaaggtcaccttagtcttcttaggagctttagaactcgaagcttcattcctattctccttccacacgccaacctccggattctttggcaccatcatctttggcctagtctccccaatgaccactcatttccccttagtagatgtaacgcaccgattttctttcgggattaaaaatcaattaataatgcattttctagaaattaaataaaagttaaagcaatttaatcaagtgaaatagtgagggaattaaaaattttctttaaaaaatcattagctgagaatattttgtaatattctttgtgccctagtataccctccggatttttccatgaattttcagagctcaagaagtaattataataatacaaagttcaattaacaattaaataaaaaagaaaaacaaatttaattccctcttcttccttttgggctgacccggcccaatccctcctttcccctcctcggcccgcttgcccctctccccttccccttcttccccctctcgggccgtcggcccagctcgctccccttcgcaagtccgtttgtcctccctctcccgttttcccctccctctctatctccgacaggtgggacccgaggccccacctgacatccccttcctccggctccaaccgcccccatggccgcccgagccaccccatgacgccgccatttccgccctcctcctccaccccgcgcgcgagcccgccggccgtgggaccccgtggccccacgtccttctcatccccacctctcccctccaaaaccgccgcccacaccccacgatgccgcccacgccaccggcggttgccgccctgtctccgcctctccttggctcggtccgacctcccctcccctataaaaacactccccagcctcccctctctcgtttcccccaactcccgagcttccccgtgccctaaatcgcgctcgcgacgcgagtccgagctccgccgctcgtcgccgtgctccggccgccccatgtggccgctcctggccacctcacgccgcgcctccgcctccaccgcgttcgccgcaccgcgtggaacccccggccgccactcctttttcccccttccaccccgaaacaccgttcccaccgtgcacccaaagccgccacctctttcaccgcctccagccgctcgccaccaccgccctagtcgtcgccgcgctgcgccactgccaccgacggcttcgccgcgaggtgctgcacaccggcctcagcttcgtttccccaaatcaccaccgcaaccgcccctccaccgtcgacccgagccaccgccaccattggccgactccagccgtgttgtccctctgctccggtcgtcgccgacccacgccgtcgcctccctcggctccgcaaggacgaggagaacctcggccacctcttcccatcgctgaaaactcacaggacgtccgctatcccgtgcgttggtgagcccttcctcccttcttttcctctccggccggccatgtcgtcgccccgtcctccctaacacctcccctcccatcctatggtgcagctgccgctcgtccgcctcttcccgagctccgctcgtcgccggagcatcgtcgtctccctctaccccgagctccaccgtcgctacctcccgttgccatcccgccgccggccgcctccttccgccgtgtggcgctcggtgagaactcccccacccttcttcctcctttccccttcgctggccgcctcccgtgctgtgcaccgctgctccttgcgtcgccggccgtcgccgccggttgccgcgccgtcgctcagccgagccggccctttgccacgctcgtgcgccagccgcgccacccgaccgtccgatcggtctcggtcgatatgggccgtcgggtgtgtgcccgcgtggacctggtaggccgtgccgctgacgtgtggggcccgcccctttgtggacgcggtccacgcctcaccccttgctgcgtcagcagagtccatttcctttgagaaaataattaataattgcgcaataaatcaataaattctagaaattcatttaaatggctcaaaacttctaaaatccatatctaattcattcgaactccaaattgggccattcaacttgtaaaattcatctaaaattgagatctacatgtttgtttgctttctatgtactatttacttggtttttattagggtttttcctcaatttccgtgctagcgtgtataatccgtcgtttcgaaaatccgcggtcgcgaggaaaagagttcagaagataaaagtgaagaagcaaggcaagtcacacattccccttgagcattttgatcctactttacaaatgttttcccgtttgcaaataaatatgcatgttttgctaattaaatgggatcatggtttacctatctgcttgcgtgtgccatgtttacttcatatctgtcctttgtcaaccttgggtgataaatcgactagcttgtgttacttatgttgacctagctagaatcatttatgcttagccatgcttaattactactagctcagttgatgagataattgcagtattagaactttttagtatcatggcgagctgcgtgctcgagacatcagaccatgttccattggtcgtaattatccaactaaaatgcgactgaatggtgggtcgtgggtgcatggttttgctagtcgcacccatggcaattaaggaccggttcgcgggatgcactggaagacttacagcgcttgccacaattgggaatgggtaactgcctgacttaaagtatagcttttctctagctgacgcatccaggcaagggtgggcgtgatggagcgggatgggccctgcgacggcctttgtcgcttccggattcacctaggcacgagaggggactgcccgctgcctgctgggggcgggggtgaaacctgaggtgtggtgtgtttggtcagagggggttatatgaagggtcttgtcacaatcactcgacatggtgacgtgtccggccgggcacggtgacatgccggtggattgtgtcttgtgggtacagttgtgcacttctggccaaagtaaaactattcgaatagctgttgacgaaaaaatcgaacacaccggcctgggagatctgcttagctccagtgcaggtccaaatatgatgagatgcgtgcgtgccagtcagtttgatcctgccactgacaagatatgcaaatagtagatcaaaacagccgatcggctgacaagccgatggagtagttccagccgatagccgataatagccgatgccgataccagccgatagcgatagggtttaagcaatcggctatatgtccaatgtagataatgatatagaggcaatcggctgatgataatataatataacaataatatagtccagtagaaaccaatcggctagcaacgatatgatagaataagcactgatccgaaggttaaagcgtatatcggctggaggtccgatgccataaaatccacatattagattaaacagtgaaacctttgttgcaatcggctaaatccaacttatatatatatatgtaatccttatgagctgatgcaacatccagataacttatcggctagcaccccgataaaacattagtatgaacctatcggcttcacaagacttatattatcaacaacaatctagtaggtcgaacctaaccgatgcagcatgagatgagattgtatatgataatctaatactcgatgagccgatagatctgtctaatgtgaaggatataacaaatctatttataacagcattgcgattatagagatatatcggccaagatagaagatcagacctaaccgagacagttccaactaaaccgatgcatctctaaacacaatgcaactagagatagaattgagatatcaggtaggcaaatatgtcaaccaaaccagagcgatccaagagatcgaagcgatgcagccttgaacaacaccaacgtagccgacagattcatcagggcccgacggaacataggacttaccccttcgccggagatcgaaagccgatgcagccccgcgtcaggtgcccaaatcccgccggaagataagtaaaaacctcgataaagagggtggcgatgcgccgagagtattgttgatcgatagattgataaattacatagaccccgggtgtacatatttatacccatagggagatactagtccttgtcggacaagaaagaaactaaaaaggaaaagattaaagtccctatcggacactaaacaaactttcttaaagataaaaggaaactaacaaactatgcctaattaatagataaactgtcatgtcgcatccttcttgatctcagactcttctagataagcttcctttgattgatccgactccaccaagaacatgatatcgtggcgacttgactcccatcggctgattctagaactttgaagccgataagtggagattcaatgttaccttaattaaccaattgttttactgttttgcgcaataaatgttttacaaccgcctttatgcaaatagccacaaaccgtccttgtatccccttgcacgtctgcattattggtgtggcttgctgagtacggtggttgtactcagccttgctattgtttccccttttcagaagtgtagtgcttctaagatgaagacggagttagaggaccaaggctcagaccccagttgagttttgcctgtagagtgaagctgaagccccgttaggatcgcctttttccgctgctactgctttcgtttcggtgtgaggactaagttcctcttctataattattttacgctttatttacatttagagctgtatattacttgtcgttttgtgtaccctggctggtcctgtacagggatttaatacacaaaatagtttggaaatttgggctaaatttttgggcgtgacagtagattcggcttgctccggccgaatcaacaccttcttatcattgaaattaattgtatttaccggaaaaggatcatgatcaagcttcatcttggaaccatgggtaaacttcaatcgtccttcatctatggccgattgaacctgtcgtcgaaacacattgcaatcattagtagaatgagaataagaatcatgccatttacaataagctcgacgcttcaactcttcttgagatgatatgatatggcctttaggtaatctaatttttttttcttgcaaaagataataaaaaatcttatcacatttggccacatcaaaactatacttaacctcactttgccgatctttacgaggagtcggcattaaattagaacaaacaaaagccttatttttgttagtccatgaccactcaacaacatgcatatcatgatcaccctcaccatcactatcactagcctcggggtaatcaatcaaattaacattaggcttcttctcatatggtctaacaaatttcttactatccttaacccggctttcctgagccagaaccatttgcataagttgactaacatcaagaaattgttggccatctaatctttctttaataggagcaattaaaccattaaaagcaagatcagccaaatccctatcagttatattcaagctataacatcggtttctaacatccctgaacctcttaacataatctatgacagattcattatacttttatttaaccgatgttaaatcagataacctaagctcagtttcaccagtatagaaataatcatggaatctttgttctaattgagcccaagtatgaatagaattggccggtaaagaagtaaaccatgtaaaagcaataccggacaaagataaagaaaacaagcgcaatttaaaagtatcggaactactagcctctccacattgcgctaagaattatcctacatgttcccatatggtcctactatcctcaccactaaatttggtaaattcgggaaccctataactacgaggatatggtacatcgtcatagtaatcaggatacggcttttggtaaaccttagcacgattcctagcttcaatcccgaatttatccctaatgattccactaatcaattcctctatattatcaggcctatgttggtttggtggtgggtttggtggcctaataggttgaggttgtggcgcaatataattatattggccatgcctagtatcggtgggatatcccctactaggatcattataagcattgggaacatgtgggggaacttgggaacaagcaacaacagtagatacagggggatcaaatgttctaagatggtacaaatacgcgttatttgtaataggatctaccccctgtataggaataattgcgtcggtctgcctggtccaagacccggtctgaccggcgtccagaggtgcggtcagaccggtctgaggtccggtctgaccgccggggtaatacccagtctgaccggccatctggccggtctgactggcggcaaagtcgcggtctgaccggccatctggcccggtcagaccggctgtatgcgccgactacccctcgccggtttgttgcgtcttcgccccatcagttttactacttatttgatctataggggcttggctagcactggtagaggctttatctttgaacataaaatcggccatgagagagccgaatgtagtcctcatgaattcttcacaacgagtttcaatagatgcatctaatttattatttaaagtaaccatagatgaatctattgaatgtgcaatttgttgttggatagattgtgataactcttcagcacttaccatgtcaaaagtaggtttaggcaatgatcccggcttgaaaaccacaccttgacgggtcctagcgcacgccttcgtcaatagatcttgagtatacgccttaagatgttcattcaaagctttgcgtgctccctcgtcaagctcctccaatgcgactggtatcacattgcccggttccacctctgccttggttgatggaagctttgtcatgacgacgtcgaagttgagatgcctttgagcagatttcccaagcggaatcaccaaaaatcgtgttggcaactttttgtgacaagttgacaagcacaatcgtagcacctaaacgccttgcagtgatcctagagtcgccaaccacctcaatctagcaaaagctaaaccaagatgggttttgataactaaaccggctagcggagccgattctagataactacccgtctcgtgggcaaaacggaaggttttcaggacaaacctacaaagaggtgtcacactctcgcagcggcggcggacgatttacggcgcaaatcgacaaagatggacaaactaagagaaaactaaaagcaatatggaaaacgattcgattgattgattgtagattgaattttacaatgaaccggccttacccccttatataagggttggtcttgctctctacaggccctcctccacatccaacttgggatagaatccaaaagaaacccgaaacatgccttcccgagcaaggaaacccgagacccgatgaaaacagaaccggactcggactctgccggtcagaccggccacacaccaccggtctgatcggccctcattcggcggtctgaccggccaacatacgacagtcagaccggcccaatcagaggaaaaccggcagacttccaaactttggtaattttccctattttatccctaggtgccaaatttgggtgtaaatacttcccacgggattaaacaaatacgatacccttggaatactctcgggtgaaatgctacaatggtatatccgtgcgcttgtggatgaactctgtaaccatatataccaggagtatttctgcaccattgctggaaattatatttctagtaatgtcgttaagaaataccaacaactatccgcaactcgtggaaaaggaaataaaagatgaaaagaattagtaatacgaataaattggacgcggttctcctacccccactgtaacgccccgattttcgttcgggattaaaaatcatttaataatccatttcctagaaattaaataaaagttaaatcaattcaatcaagtgaaattattgggagaattaaaattttcctttaaaaatcattggccgagaatattttgtaatattctttgtgccctaaatatcctccggatttttccgtgaattttcggagctcaagaaataatgttaacgatacaaagttcatttatcaattaaaataaaaagaagagcaagaaaatttccccctctttgattttgggccgtcccggcccaatccccctctccctctcgggctctctctctccctcggcccagctcgccgctcggccctctcctccccgaagtctactttgcctccccaaccagccaccctctcctctttggccgacagatgggacccatgggcccacttatcatccccaacttcaggccggcaactgtcgttgccgcaatggccgccgaaaaccgcccacgtcgccgccattcccagcctcctcgagccctttcttgcgtgggaccggaagcaacccctctcttccacctactcccccgtttttccccaaaaacaggcgccggtttggcccccacgatcctacgatgcctcgccacttcaccggtcgttgccgccccactcggccacggttccccctccacgagtgtatataaacaattcctggagcatcctctctcgttttcccatttcgcccgaacccgccacactccccctcgctctccccacgccgttccccatcgccgccgcccgccggcgctctccagccgcgcgcctcagtcgctgccgccgtctccgtgctgcgccgttgccaccgccggctttgccgccgcccgggaaagctcgtccactgctccatttcccctcttcacctccgaagcgccgcagccacgcgaaccacctctctccgccgccgctgccgactccagccgcgtcacgccgccgcttcggtcgacgccgacccgcgccattgcctccctcagctccgcaaggacgaggaggacctcggccgccgcccctcttcgccagaaatccgccgtagctcctccttcctcagtcgccggtgagcgcctcctcatattgtcgtggtcggccatcgttaccggtcaccacgcaccagtcctcccctctctaacccctcctttatcttcctcagatcgaggccgagcccgtccgccccttcccgagcgacgcccgtcgccggagctccgtcgcatcgtcttcctgaggagccccaccgccgccggtccttgccgtcggctgccccttcgccgtcgtgcccctcgttgagcactcccttccctctcccttttcctccccttcgtcggccacctccaaggcgtcctcgcgatgcgctgccgccgccggtggccgtccgaccgggtcactgccgccgccctccgcgcccgcgccgttgccggtggtgccgggcagctggttgccgcctcccccttgccgcaccgcgccgccgctctctcgcgtgcgccgccatcgcccgcgtgagtcgttgccggccgtcgccgcaagtggccgcgccgccgcgagccgtcgctcggccgggccggcctgagccgtgcccgtgccctgccgcgccaccccgtggtcgcccgatcagctcgggctgatctgggccgtcggttcccgtggaccggcggtggaacatcccatggtcctggtccacggtggaccgattcccttgacacgctgacgtgtggggcccgcttgtcggcgccggcctctttgatgacgtcagcgcttaagccttttcctttgtaaaaataattaataattgcgcaataaatcattgataattatagaaaatcatttaatggctcaacaacttctaaaattcatatctaattcattcgaactccgaattgagccgttcaacttgcaaaattcatctaaaattaagctctacatgtttgtttactttttatgtactgtttgcttggtttttattagagttttttctcgttttgtgtgccagcgtgtagaatccgtcgtttcggaagattgcgatcgcaaggggaacgagttcagaagatcaaagtgaagaagcaaagcaagtcacatattccccttgagcatgttgatcccaatttataaatgttttaccgtttgcaaataaatatgcatgttttgctaattacatgggatccgggtgttacctatctactcgcttgtgccatgtttacttgatatctgtcatttgtcaaccatgagtaataaatctcctagcttgtgttacttatgtgaccgagctagaactatatgcttagccatgcttaattaccactagctcagttgatgggataattacagtattagacctttttagtatcagaatgagctgcatgctcgagacatctggccaagcttcatggtcatatttatccaactaaaaaagcgactgaatggtgggctgtgggtgtatggttttgctagtcgcacccatggcgattaaggaccggttcgcgggatgccctggaagaacttatcatacttaccacaagccagcgtgggcaacggctgggcttgtagtgtagctttcctctagctaacgcatccaggtaagggtgggcgtgatggagtttggatgggccctgcgacggcctatgcggcttccggattcacctaggcacgagaggggactgcccgctgccttgcgaggagtgggggtgaaacctgaggtgtggtgtgcttggttagtgggggttatgcgaagggtcctgtcacggcctctttctggtatgtcatggtggcatgtcggcacacggaaacgtgtcgtgggactgtgtcttgtgggtacagttgtacacctctggccagagtaaaactattcgaatagccgtgcccgcggttatgggcggtcgaccaaattcaccgtcattagtcccaccttaataaatcgactcaatgcactgtagttcaggtgggttggttgggcctgttcaacgtggtgtagcgttgataagtggagatttaatgttactttaattacttaattgttttacggttttgctcaataaaatgttttacaactacctttatgcaaatagcctcaagccgtccttgtatccccttgcacgtctgcatcattggtgtggcttgctgagtacagtggttgtactcagccttgctatttccccccctttttcagaagtgtagtgcttctgaactaaagacgaagttagaagaccaaggctcagaccccatttcttttccgctgctgctgctttcttttcggtgtgaggactaagtgcctcttctgtaagtatttacgctttatttatgtttggaactgtatattacttgtcgttttgtgtaccctggctggtcctggacagggatttaatacacaaaatagtctggaaatttggggctaaatttctgggcgtgacacccaccacttccaatttcacttgctaattaagataaatataaccgtacaaattttaagtatctacggctaattattctttcaatggtaaacgatgtatttgtcgataacgagacacccatagtgacttcgctaataccaaaatataccgatctagttttttagatgtgcttatagggataagcaagagtggatccaatgtgggtgttgggtcactcgagcccctgtaccacactgaatcaccattgatagaagaagagatggaaggagaagaagagggatatgaggaatagtggggtttgggtgtgggggccgaaggaggaagaaggagatgagtctcacctatatatggctgagttctttacctcacttttccaacttatttctcttgtttttcgcgcgcacgcttttcaaactattaaacagtgtattttttgtaaaaattttccatacgaaaattgctttttaaaatcatattaatccttttttgaaaaaaataactaatagttaattaatcatgcgctaatgccatgtcgttttgcgtgccgcacccctcctcccgaacacagctaatctagttctagatccctatttgaagatagggtgcatgtatgtctgcgtttgaacaacttttctaaaaattttaaaaaaacttggaaaacgaaaaaaaggcctgaaaatggtataggagccatgtttagttaaaaacaaaaattttcacactgtcacatcgaatgtttggacatatgaataaagtattaaatgtagaaaaaaaactaattacacagtttgcgtgtaaattgcgagacgaatcttttaagcctaattgctccacgatttgataatgtggtgctacattaaacatttgctaatgatggattaattaggcttaataaattcgtctcgcagtttacaagcgaaatctataatttgttttgttattagtctacgtttaatacttcaaatgtgtgtccttatatccgaggggcgggcccacctcaattcaaagggtattcaaatgaatacccaagatttttagacaaaaaaaatacatatgtgagatatatatttcgtatgtatatagagaaataaagaaaatatacgttattgatcgaaagaagtccaacaagaaagcctagcaggctggatccctcaaaatcgaacccaattatgcatggttgtctaatttgtgcattaaccatgttgtaatggcatgacgccaatcgatatatacttggttggtagattgtactgtatatgttttctcacaaagtatatcataataaattaagaaaattgctaaaagccttgtcgcaagttctaattcaataagcagtactaaaatactatactattgatcattcatacctaatattgtgctcgtgttgtaaaaattatttttttatcccctttacatttctaataactaatctcaaaatcctgggccgcccttagacgtgacaaccacacacacacacaaattttcgcccaacaaacaaggcccccaacttgccccccaacacgaccggtgagcgtgagtagcagtagcagctcgaaaaaaggacacgagggagggagagggagtttgccagatccggatcccgcaccagatgcgcccgccggcgatgctccgatggcccgccgccgcggcggcgctcgcgctcgtcttcctcctcctcatcgccgccgcgccccccgccgcggccttctacctccccggcgtcgcgcccaacgacttccagaaggtccgttcctcctccccctcctcctcctggtaatggctcccgctcctgcgcttgctggatctcggcgatcccctggtgcagatccggctccttgagtcctcgtgctctagccttttcggggttgtccgtacgcgccaaatcgttttggcttttttttttctttttttgaaaaccgaagccagcaaagctggtgttataattttggcgtgatcgtcgtcctgttcttccacacacacacacacacgtaggggatgctgtttcgtacgcgtttctgtggatgttggtggggtttggttgatgagtgatgaatctgtgtgccgcttgtcgccaatgttgagaataaactgtatattttcagtgctgtttgatgtaggggtgtggctgatcagtgctaaaggcgtaccgacatttggttagggatgcctctgtcatgtggttctagttgcatgcctctggaattctggatggacattagcatccttagattagatccattgtttcgcaagcctcagtgctgaggcagaacatgtttctaaccgaaagcgaagcaaagcagtttatctctttgagtggaaaaaacttctgcaatgatcctagcatatgcatttcgtattatccctctgaacattttcagaacaaattatattgttgactatagctgtattctgtaattttttcaagcttgcgcattgagtaaacacgctccaattttcaacatcttctcagcctctctataccgtaccctgtttatcttctctcgtcaattgttgccagttgtgcgtgtatcctcaattttgtcacttacgaatggcatgcatgtccttgcaacacctgcttaatcacccttttacccttaattttttttgctctctatcgttcagtcattagttttaagaatgactgtgctactaggcattttctaggttattacatgtttattctgttctgctacgtagagaagaaaacatcatgaaggtgactgaaagaaaatatttttgagtctgtgaagaaaaaaaatatctagtaatcttaaaaaacatacatttacatttacctgccgtactgacaatatcttaaaaatatctagtcatatgttttggatgtgctctaatggacatatatactacaatgcctgcagaaagatccacttcaagtgaaggtgaacaagctgtcatccacaaagacacaactcccctattcatattactcccttcctttctgcaagccagatacgatagttgacagtgcagaaaatcttggagaagttctacgtggtgatcgcattgagaattctccttatgtggtcagtactggtctctggtttacagattatctgagcgcactcgcatgttaatgtacctaattatcttctattttacttctttggactatagtttgagatgagagagcccaagatgtgtcagatcgtctgcaaagcaaccattagcgataaacaagcaaaggagctaaaggaaaagatagaggatgagtaccgggtgaacatgtatgcctgtatggattgtttagtttgattgaaatttattttatatgatgggttctggagtaacatggttaaattaccttacaggattcttgacaacctcccgctagttgtgcctattgcaaggccagatagggatgatgttgtttttcagggtggatatcatgttggtgttaagggccaatatgctggtgtaagtctctgtgctcagcttaccttttcttttgtttggaagactagtaatgatcttacaaaaatatattttgcagagcaaggatgagaagtactttatccataaccacctgatatttttagtgaagtatcacaaggatgaaaattcagatctctctagaattgttgggttcgaggtcaaaccatttaggttcattcccttaacctttttatgtttgtttcgtacaacgtctttgacatattgggcaaatttatgtttaatccctcatatgtgtttactaaattccctgactcagtgttaaacaccaattcgaagagaaatggaatgatgcaaatactcgtttgagcacatgtcatccccatgccaacaaaatagtaataaactcagatactcctcaagaggttgaagctggaaaggatatcatattcacatatgatgttggctttgaggtgatgatattttcatggcatctcttctttccttttgtactatgactcttttccttcacagctatgcttccaatgttatatttatttaaacaatatcttttggttttcttcgctgggtcttgtaggaaagtgatatcaagtgggcttctcgctgggacacctatctgcttatgacagatgatcaaattcactggttctctattgtgaactctctcatgatcgtgcttttcttatctggaatggtggccatgattatgctccgcactctatatagagatatctcc

SEQ ID NO: 7347 - DNA, 7649 bp, Oryza sativa
agagcagtgccctgagcacgagttgccttagtcctattgggacactgatgccctccgtaaggcatcgggagtctccatggagacacgacgagacatggttgagttagagccacggctccaacgtggcgagccaaagcggcgcgctgtaaagggcctaatccctatcacgggaacatgtatatgtagtacactctccataaggactaaatgtaagtttagaatgatctcagaatattttttttaaccaagagctccaagtttgagaaccctatgtcaagaacattgtgcttttgagtgttaccaacggtgtggcacaatccagcgtccgctattggtgtaccatcgtaaccatcatatactttgcccatcggcacctccccacaactccgtctctccattctccaattctggaagaactgtctctttttctcgtagaggaggaacggagctccaaagcaccgggacatccttataaaatttgacgacaacgactctacctcgcgtgtccgagtgtagcaaatgttgtttccctcacaaatcaagggacaacaaagccccacaactttactatagaagtaggggacatatctgtcatggttatggataccgcatacccaatagtaatcaattaagctcgatgaggcctaccatatgccaagtcttatacggaatcatacctcgtatatagaaagagtttcagataaggtaggacaagtagagttctatatggaaacgacaaggactactcggattgtatccatattggtttccctagttttactttgataaggagacatctatgggtataaatacaagcccccctaggaggagagggacagaagacacagatcgacacacaaaccgagacaagttagacatcgacattagatattagcctagacaaacccaatcagttgcttgcggaggccgataacaaggatctagggctatttctgatctcaatgagttcatattcgagtagtaagactaccctctcgtcgactacgtgttggtgttcatgccgccacgtcaacgacgattagataggttatcccaaatattgtacttgtgtcattcaaaagaataaagagcaataccggcttcagccaataggagtagagctattacctatcagataaggggcccgaacttgtataaaaatccttgtctccatctcttttaccacaatctcgcatataccctggtaccaacgatctccataccatgcaaataccatagtcgtaacctcaaacgtcgacaatatctagtgaaaatcaaataagtgaaaattcatgaaagccagagctaaaagttttataaatttatgaaaatttctagagatagttataaaaatgaaatacatattcactaaatgttaagttgaaaaccaactttatttgcgagtaaaaaatgataaatttcgggtgaatagtaattaaacgctattcacctgaatctttgtctcttttttcctctcaaatgaagttgagttcagatttgtaatttggtatgaatatattttatgcttatatgtaatttttttcataaatttagagaacttttatgtataatttttacgggtttttactagacattttcttatagacgtattggtaagtgctgctacctcttctaaactgactataaacaataatcgcttgtataggtgaaaagtcaacattattattattattattattattattattattattattattattattattattattattattattattattattattattattattattattattattattattattaagcggagatactagctctgttccaaaaataacttcatttttacgctccatttgatttcgctgtaggggtaagcaactttatcattttttgttagcacatttcccgaactactaaacgatatattttttaaaaaaatatatatatacattgaagtttcttaaaaaaaacaaatgaatcattttccaagttttaataattagtaatatggagtactagccctaatggtttgcttcgttttgcatgccgctcaattttttttcaaacaacttagtcgaacggagcctacaaagtttaaaagactaaaacatcctttgctttatcaaattactccttgattttatccttaactctatcaagcctaaattaaatatatgtgtccttgatttttttcaagtgttaacatatttcacctaattttatcgaatcacaatgcattgccttcaaagttttttgggacgatgagtgaggtaaaagatagtaatagttatcatggaaaggagggagcgttaacttgaagctagctgatgaagtgagtatagctcgattggttatgttacttatgataaaatcagcttagtggattcaagttctagacatgacattattactcacatatatgactatttgttcttctagtattagtcaacatctcgccacaccctcgccacacccatgatgacttcataaatatatgttgacatgtcttcttattagtattattagtattatgtttcttttttttgaaaaaaacttgaagcgagctgtgatacacaatactacccgcttgcgacgcacgcgcacatccattatgatccttgactatctcgcgggacatgaaaatgttcgtgtgaggcttgttgggggtgtcaacctcatggtttacaaaactgacgataaccgtgtggttatcgtgtttactgccggttacgataaaccatggtaagctcattaaactgaaataaattttaaaagtaatttaaatttttaaaaaatattatacaattactgcgagtaaccatgcagtgtgcggtaaacccacgccgatggtaaggaaaccctggtgaacccaacacaagcaatgcgattagagcgtatcaacgagaacacacgcgggagccacacgaggcggagtactacacaccaatccctccatctcataaaaaatctaggaccggatactactataaatctgaacacatatatatccaaattcgtagttttagaatatgtcacatttagtactagattgattttttaatggaacggagggagtacacaggagcacgagcagcagtggcatctttgttcttccgttccgtgtcgtgtgcaaaactaaaacaacacaaggagggggaggcaggaggcgcacgaagaaaccggccgcggctcgaggaaaatataaaaggaaccatcaccgtgcaggggaggggaagggaatccggcgcgtccgccgtggctgcgcggaaacaaacacgcagcgcacggtcacccacgtccggttctggaatcctgcctcggaagcggcgaggctactccagaggccaggttggtggataaattcaccgggctgtttggatacgagcagcaagttttccaaacatttttctctctgattaatttttttaataatgttctctctgcttaatttgttgtggataaggaaattgacaatttaatcatgtttggtaacttttggaccgtgtcagaacactacggctcacacaagtcggtggaaacaggtcaaacttatgggcaagtttcggccgactttggcagtttggtcttcaggaagcaggcctatttcgtttactgactgactgaccggagggtactgcttttggatctgttgaatttggttggcgccgaggtcatttgtttttttagtaagcacataatcgaaacacgctatattcgcactaccgcattttctatacttcattgaaatattgtaagggcactgaaatccacgtaaacatgaagtatatactttctccgtctcaaaataatttaatctagaatgatatgagatccatcatagtataacgaatctagctaatctaggatgtgatatgattctaatatggataaagttatgtgcagatttattgtattatgatgggtctcgtcgtatcctagctcgtattattttggaacagaaggagtattcccttcatcccataaaggacttgagggatagtgaaaaaaaaaagaaaataaaaaaaatcttgagttaaccatttatatgttcacctctctctcattataatcatgtaatactagaagtacaagtcacctatatataagaaatgttcaaccaagcgagagtcggctacaaaacaaatattcaaactttaaaattcacatttcaaacctttgtgtaaaccgtgcggtacatttcctaaaagattagtggacactatcctcccctatcgttttcctttcatttcgctcaaaatcctgcctcgcgaatacttcacacaacttatgatttctttggaacgcatgaatcgaaaaatatagaaataacaaaaacaaagtattaagtgtcgtgacttgatgaatacatcaggaactaaaaccacaataattctacataataattacaggaaaaacacatgaaatttaatatttatataattgatttactagatagaaagaagagatacacagaaagtgcttgggcttctcaaataaattctgttaacacgaggtgagatcacatattagaattcctctaaaatttggaagattttttactatcctgtaatattactctgaacaatttcaccatctaacactactgaaaaactgatcttcgatgggtcaagcaaaatccacattagtcccggttcaagtaggaaccgggactaaaaaatatatttagtcccggtttaattttacgatctttagtcccggttcaaaataggtcagacgtcccactatctttattcccggttgataacaacaagcacttattctcatctcctccccccccccaaacaaactcctcctcatatctgtatctgcatttcctctctctctctctctcatcctcatcctctctttttttccaacatcctcagcgggcggtggccgaggccagcgtggcgccaggcggcggcggccgaggcccacgccaggggcagcgtgctagcgccggtcagcggcctgcccgcgcggggtggcggcgggctgtgcggagagcagtggcggactgtgatgtaaatttgtgaatttgttcatactgtagatctatgaatttatgatgtcaatttgagtattttcattcgatctgtgaatttgtagatgattttgtgatgttttgtgaatgggaatgattttgttgtagagatcagtttgaaatcaatataagtagtaaaaaaactgaagatgagaagaactttggccacgtggcgttccgatccttagtcgtggttcgtaacacgaaccggaactaaagatacccatctttagtctcggattcaaggtcccagttacataaacgggactaaggggcttacgaaccgtgagtgaagacactttctccagcagtgtaagagctcctttaattcataggatgggtaaagaattttcgtaggatttagattgttgttgattttttcctacatatccctctaattcataaaaaggaagaaaaatttgtataccaaccaagaggtgcgacctgtttgtaaactttcctttgtttttcctattgcgctcctattatattatcctgtatttattttattcttgtaggatttgaaaatcatactaaagtttcttctatcctacgaatctaatgagacctcttatagaaagttttgttccttcgcactagatatctctaattttctacaaatttcctccattctaaagagccctacacacacgtcattattcatccccacaccgaaattgaagttgatcaaattgctatgatagcgatagcgctcgccaaacaaccccaaccggtggacccctcgtcgagatatgtagtactcactccgtcccaaaataagtagttttgtactattcacgttcaacgtttaaccgttcgttttatttgaaattttttatgattagtatttttattgctattagatgataaaacataaatagtactttatatgtgactaaatattttcacaatttttttaaataagatgaatggtcaatcgttaggcacggatatctacggctgcacttattttgggacggggtagtagtacatattgtactatgtgtcttaaggacacccacaatgtatgaaaaagatagccttaaaatattgattgtacttataaaataatccataatagtttattatttatgagctcactcttaaggttgcactacatcttaaacaatgatcttgccctaacacaatgtctaatgtatctcatgcatgtgtagccgcccggacgtagcgctagcccgatcggttccgagttccgactacgactttgcgagacggctgcgtctgcgttgtactttcacgccacacccgcgcgcaccacagaaaactcacgctctcagcctccaagcctccggcggcgcgtcggcttgacggactgaacatgaacagagaggcaagcgggggcgcagccgcgcaggcagcgcacatccgcaggcgcagggggcgcgcattgaagcgttccgctgccgcggaggcaatctacggggcccaaacggggcgcggtggcgggggcgcacatgcatccgctgggcgcggcgcgcgcacagccacaacaaaacaaagggggaagggaaggacgtaacaaaagctgcacagtgcgcgcgtccggcccggcgtccgctgtaggcggcatgcattgcctgatggatgaacaagggggtggggtgtggtggactggtggggtggccggccggcgtccatgattccgtaggtcggtaggttattgttgccgggcggtgcgtctctgttcaagtgttggtcctttggggtttcaggtttgactccgtataggtgacgtcgttaccgattgcaccaaaccttggattacatgtgcatgcgagagattgtgtgagcctactactagtaacgaaaacaaccgtgcagttctatttcattgttttagaaatcaagagcatgcactgttgtgacttgtgcgcccttttgctcacgaagctagtacagcgttttctcaaacaaggaaaagagaaactgtactcctacactctacagctacgtaggagtagcaaagtactagcacggctagtttagcaggtctacgacaagaggaattgcgctacatcgtggctgctgctgcaaccattccgtacactctccgtagcacagagacacagtcacgcagacaggttggcctgcgaacgggccaaagccacgtactgtcgccgttggactcgataaaagcctgggggcgcacagcctgcgtcgcccacatgggcgtgacgaggcctgctactgtgggcccttaccttggggcccaccacctctcgctctctgtcaaacgccctttttaccccctcgcgtatctgggcctgcggcccacccttgatctaccgcacgtagtagtagtacaactagtagtaacgctgttctctctcgcggtgcaacggacgatagagacttgatgagtgagaggcatcatggtcatcaggtatccgtcgatgtgcacgcccaaaacgacaaggcaggttgcagcgtttacttataggcaaagtcaagacaaatcgagcgatcatcaagttgatcaccatacctaccttgttatagggtgtccatgcctagcttattgcatggagtatttgcatgtcggcttgattggaagattttgcggcgctccagtttgggccacaagttggcatcacagtaa

SEQ ID NO: 7348 - DNA, 10199 bp, Oryza sativa
ccggctaatggcatcttcacttgtggttttaatagagctacccactaaaaagggcaaccaaaaagaaataaacaagggagctaacactatgctgacacttcactccttttctcctatattccactatcgcttttcttttgcttcttgtgttcctgtcacagacaaatagaaaaaaggagcggaaagaaaacaagacagcaaaatcagaaggtgaaaggcttattattttggaagcatagtgggaataaaggaaggattaagtgcttactatgattaggctgggggattcactcatccattgcagagaactttacatcccaatcgctccgtgatcagaggccagcctgcttattgcgttcaccaaatcatttcaagcatcgatcacaagatatcggatccatcaatataatcacagtacatgccatacctggaaaccgagaagaagtctcttggcgaaggtatatccaaagtagagggccgcagatggttgattccacctccagcattagtgcccgcgctgatgcctacatgagatgcactgcagctacttgtcgcgacgacaccggtatcagtggtggtgaaactttggtgagctgagacagaggacttagtcggcgaagcaaacgggctgtccggcaaattgtgctccaagctgcagaatatccatatcaaatgaaagccatgagccactgaagcagcccaaccttttcagcttctatgtgcatcaaatcatgaaagctaactgcaagaataataagcaaacagaatgatgatgatggtctgtctagtgtagtttagtaagatccacctttggtcgctatcagcattcaggctcgcctcaccagcagattcttccttatcacctcctccgttgaccattttcctctcttctgtgaagtaacctgttcccttgagctgctcgcctataaacgaccaagaaattacaaggatcagtagtgtcgaatgagtggatgaactcgtcttacaatgcttgacaggcagaccgaccgaagtaacacataccagaatcaggcggtgactcgaccatggtggtggcaagaggctgactggaaccgaaggcattggcggtgggaattgtcatcgccattgctgttgtgacagcagctgcggctctattcttgaggtcgagcagctggaggtccatgagacggcgactgtggagttcgatggcctgttgcagctcggcagcctgctgctgctcctccagtttcctacgaagcatcatctcgtttgtgctattggagtgctgcagcatcctcgcacctgccaggcaccaaacttcacatcagcagatcgctctaatacaccataccaaagatcaagcaggaaggcattgaggctgttcgtttgtgcgacttgcagctgcgttacagctgcagcaacagtatccactatgaaacaatgaactacagctgtgctgccacagctagcacaaacgatcggagcgagctaggatatttttaccgagctgatgcagatcgaatgggtctctgccgtccaggccagtgggggtcgtgcagccggagaagtcaccttgatgtttcctgcaagatgagtggaaaaaaaattataagcaaccaggaaaactgcatgcacggatacagttgcagtttaaagatgcggaattaaaacgccggagcgtgttccaagcgtgcctgtacttgtcggggaccttgcccttctccttgtaaggcttgacgagcacgcgggcgtcgcagatgaaatgcggattgcccttggccaagatcagcttcaccgtctcagggtacacgaaggtgacgaacccgaacatgcgcttctgctggtacgggatgcgcacgtcgtgcaccggaccgtagatgctgcagcgcgggcgcattgccaagaacagcaaacatgccaatcagatcgcgttctaccgagtccgccatgaaagaagaaacatcattgcaacatcgcattatacctgaagtagttggagacgtcctcctcgcggaacgtgctgtcggccgggaaggtgaggtaaatctggcgcgatccggggttcatcatgctggcaaagtcgacgcggtccaggcgcggccgccccatgaacttgtgcgcctcgtcgctgccgccgagcatcagcgccgccgccgccgcggctctgcacacgcgcaaccaaacaacaaaggttggaactttgaaagcttcgagcttggaatatggaggttgtaaaaggcggtcggtacctttggttgtcgttgtgctgctgctgcagcaagaggctgaggcacttggtggcggcggatggcgagccggggagcgaccctgtgggtgaataggggaaggcagcagggccgaggcgctggctcttggaacggaggaggaaatcctggcactgctgctgctcggcggtggccgcgtccatggcggcgcccgtcagagcggcggcgtcgtcgccgtggacgaacctgcagctgctgccgttcttgcagaacccgcgcgcgtagtacaggcaaggcttccacccgaagccgtcgctgctgccgccgccgaggcagagctcgttgaccgacgcgctccggcggtgcccagggccaccgtttgcccagccgagaccgtacgggaacatcccgccgccctcgccgggaccggggctccggcactccgctccatcgaacccctggagagggtggctggggttgacgcccccctcgttgaggaacgcgagctgctcctgcagctggaagtcgtccaggagcacgtccccaccccgaggaaagaagggcggcgcgttcgccgcggcgcctcccccgctgttcgccgggctgattagctcctccccagcgcccaccacctcatccacggacccattgctcctcgagaacggctgcgcctgcgcccacgaggacggcgaggacgcggacagcggcgacggcgacggcgcggggccgcggccggagttctgccgcgacagcaggaacggcgagtgggccgccggcacggtgggcgacgacgacgacggcggcggcggcggcgggaggagggcgagctccttgcgagcctgcgccatgacgctgtggagcagcgcctcggggccgaaggcgaggcgtatcatctccttgtcgccgtggtcctggatgagcaggaggcccatgatcttggcggcgtggtcagggtccagcgcctggatccgggagaacaccaccttggtcgcctcgtaggcgtccatggccgcgcccaagaaacgcccggagcaacaagttctccttctccttcttcttcttcccctcccttcgccccacgcacacacacacacacacacacacaccgctgctgctcacgagcttctcgcttctcccctcgccttcacctcacacacctttacccctccttttccgctggtgttgtgtagtgcctacagccttaagtagcgcagttgccgcagcaaaaacaaaactagctggcgctgctttggctcggtccggttgctcggtagcctccgcttcccggagctgcggcagcgagcagctccatttccgaaactttggtgcttagccgcggcctatcaccacaccgtgcacctcacgctccctctattaagcaaagcaaagcaggcacagcggatggcctggcctcttcgcctcgcttctcgtctcctctcttctcctcgggggtcggttgacaggggacgggggaccggcgagggtgggtttcttggggcttgggactttgtactgttgcgggacgagcgagtacggggctgatggggcggtgtgtaattgccattgttttttaaggggttccggggcaatgtttgcttctgaaatttggggtctagtagtatcagagaggaacaaattaaatgttggctccatttccccaccggttaaccacacacaccgcagctccctccttctccgccccccgtcgcttttatgtcgtcaccgtttccctaagcacacgacttcatccgtcacgctttgtttcgaccctcagcaattcccgacgtaataccataacttagccccttttattcgtagaaaaattataagatatttggaggatttcaatccttcgaaaaaaaattcctatgaaactcctattgaatgagtaatgctatagagattttgaagaaaagtttgtaacagattcaacctgttggaaaattttctttgagtgtctatttcattcgattcctgtattttttgtgatccaatttaacagttattcttgtttttttgtttttttctagtattttgtaacttttacacttacattactgtcatagacctccggttttcctattccttcgtttttccatttctacgattcaaatagccccttaaatgtattttatggtagatatttgacaaaaagaataggagtatgtcttactccctatgttccatttttaagtgtagccatggtttttcgcgtccaactttaaacatccgtcttatttaaaaaaatttgaaaaaaaataaaaacataagtcacgagtaaagtattattcatattttattatctcgtaataacaaaaatactaattataaaaaaataatacggacgatgaaagttgagcacgaatacttatgattgcatttaaaataggacggagggagtaactcttaagaaaataatggttttttgccataccataatttggatgttattttactatgactttggcaatataaatagggatcaaaagtcggcaatatatcttacacgtgacatttgtttcgaatagtagatttttttttcatattaatgaataaaatgccagctaacataaattcagcatgtgccaaatttattgaagtattacatttaaacatgagctttgatcattggttttattgactccctccattccaaaatttgatatttaaaagtgtattagggttaaggattggggtaaaagatctacttgtctctaaataatgtcatataggattgggagatgggaattaaaatagtcttgttggaaagatcaggtccaccgggagctgtttggaaagtaatgagagaaaagccattttttacatgtcatgtgtacttttatttaggacaaaaaagctaaaattagcttatttggggataaatggattgtcatttatttgttaggacttatttttaccattaaaggtaaactttgcgtatttataccaaatatttctaaactagataaatgataaagtattatgtgaaaaagttaacaatatcatatattaaaaaacaagtccaaaagttcagtagcttcgtataatttaaaacgaaggccttgtcgacaaattttttatatttaatatatgtgctcttttgagtaagtgcaatatagaaattaacagttaactataagattaaatatgttgcatcaggcccttattttttcatgttaagattcagattttacctcgatttccattatcacgcttttaaaaataataagtggtgtgttctatgtgaaaactttctatatataattttctttgatattatatccatttgtcaagtttataataattaaaacttaactaattatgtgctaatagctttttctttttgcgtgcgccatcttcatcttgttttaaaatttaaacatcaatttaaaacaaaatatatgatgtgtcaatgagaaacatgcactgactggctatttttatagggaaaatttaaaccatgccacacaaattttgcaaaatttgtgatatgccattctaacccacatgtcattctaattccagaaaacagttttaagactaaatttttcatagtttcgtgtgtaatatgtttttctaacagctataaaaccaatgtcacatgaaaatactttgaattataaatccaatggtatataattctatgcactaaatatatttgtttgctatcttaattacagctcaaatgttccaaccttgacttcctaaaatcaaatacggttataaaaataaacggaaagcagaaaaatacaactatcatgtaagtcaaacatgttttctatttatatgataaaaatatttaagccaacattaaaaccgatttgttttataaatcaggctacatttaaatcggttttgcttgtaagatggtatgaatgtccggttttatatttaatgatgtttttttgaccggtgttgagagtaaggtaaacttcaaaatccctcttagtgctttttttttgtctttagggagtacttaaaaaggaaaatgttaggagacaaaatcccagcacccattatctaggtagcacggtgcccttctccattgttccacccccttacttgcatgcatggctagagaagggtgtacgccaccgccgcctagtcggccggtgagccgcctatcatcaatgcctcctttcctcccttcgtatcctcttgccggcatgcaagttccattgccatcgtgcttgagagaggggagactgaacccgccaactggatctactgttgctgctctccttcattgccgcactggtggatccactgattcttgagactcagttgcttgtgtgaccagtgaatccacgacggatccatcaaagccaagcatagagctattgccttctacaccccaattcaaagaagaggagagaaagagtgggagagaggagaagaaaggggtgggagagctccaatgccaccgtcgctatcaaaaccaatttggcccaggggtggtatcaagcacggctctatgagtgtccctattgctatccatagggatgagaactgccatgaccgttcgacgatgatggcaaagcaatgggaggtaaagtagagaggctcaggaatatcggtcattgccagaatgtcgatgatggaaggcaagatgaaaatgcttggcaacgatggttatagagacatgggctcatgctagtattgcatgatacaatgtggtactagagcattggttttcaaagatatcatatggtatccatttagtattattctgtttaaaacgggatcccgcacaatagtagccccttcaaataaacgaggaagttttattcggtttaaagcaaggctaataatacagctgacctgctggctataaggttctttatagccttctctcagcctacccatataatagttagctcttcacaattaatacaggtcccacttgtctctctcacaaagtttcttggttcttgtgtccaagccagctgttagtttacagcccgcttctcctctctctcctctcttatttcctacaattcagcatttagccggcttatagcttactattatacttgctcttatggtctgacactatatacagctttatttttatttattttttaaaaaaaggagtattaccgttcgtgtccggactccgaacaatacatgttcaaaccgggaaaatccatgccaattgccaataactttcagacaggcggattagcagaaaggtggagagaagtacactagctcgtttacgcgaaatatccagtcatttttttcaagtatagaagatacttgattgcgatggtataaactaaagtagtgtaccgatttagatgcaataccactatcctacttgatcacctgttcaccatcataatcaaatcatcgatattgtctgtctgttacagttaaaaaccgatgacagactcaggcgctcagccaggacaacttttttttaaggggaaattttaagacgccaggacaccctggaactactccgataaagtagcagcacaggacaattcgttgggtgcatgcatatcatcactaggcccatggactcgcgatagtgatatcacgcagtatagtatagcgaaaacacgcgacttcatggactggctgaccgttgtcaaagacaggtccaagatagatgataccataatttgtctgtagtttggtcatagctcggtcttcaatttgagatgtcagatgtcccaggaattcacgaagatagttactagctgatagcgtaaattcgccgacatatacgtacgcgcaaaattgaaaaacagaagttcgagggtgatcagtctgtttcaagcaacatgttggcacctgacaagcgattccaaatcaccggcgagaagtcagagttgatgaaaggggcagtagcccaggccccggacaagctccttgtcaccccttgattttctttttcctcccccattgactgttttgccttaagcaagatgatctcttcagtagttcagtggcgctttcggatgtggctaatcaacacataaaatttcaccgtcaatctctatttggttagtttgattcaacttctaaaaactccatgattagattttcttcagaagtggtaatagtaattaataagtaaaatattctatggatgattgcgtcagtccaaaaacatactcatttgtgagtggaattagtgagagcacgactgggaaataatgcttttatcagaaagagtagccattttttcgtatagttgtacgaatccaattgaaatcaaactgctgttacaactttatttattacttattagaaaaaaaacattgtgttacaattgtccatcgctattaacacgggattttttttaagtctcgagactaaaagagaataatcgttttatctctgctttaaaaactctcgttttctagttgaggacgatcttcgcatgaatttcactggattaaaaggttcgagaaaacattatgttaatatgtttaaaacaatcatggatggtttcaaggtaactttggaaggatcaaaacttacataatgttagatttgataagatttgttcatgtatacataattaagtgacatccatgttagtaaaaacatgctaagtctttactactgtaaaaatagagtcgatagtctttagggtttgttagaaccatgccaccctaattttgcaaaatttgagatatgccacccgtatctcaatgacatgtaggacccacataagttaatgacatgtgggtcagggtggcatatcacaaattttacaaaatttgtgtggcatggtttaaattttcccaagtcttgatgtcccatcatcccagcacgcgtgtagcatgtccatgtgctccttctcaaatcgcatgtacaccaatcagggtttgcaaaactgccggtaaccacgcttattgcagagtacagtaaaaggaaaatcgcagtaacctctgtaaattcaaataaatttaaaaaataatttgaaattttgataaattttacacggtttcgtacggcttaccgctgaggcgtggatgtgacatcctggcccagggcttaataggattaatagaatactcatatcaacaagttgcaacttcttttccggaatccaatctccaaagaactctgaggttcttctcgggtgcacatgagtgaggacaaagtgaaaagacttgtattggtctgtgagggcggtctatgatctataaaagctgccagatataagcgggtccggcctcggagaggcgggacgttacacgtggcaaccctggccccagtggttttagaaacctgacagcaaccctctcctctaggaaaaaaacagactagatcatgtgctttatcctgaattcatcctcatgtctcatatccgctcttataatcctcatgtcccatatccgcttttacaggcatagctcattgcaacatacaaacatgttataataaaaacgtgctttatccttaattcatcctcatgtcccatatccgatcttataggcatagcccattgcaacatacaaacatgttataataaaaacatgctttatcctgaattcatcctcatgtcccatatccgcttttataggcatagcccattgtaacatacaaacatgttgtaataaaagccttcacaggtgagaaaacattgctatgtaaactaagtaagtctttatttatctaattgtataagttaaaaagggaaaaaaacaatgacttaaaaaatactagttacatgctcgtaagctgccataggatcacatgataattttttgagggatttttttttggaaagggaacaattttttcgagtgaagttttgttttttttgaaaggagatagatcggttttttaaagggaggaacgaggaaggaggacggcgaaattaagatatggtactaatatcgttcaagaagaatccaaggcaaaaggatatttgcccttgtgagttcagttatttgtgggtctatattaaaaacaactttagtggttgtttaaatctcaaataccacacctatgctgcgttcgggagag

SEQ ID NO: 7349 - DNA, 9638 bp, Oryza sativa
atataccttagtcaatctcatgtttttaaggctttcagcaataatgtttggtgggcacttgaaaatgtcttatccatccatccctttaagaaaaccatagaaactgtgcaatcatacttgcatgatgtgtgaaaccctctgtttcccgggggagggggggggttaaaaaggatttcctgaaactgtgcaagaactgcacataaacatggcatagcttgatcaacttgatgaggactgtgtcaaagctgctaaaaaatgaatggtgaaagagatatatatcaataaatatgtagctagtggtgaaaagcaatgcaggcccgttttctgccggggagagagaaagagagagagagagagtgattgtcaggtagcttgttgattgagctgcatctgaattccggcatatacgcatgcatgaaacgcagcagagatgttcttcttgctgtctcgcttggacttaaccgcttgggctcacctgctcctgcatcatctgcatctgcatacgcaattatgcatgcatatatatgtttgcttagctaccatgcatgcatgcagtttgtttcagactctttcagttattaatcctgcagatgttcagagaaatgccatcagcggctccttggcccacatccttttcaacgtttaactggggttttgcctcgtagactgtgctatataatctttgtctatgcgatgtaaatactgttagctactccctccgccccaaaatataacaatttagaaccggatggcatatatcctagtccaacgaatctggataagaggctatctagatagattgatatattttgggatggagtagtactcactatagctagcttcaggttttacattaccttgctttgaaaacagccactgcatgcatatggacgggagcgtatcctatgcacacaggccctcgcgtgtacacaccgtgtacaccaactaaaaattatcacaaaaaattttaggaaaattcatacatgtactttcaatagtattacatctacgtgcaaagtcgcatcttcaaattcattctacatagagaataacaaaaaagataaaattttgataaaattgcaaccttaaaactgtcagattttttgtttttttttgttatggctaaaatataataaatttgacattaagattttaaccctaggtgtaatacaattgaaagtatgtgtatgattttttctagattttttggtgacattttttagttggtgtgcacgtgtgtacacgtgagggcctgtgtgcataggatatgttgcccatatggacattcatctaatgaagttcagaactttgtgaattgatgagtgatgacaacttttcaactattcggactagcttgatacgaaagttatatactcctatataacagctcttaaaagttttataaacatgtactcctactactatacaggtgatccatgcatgtttttttttttcggggaaaaaaggatcttcattactcagtcacggagtcctcgcgaacaagccgtgaaataaggtgatccatgcatgttgtattgggatttgggaatactcgtgaactaaattcataacagtaggactaattaactcagttatatattatgggtcatttaggtttgtcctaagacaaaatctttaaatttaaccaaaactataaaaaaaatgtagcatattttctaacataaaacaaatatactactccctccgtttcagattagaagactttctaacgatgcccatatccatatatatgttaatgaatctagacacacacacacacacacacacacacatatatatatatatatatatatatatatatatatatatataccgtcaggttataagactttctagtattatccacatttatataaatgttaatgaatatatatattacatggtaaatttaaggactaactaatatgtgtgttatatgtgttattatatattttatgaatttagtctaactaaaaaaactaatttagaataaatttaaaacgtcttataatacaaaactgactgtacttgtctaacaatgggggtcattttgtttgatgaaatatcctctgcatttctcagccttatatacctctacaatgagctagtggccaactcttgcgtactgggccaaatgctaaaggaaaaagtatagtttgactccctcaactatcgcccgagtatgattcatgtcccctagccacaaaaccgggtatatggactcctccaactattaaaaccggtgtacacaatatcactcggtggtttgggaagtggttttggctgacatggcgcctacgtgacggttttgaccaagtctttgttctacgtggtgcttacgtggcattagaataaaaacaaaaataaaaaaaatatgtgggatctatatgtcattcgcacaaaaaaagtattttgggacccacatgccatcctccttctccttcccttcttcctccccctctctctcccttatctctctctcccccttgggcctttctcttggccggagtgcgggggagacggcaatggggagcggcggaggcggttgggagcggggacggatcaaggaccgtcagtacctgctcgtcccggagggcaccgaccacccaccgcatgccgcgctgtcctccccctccccatcgccgccgcacgtcttccaccgtatccgcgtcgccgcgtgcgcgctgcgcgtcctccgcaacctccagcccgcggcggccaccatctggagcaagcttggcgatggcgaggggccgcgggtgttgctctactacacgtcgcttcgcgtcgtctgcgggacctacgaggactgtcgtgccgtgcgcgccatcctgtgggggctccgcgctgccgtcgacgagcgagacctccccatggacccgaccttcctcccggagcttgccgcgctcctcccccaacgccgccacatgaccctcccctaagtgttcgtcaatggccgccacctcgccgctcccgaccgccgccgccgccgctccccgctgccaccgctcccctccgcctcgtccccatcggccaccgctaccgccgccgctcctgagtcctgagagagagagagagagagagagagagataagggagggagagagagggggagaaagaaggggagggaggatgacatgtgggttccactttttgtgtgaatgacatatgggtcccacattttttttttgttttttataatctatagtggcacgtaagcgccacgtaggacaaagacccggtcaaaaccaccgagggatattgtttgcaccggttttgatagttggaggagtcgatatacccggttttgtggttggaggtcatgaatcatacttggacgatagttgagggactcaaagtatactttctccaatgctaaatgatggaggaaatgggccaagttctgtgaggcccatgcttgtagtcttgtttagccagaggataagggcttgaaaggccaaaaactaagaagggcctttttgtatgtatctgctgtgaaattggacctgaatccacgtctaatttcgacctatacactcttgcgtggaccagtgtttttagtttaattttccaacatggcacccataatttaataaaccaaattgactacgaataatctgcccgtttaaatgtttccttaattccctcaaaaacaaataaagaaaattcaaaggaatattacactactactccagttgaaaatttctttttagagtgggagcaagagtccttcgaacgtttgattgaaaaataggaggaggccaatgtaaaagtttcatttatagcaggggccattatactatttgagtaatactctactatagtgacttatgtactttaatgcaatcctctcacttgctataaaattatatatcgcactaatttctaaagcttaacatacagagatgtcatatcattacttactaacaattattacatttaaacatcatgttatattatctataatttaataatttattaaattttagagatttaaaatataagcatgttaaatcatcccacataattcacataatatttcaatatatctctccatcatttttttaatatcctataaatctatatagttcatcctcactttattccatgttaattttcttttctctcattaagtcatatcatataaattggttttagtcctcaaatgatgaacctatggttcaaattatctctcttctttttttctctctcactaagccatatcatcttagttctttgtagttcttagatgtatggtctaaattatcttccttcttgtgttttcttcataaagccacatcatcttaattttatatttgatccaacgtaggtgctgagtgactgagtccttctaataagagatggaagggagaagaagagggatatgaggaatagtgtgggttgggtgcagtgcgagtgcgggggctgaaggaggaagaaggagatgagtctccctataatctagttcgagatccctatttggagatagggtgtacgtgcgtatgcgtttgaacaacgtttctaaaaattttgaaaaattttggaaaatgaaaagggccagaaaatggtataggaccaatttgccaaaaacgctaatacacgactagtcgcgcgcgtcccttcccgcgtgacgagccacgtggcgcgcgcggaggagttaggttgcgttggttttttttctggttttcttttttttcgttcgtttcgttggttttttttccggttttctttattcgttagtttcttccgttcttctgtttttttgtccggttttctcgtttttctacgttggtttcttccgtctttgttcggttttttctctcccttttcggtttttcagtagcaagtttgtatacacacgtgtacaaagtttgtatacatacatgtatatattttgcacgtatatacagtttgtatatgcacgtgtacaaagtttgtatacgcatatacaaactttatatacgcacgtgtacaaagtttgtatatgtacgtgtataaagtttatatacatgtttatatttttacatatatatatataaagtttgtatactcccgtatacagagtttatatacgtcgtgtataaagtttatatatatgcacgtatacaaagtttgtatacgcatgtatacaaagtttatatacgtataaatgtacatatatggcaacgtatcctatgcacacgggcatatagctgcactcatgcacacgctcgttccgagcccttcgatcaagatcctgcggctaactctccaagcgttgcatttttacaatttaccgcccgcctcctccactaagttttgcaaaacacccctccacaattctcatcttccctcgagcagtccatattaacaaaaaaaaaaaggttaattggatccatgccattacaactttgcgaaattaaaaaaataccactactattcaccatatcagctatatgcaactgaaaatttctaaaattgaaaacatgccactgccgtccctttttccatctcctatctcacgctgtctcgtttcccccgtcagatgtggcgtcatctcacaccatctccctcttctttcttcctgcgagctcggcggccacggcgagcgctcgcgggttgaggaggtcggcgtcggcagcgcgcgggacttgctccaatccccaccgcctctactgacatcgtcgtcctcgtcttcctcctccaccagacgccgcgcaatgccgccggtcgccgccgccgggctggcccccgctgccgcgcgcagctgctcgaagaagaccacctgcatgacgacgcggagcgggaggcgattgttctgcgccgcgtggatgcacgcctccttggacagcttcttcacgtccatcaagcttgagatcttccgatcctcttctccgccttcggcacgttcggatgcaactgacaagtgacagcagattgcaatatgttcatgtcaaaaataatagtttagaaatcatatacaaaatatattagtagtttatacttaacatggtggatgaaaatatacatcaacatgtacaataaagcaaattcaagaaccaaaaaagatgaaaaatgatcactgttttgcatcatggtcattgtcaagcaaatataccttgagaaagacatcaatgtcggtgtacagtccatcatgggttgctcttgctgcatcacgcaaggaggtcggagaggaagacagcgacgcccgcgggggagtagaggagggagcggaggaggtcgcggaggtgcgggagcgtgcggcggacgacgatgaggatgcgggcgctgcgcgtggacaccacgctcgccggcttcgacggcctccgcatccgccgggccaaccatttgttcctcttcttcggcgaggaggtcgacgccagcggccgccaccttcccccgggctcgctcctcgtgctccaccgcggcaggagagcgtcggggagtggaagtcgcgggccgacggccaacgctggccgtaagccacgttcgagctcgccggagatgacgatgacgacgaggacggcgacgaggaggagttcctccccctggagatccgcgacgatgacgaagacgacgacttcatggttgccgacatctccccgcccccgtcgcgccacagctgctacatgcccggccggcgcagcgtggcgccgccgccgtcacacatggcgacgccgccgtgctcgacgatgcgccgggcgagctcagtctcgggagctgccgccgccgccgtcgtcctccacgccgtccgcggcgggagtgctcgggagctgccgctggcgtcgccgccgctgtccttttgcagttggagggagagagaaagggagattgaaacgattaaacgtgggaaggagacggcgtgagagtggggagtggaatctaatccctcgagggatatccctcgtatatctttttttcttttaaattcgatgtaaatagttgtaaaaaattctgaaaaaaattgacaatgtagagtataatgatacctactagttcatcaaaatttaagtttaaatttgatctgcacatcgagaaacaaaaaaaagacaaatttagatataaacagtacgctactatttatacgctgaatttatcttttttatatctcgacgtgtgagttgagtttggacttaagattttgtggagttgtatatatgtgttgtatgaatgttgtcaattttttccagattttttcataaccgtttagataggttttaagcaaacgagggaacatccccttgagggattagaatagtttcccatgagagaggggatggaaaaagggacggcaatggtatggttccaattttagaaatttttagtggcatgcagccgatataacaaatagtagttgtattttttaaatttcgcaaagttacagtcgcatggatccaattaaaaactcaccctatctggatctagcactagcacgccgcatgcgcaacatcggcgagggtttgtgttcggaggcagcggcgacaatgcttcaacggagacaacgacatcaatcaacgaagcgctggcagagacggcgatctcgagcggcggcagaggctgctgctgctttcaccacagcagaggttctgttcaagtttagggggaaaaactaggagctgtcactcatgaacacgatggattgatggctgaatatcttctatgtaatcccatgattcttccaaaacattactagttttgctttggacgcagatttgaaacagtcaggtggtgatgaactcttaaatctcatgtgaataagaagagcagaaattcggactaaaacaacaaatttctccgaagaaaaaagtggtaaatagttaaatgccccccaatttgccacttttacggccgcgcgcggtcagtcgctaatcaactcttcccctaatttatgagatattgaattatatgtaaaataatttatgagatactgaactatatacaatatagttaattgacaaatttaaaaatgacaaatagttaaatgccccctaatttgcccccacccgcacacggccggtgagcgtgagtagcagtagcccaaaaaaacacaagcaagggaaaaggacacgaggccgagggagggagtttggcagttgctcgctcgccaaactgccagatccggatcccgcaccagatgcgcccgacggcgatgctccgatggcccgccgccgcggcggcgctcgcgctcgtcttcctcctcctcatcgccgccgcgccccccgccgcggccttctacctccccggcgtcgcgcccaacgacttccagaaggtccgttcctcctccccctcctcctcctggtaatggctcccgctcctgcgcttgctggatctcggcgatcccctggtgcagatccggctccttgagtcctcgtgctctagccttttcggggttgtccgtacgcgccaaatcgttttggcttttttttttctttttttgaaaaccgaagccagcaaagctggtgttataattttggcgtgatcgtcgtcctgttcttccacacacacacacacacgtaggggatgctgtttcgtacgcgtttctgtggatgttggtggggtttggttgatgagtgatgaatctgtgtgccgcttgtcgccaatgttgagaataaactgtatattttcagtgctgtttgatgtaggggtgtggctgatcagtgctaaaggcgtaccgacatttggttagggatgcctctgtcatgtggttctagttgcatgcctctggaattctggatggacattagcatccttagattagatccattgtttcgcaagcctcagtgctgaggcagaacatgtttctaaccgaaagcgaagcaaagcagtttatctctttgagtggaaaaaacttctgcaatgatcctagcatatgcatttcgtattatccctctgaacattttcagaacaaattatattgttgactatagctgtattctgtaattttttcaagcttgcgcattgagtaaacacgctccaattttcaacatcttctcagcctctctataccgtaccctgtttatcttctctcgtcaattgttgccagttgtgcgtgtatcctcaattttgtcacttacgaatggcatgcatgtccttgcaacacctgcttaatcacccttttacccttaattttttttgctctctatcgttcagtcattagttttaagaatgactgtgctactaggcattttctaggttattacatgtttattctgttctgctacgtagagaagaaaacatcatgaaggtgactgaaagaaaatatttttgagtctgtgaagaaaaaaaatatctagtaatcttaaaaaacatacatttacatttacctgccgtactgacaatatcttaaaaatatctagtcatatgttttggatgtgctctaatggacatatatactacaatgcctgcagaaagatccacttcaagtgaaggtgaacaagctgtcatccacaaagacacaactcccctattcatattactcccttcctttctgcaagccagatacgatagttgacagtgcagaaaatcttggagaagttctacgtggtgatcgcattgagaattctccttatgtggtcagtactggtctctggtttacagattatctgagcgcactcgcatgttaatgtacctaattatcttctattttacttcttgggact

SEQ ID NO: 7350 - DNA, 11341 bp, Oryza sativa
cgcggcgatggccgtgcgcccgtcgacggagcggactgccgtggcggtggtcccggcatcggtcttctcggcagacggccgccctcctcaccgcacgggacagcagcaggccagcagcgccgccctcctcccgcctccgcgccggccgcctctctcatctccgcacgcgtacgcttgcacggtcagggacccggagcacccgtcgctggcgtccccgacggagaactccagcctgtacgaccgcccgggcacggtgctcacctcctgcaccatcgccgtctccatgccggacaccagctcaaccgcgcgggcgccgcccggcaccgcgtcgatgtacttgacggacttggtggtcgacaggatcgtccacggggacagcggcgtgtggtcgtcctcgtccatgggcggcaccagcacgccccaggacgtgttggggaagatgtacgggccctcctcaaagcccccattcttcagcatgttacctggttcagtttgttcgattatttcactgtgagcacatcctaattgtattcaattttgtagagatgcacactgatagcagctttgtggagaggttagcacccggctcaattagttaattacctttcgttctttgaggaggttgcggggtcttaatggcgaacgagtcgatgagggggccgcgagcttcgtcatcagagacaccggggttgtggacgatgaacaacacgacgctgtgcttggccttgaaggcccaggagtaggagtcccagccgctcggacccgttgttgccgaccgtggccagctcctccttggcgagcatagcacgcagcacgacgcccaggtcgtcggcaagcttggcgaggaacgcctagatggagtaaaaaaaaggaagagaaaaaagaaaggggaaagagagatgacgtgtatcatgctgacatgtggggcccacgtgagacccatgctgactcagccgccacgtaagccaaaaccggggtcaaaaccaccgaaagacctcgggtgaccggttttgtatagttaagggaccccgcgtatctgattttgcggttcaaggatgtttttctatcccgatgacaagttgagggaccttcggtgcactttttccctctaccggacattagaggtatgggctttttgcataggatccgataacaacgtgtccaacaccggtccgtctaaaataaacacgagtaacaggattatactaccctctcgatcatattatgtttaccaaacatgatgagtaaccgggtactacttcgtaaccaaaatcaaccctagtaatatttcgtgaggcgaaaatttgatgtaaccaaaagtggtaagataaaagatgtggaggtaatatttattcgaaaccactttggtgtagttgttaaatgtataaattttcagagctaccaaaatttagtagcataatgatagctgaaatatattcgatttatcatgttagggttggtttggacaacaaatcaaacacgctgttaagtttacacgttgtattaggggccgaaatggaccagacatgcacatacagacccgctattatattgttttatttagtacagtatatattttttcaagatatccaggtggttcttctttcatctatactagccacgtaatcatgcttcgtgcaacttttaatcccgtataataacttttgtatacggtatattagttaattgaaggttttagcatgagttattttttttcaaagtatcaattggcctacctaactatatatatatttagttactatataagaaatcactataagtctcctaagtttttctctttgttttctttgccccctctcttttttatcacgtgtctaagaggaaagcaatagaatcctcgaaaattcccatacgtttatccatttgttgtttctgttaggaaatgataggcgaacaaatgataaaaaaataatagatcaatcacagaatacatgagatttaacgtggaaaaccctctcaaagcagtagagacaaaaccacgggcgccagccagcaaaattcttcactatatctgaggtaaggttacattgtcgcacgacggcttacaagaggtatatatatatggtggaaccctaaaagggatgacgatccggcccaagcctcccggcgacaagcctccgctccactacgacagaagctggcctttattaagtgcaaataaatttggatcataactcaacattttccaatgcatgtgtacctttttatccactctttatcccttgactaatatgtcttgatgagatgtggcgtatcctcgtagtaaaaatgttttatgctttcactggataagataggataagatattccatataattttaacctagctactactatactacatatttaagtttaacatgtaaaaatggcactcacttctttttctacgcatgacaatattagtccaattttaaaccaactaacgtcatatattagataacgaaggcagtacattaatattatccgtgagcaattattaattagatcttaaatttgacataagcatgctccgttatgtatgatttattatattttaagctcaatataaaaacatatgaaatcatcgtgccattgtcattttcataatattttaacatatacagtatatgtttattatctttataatatttaacatatatttataattcttaattactccctctgtttcaggttgtaagacgttttgactttgatcaagtcaaacttctttaaatttaaccaagtttgtagaaaaagtggtaacattttcaatcaagataaatttatcatgaaaatatattcaattattaatttgatgaaactaatttagtattataaatattactatatttgtatataacttagttaaacttgaaacggtcttataacctgaaatagatgaaatagatggagtattaatttttctcagatagtcaaatctcaaggaattagcctctcacgcaggtgattcaatgggtaagctcctaattattccactttatatttaaaagatatgctacctttccctgtttgtgcacagctgcatatccacttgcagtggcatctcataaaaggagccttggaccttgctaaagggccacagaaacacatacccaaacggaactaaactaaggtcaagtggatgcaatgtcatatgcaatccattaagcttgccatttgtcatttcgtgtattttaaggctgccgtacaatgacaaggtcggattggcattattgtgaaacacgtaggcccgtatgatctgatggctctcacatgatacactaattaatcttactactgtacttgaattatttgtttttcaaaagcaaagctagcgcatatatccggattatgcagacgaagccatgcattaggatcgcttgaatatggacagagacaaataacactagtcccataaactaatgggagacaaatgcaacgaggcgttgtcacatctacctgaaagcctccatggccgtgatgcatgcaaggacttgtctgtctgccttaggaaagggctttgttaaagactgttgaacctgagtagtaccagtattattattcgtgaaaacagagaagaaaaatggaagcgacgcattgcagccttcgcatggttcatgaaacgcgcgcgaattaaagatgctcgatcgctcgtgacaacacagttcacgaccccgcggcatcaagaagccgcacgcatgcaagcatgcaattatgtactcgtatcgtgttcaaaattctagttgtactcttacttttcttgatttctcaaaaccccgtgccttgattagttctcaaatttttttcctaaaaatgtcacataaaatctttggattcatacatgaagcattaaatatagataaaataaaaaactaattgcacagtttgcatgaaaatcgcgagacgaatcttttgagcataattagtccatgattagtcataagtgctatagtaacccacatgtgctaatgatggattagttaggctcaaaagtttcgtctcgtggttttcagacgagttatgaaattatttttttattcgtgtccgaaaaccccattcaatatccggtcaaacgtccgacgtgacactaaaaattttccttttcacgaactgaacgaggacttagctcttccttccatgatacagggcaccgcgcgtggatgtgaacaggatgccgagataattttttaccatgtcaagtttttttttaaaaaaaataaaattttatacttttaaatttttaatttttaatacaaacattttcaggacttgattttaagatctaatttttttaaccacatcagtcgagccagcgtgaccaacaatactgtcacaccgatctaaataacgtggcagagttatttagcgcgtaggtttgtgtcagggtcatggataccacatacccaatagtaatcgactaagctcggcagggcccatcacataccatgtcttatacggaaacaaacctcgtatatagaaggagttctggataaggaatgacgagtagagttctatatgtaaacgacaaggactactcggatcatatctatatttatctccctagtcttacttggataagaaggattctatgggtataaatacaagcccccctaggaaaagaggggacacacccaccacaatctatgaagcaaatacaagccaatatgctgccagatctcgacatcagagatgagcctagccataccccatctggcacctacaggggccggcaagagggatctagcgccatctcttatctcaccgagtacggattcgaggaggagattaccctgtcgtcgactacgagttggttatctagccgccaagtcgacgacagttagatatgttatcctaattattgtacttgtgtgattcagatgaataaagaacaacaccagcttcggccaacaggatgtagggctattacctgtaagataggggtccgaacctgtataaaattatatgtctccatctcttttacctcaatctcgcatataccctgataccaacgatccccatacatccaaataccctagtcgtgtcgacaatttgctggtgtggtagtgttcttctcctaatgtattaggataaaactatatatgacacccgctgcatgttgtatgataatgttattttgggacgttggggtgattggcttgatggaaaggttcatatttttaaaataaacttgaaagttcatttttgaaattgtgtgtttatttcacactagaattgaaaatttggttgaaattggaacgatgtgatggaaaagttgaaagtttgtgtgtgtagaaaaattttgatgtggtggaaaaattgaaagtttgaaaaaaaaattagaactaaactcagcctaaattaaaaggtaaaaaaaaaatcgatcgtcgatcggctatgcccgctagacgagaggattgctcggcgcctgagccgtgaaggtaggggatattctattgcaccgtgatcttgtgctgcctcctctcctctcgtgctggtccttgcggtaccacatattttggcccgtgcctctgttggatcgctcgcgcgggcgcgacagtctgcggctgccaggagcgcagctttgactagcagataacaacggcgcgggaattgaaggagcaaggccggtgggtgggagtcactgatcaccatgtgcctcttgctccctcttcagatgcctaatcgggagtactccgtaattcaaaactttgaaagctcgagtactaggacagttgttgttgttgttgccctggactgtagattaaaagaaaagtaagagcgccctcatgcgccataaaagatgctgatcgcctgatccaacagaagcccgacacgcacgggcgcacccttttgtggctatctaatcctgatgttaattacttgatggtcataggcatatgatcatcgaattctacagttgttaaaccctgcatacttcttatgggttagtataaagattttgcctccatgcagctgcggcagaattatttttcaggttttgccacctttagacatgggcatcaagttatcaatgatcagtctcggcgacacagtagtgccaggaacgggataatgagcacccatgcttgggtacataattgctcgggatgaaggaaggctgggttaaacggcgagagtaacgatgtaaaaaaaaaacgacgaaccagatcgctgtagctccacgactcgtcgtcatcatccagtctttcgcctccatgcctgcgcgctgcgctgagctgcatgcacgcgattctggccttggtggcctagctacctctgaccctccttggattctgaccctttttcgtgcactcacatgccatgctttccccggtttcccccctccgaaaaaccaaaagcgcccagccaaaagtgccggatggacgcatacgtaaaaatggccgccccgtggatggatggatgcaattttcacttttatgattaccgcgcggatgcgcgaggacacgcgctgcactggcacgggcacatcagcacatggctgtgaacagcggaacccggtcatggctgacgacgggacgaggcggccaggtcacaggccatgctgcgcgcggcggaggaggcaggggcccctctccctcggcccagcatttgcacgcgctccgcgtacgcccggcgtcccgactcccgcgcgtgccgtgcgtttcgccgccacaccacccaccaccagtccaccaggttgacgtgatgttaaaggcgtgagaaagcaacggaggatttcggatttcgatctcacgcgcacggagagaacgagccgcagccgcccgtccgtgccgccggccgtcgtcgagctcggtgagacggtgtgggcatgtggagagaaacacctgtatctccccccgaagcctgaccgagacgtgtcacaagagtggcaaatagttaaattagccaaagtgacaaataaacggatcctgtcatctggttgggagccatcgagaaactttgttttcccgtctggtcactctagctaactgctggaaaagctagcgaacgtgcatggagtcctcgtgcggtcctaagagaaaaaaatcattgtcttgtggtgagattgaatcccatgattcccattcgctgcggcattagtggacgatgtactaccggagtagtatacgtgcaacgagagaatgtttcactgtcagcaaaagcggggaactttgacgcgaataattgcgcctattaatgagagaggatataacaaatgatggatcctggatgatcgagtgcgagaggtaggtgtgttggttgcagcagttatttttactctaagaggaactcttgtacgttgatctaatagctcaggctcccttcaaagaaaattcataaaaatttttatggatttcattcatataggaattttttctatatagccatttgaattaaatgaatgaattctatgaaattccaatggaatgcctctttacatataaattttgcaagaaatttaacatgaggtagaacctcatgttaagtctttatctctcctcaaattcctgtgttttttctacggctcaatcaaatggttatttctatgtttttcctgtgttttgtaatcctctgtttacacttgtattcctatcagaacctatatttttcatattcctttttttttccattcctgttattcaaagggacccctcaaaagttaaattttctggaacagagatagtatagcgagataatattgcaaaaaagtggagatagaaattttgtcaaacaaataatactattagaaagtatggttataaaggagataaatatttttatactgtagacaaataaaacattttttatagcgagataatactgcaaaaaagtggagatagaaattttgtcaaacaaataatactattacaaagtatggttgtaaaggagataaatatttttataccgcagacaaataaaggagataaatatttttacaaagtatggttttggaacaaaaataatacccgagataatatttttattattttcaagcagaaaagtggagatagaaatttcaaaaagacataattgcacttagccttatcgaaccatcgccctcagtccaactggcccgtcaactccttccgatccccatccaaaactctaaccctaggcgatgggtggcacgaccgatggtggcggcgccgctaggagggagtgatgatgaaaccgtgaagttgatagtgccgagggtaattttgtctttttaaattgctctatcatctttttgcccataaatgataaaatattgtctcagggtatcatacatccaagcacacagattttgaagtgtctatcagaggcatcagtagcgatacgattttgcggtttctcttagctaatcacataaaatatagatgttcctatagcaaattttaccatgtttgttgctaaaaccgcatatgcaaaacaagtgttactattgtcaatattagctagagatgtgatcccacttagattattatgtaagcatcctattcatgtatcctcttctcgtgatttttgtactcatattgtaactattaaaaaaacatggttaagtaagaattactttctcgtcccaaaatataaaaacttataatcggatgggacattttttagtagtacagatctgaaccggaaggagtaatcactggaattttgcaatggatacgaacaaaactatcatctctcaacatgatctacccttggaaaagcatccttggcaaagtgacgaggtgcgttcgttctgggggattgggtgagaaagggacatcgttttccacgcgcacgcttcccaaactactaaacggtgcgttttttgcaaaaattttctatggaaaagttgctttaaaaaatcatattaatctatttttaaagtttaaaatagttaatactcaattaattatgcgctaatggcgcacctcgttttgcgtatctttctaattttttttatctcctcctcaaacacagccgaagaggacacacttacagtgggtctagggatagagatacaacgcctgaacaggattgggagaaagagaaagacggattgctcaatggatgaggttggtggttacggatatggtattaagggaagctaaacacccgatggcccatcgccggcagcaattagccatttgaatcgcaatgatagatatcaaccgtaccatgcgatctttccagctagacagatcacatagctcagtgtctgagttgtagttaagtaagatttaaaacctgatattgtgccagattagtccaagtatgccaggacataagtatcacaagaaccattgatcgctcaatggacttttggcattggatgagcttctcgttgttaaggaaaaaagaattaacatcgggtcagttggtcaatctcccatagtcggcgaggccgccgtacagaatggatatcacttggcgttttgcggggcccggcctgcagtgacagcctcgtagcgggccccgtgcgagagggcccatgcataggtgcacgtttggctctggtccacatggatcatgcgcgctgcaggcaaacaaacgtgagtcgcggcgcggaaaaggagcgcgacctcgctgttgaacctgtagtaggcgtacacgtctgacgtggaaagaaactacatttaacttttccgaaaattagttctaaaacgtgtctcgtaaaacggatcccgtcttttcacaaaagcgaaaaaaaaattacacattaatatattagagaaaaaagagtgtttgatacaaacgcaatcagttatactggcttatgttaggggaaggaagaaaagacaaaaaaaaaaaaagaaaaagaaaaggaaggactactacgatggctatagaaatttcgattggcgggatagaacggatcccttcgtaaaattcaatttgaattaccgctatagtcagtagtcacaataataatacgtacaatagatgcatttaaactgattatcaatagtattactctttggatttaggctcttatttggttgactcatgccagataagttttagcaaaatgaataggcaaataaaagaatttataggtaaaaatatttttatctgtgttattagcagcctaaaagtatgtgcttaaaaatagactaaaagacccaaaaaatcaattttaaaattaagttttaagatttaaattttagatgtgattgataaaccaacaaatgatattagcttttgaagatagtacatgtcatcagtggtggatctacaatttaagatataggtggttcaacctaaatttttttctaaacacagtaaatctaacaacactaatatatgcaatgcatgtatagattaatataatataccaaatcaccaaaagtttaccatcatatattaataaatcatataaaattagtaaccaagtaaaattttgatttaaagaagtttaaagcagaaaacctaaaattgttagtgtgggctgggcgtcaacggctgcgcactgcagcaaggaggcaagtctccgtgagtccgtgattccgtcttccagttttacctggttgatcggctcgacgtcggctcctcgcagtagtggcacactatagcacaacagatcagtagtgtgagtgcggcgcagcggcggcggactcgtgtgcggcgtgcgtgggccgccggcggcgcggcgctcgctctgccgtgtgatcagatgagatcgcgttgacgcgtcgtgttcgtgtcgctaggggctagggtgaggaggagagagccacgcggaattctgaattctgatcacgcgtgtggggcctgtgggcggcgggcgctaggaatcgggaaggaatagattcgctattttttttaataaccgctattttctttttttttaatattggagccggtcgctgtatttttgggtggtccagggacaactcggaccaccctctgaatttgccagtgcatgtcatgattttaatatgtttacactactaattaaactgaactggtgttttaaaagctactccctccatctcataatatagcaacctcgtattggatgggacatctcataatacaacgaatctgaacaatcattctatctagattcgttgtactattagatgtcacatccggtactaggttgcaatattatgggacggagggagtatgtgactgtccaaaacgtagttggttttctgactagggctgtgttcttaccttcaagttcccaacccatctccctcgttttccgctcacacgcttttcaaactactaaacggtttttttttacaaaaagtttctatacgaaagtttcttaaaaaaatcaaattaatctatttttttaaaagctaatacttaattaatcctgcaataatacatgcctcgttttgcgtgccggggagga

SEQ ID NO: 7351 - DNA, 19192 bp, Oryza sativa
aggtgataacattcagattgaataagttcttattgacagtacaattgttatgaacacggcacaagtaacttgtaatttaattctcctttggaaaacagatgatgattgagaaagagagctgggccgtactattttgcactatcagatgattttcagaagactgagcaaagaggtcgtatctctggtagactactcgtcagagacaggtagtaatgacatttcttttccagttttttacaacagtagtaactaaaaaagtttgattcagtccagatgtaatttagatcgagatacatctattactaatgaatttatcatgtgttatataggtatttacatgatgcagatctttatggtacatcagcttatgtaggcttagctctaccaggagatgttggatcctggcaaagagagtgcaaggtaatgcattctatatacacacttattcttttagaacaagctggaatacatgttagactatgaagtatattatcgatcacatattccaacactgtagggataccaattctggtgtagggcacatgatggtggaagctttagcataagaaacattgtagctggagactacaacctttatgcatgggttccaggatttataggggactacaaactggatgctaagctaaccatatcttcaggtcagtatctacctgacatttattcctcttgcagcttccaatgagatatcctgatatgttcagcactcctgttcaggggatgacatttatctgggtgaccttgtgtatgaaccaccaagagacggtcccacgatgtgggagatcggaatacctgatcgatccgcctctgaattctttgttccagaccctaatcccaactatgtgaataggttgtatatcaaccatcctgacaggtgatgcagactggctaccaacagacttctcaaacatgtactaatcaagtgatcatcatttcttatcatatagtgttctgattgttcgttacagatttaggcagtatggactttgggaaagatatgcagagctgtatccagacggtgatctggtatacacaattggccagagcgactataccaaccgatggttctttgctcaagtaaacaggtgatgttttcatctcatttgaatacaactgattgcgcagagttacatgatgtgcttctaacatctgtgtccactgcagaagaactgatcagagcacctaccagccaaccacatggcaaataaagttcaatcttgacagtgtcagtcctaacagcacatacaaattcagagtggctcttgcatcatccgcaaatgccgagttgcaggttatttcagaaaaaaaaacacaaaaatactcagattggccaatgtccattcctatttcattatttgttatcatcattcaagaagttgatactaaatacacaaaatgcttgtattttcaggttcgtttcaacaatcaggacagaactgctcctcacttcacaactggattgattgggaaagacaacacgattgcgaggcacgggatccatgcgctgtactggctgttcaacatcgatgtgagtggagcttggcttgttcaagggatgaacaccatctacctgaagcagcccaggaaccagagtccatttcagggactgatgtatgactacctaagaatggaaggtccttctggcagctaaggccagtctttagctagttaaccagcctcacatgtatcgctagtaatagctgtactatgcctaggtatgcagtatgattttaaagtttaatcttattttaccaaaaaaaaatcctgggttttgtctaacccggatttagcttatctgatttaggttagctggtaaaaatgtaagctgccgaaatttctcagagcatcagaattttgaaaacgataagatataatctaaattggtgatatgtattggaaaaagaaatatcatttcctcttttaactgtagtgtaacgattagaaataatctaaattggtgctatgcttttgtttttcagaattatccgtatagcttgaccgttttccgtttccgacggataatagccttactatatccatattcgtctctgatactatctgaagttatccataaatcaacacagtctatttccacgcaagtgtctggacagtccgaaactatatgaaccaatttcatcactacctgtggatatatattataactaagcttttttttggatatatattataactaagctttttttttctttctctaaattagttccgaaagattgacctggcgatagtagacctttttgtgcgttgtagcacgtagcatttccacttattgagaagatatcattttgtacataaattattcaagtcatatgaacacgagcgagtgcatataatacaaaaagaaatgttttgagtacggatcgttatccttttagggtttcacattcatatatacttcttgtaagttgtcgttcggcgttgtaacctcaccccgatacagtgaagatattaatttgctggctggcacctatggttttttctctcctgctttgggaaggtttttcacgttaaatctcgtgtcttctgtgattgatctattgttctttatcttttatttgcctattgtttcctaacgcaacacacatatattttgctagtttaattaaaataataaacgttttaacacaattacatatgcattgtggttaaaagtagaaattatgtagtcctcgtacagcataaagaatagaactaactaacgaggactagttaaagagaaaatgtaacaataactattaagttagtgctgaaaaaactactccctccgttgcagattacaagactttctagcatttctcatatttatatagaagttaatgaatctagacacacatatatctagatttattaacatctatatgtatgtgagcaattttagaaagtattacattgtgaaatggaggaagtattaagttaagtataatcagtggcatataagaaatttgtctatttttttactagaaaatggctagccctattctattgaaccagatacgtgtggaaagcataaatttgattagtacgacgtccaccggcccatctatgctgcagtcctttacataatgggcttctataatagcccatgtcccactataaaccaaccaatggcccaactacttaattgggccttccacaatcaacaggagcagcccgctgtagagagggcagagctaaactgtacaaaattgcgtgcatgttttttaagataagaaaaactttattgaactcaatcaattaatatcagtgataaaaccatattgaaaacattctcggcatttgcataacttgaatacacaaccaaaattttcacgcacatagtatcacatagcaatacactcttgtgtgtgactatatgtgtgcagtgtgcgtgtgtgttcacgtgccacattatatttctatcatttgagccattaattgttgtaagattttcacaaatgttatgttcagacccagccaaaattgcagtatatatctggcaccaatttgatatgcgttatcaagatcactaattcagtgtgacaattgtcaccacttaccaaaatacggagtagtaaatgtacaaattaaatcccagccagattcaattaaattttgtagccacatcacatacaaattgaacatcaaattggatttggttcggccttaattcggtgttatttttgatggcttgcgtggctagcttcatccatcatctctctagaacgagaagaagctacactgcatgcatgcatgactgatcagtcattgacaattaacatgcattatcaccagttgatccacctaaattaaataatcaaaacaccacattaatccaccattaacttgatcatctcatcgatcgatcgattgattagctagttccatgcttgcatgatgcatcgatgaaccctaataatctggtggttaattaatataataattaattaattacttcatctcttggtccagtgagccggccatgcccatcccggcggcgccgccgtgccgcagttgaagccccggcgcgccgccgctcacgccgaggaagtccctcgtgctcagcttgccgtcgtccacgccggggaagccgccgccgacgaacaccgttccggcgccggtgccgcccccggtcgccgagagcgtgttcatcatcagctcccggagctggctctcgttctccgccgtctgagaagcagtgctcctcgacgagctctccccggacatgatgaacccggctgctccggcgggcttaccgttcagagcgccgccgccgccgccgcttccgagacctctgagtagcgagttcacgctgccggcgccgccgctgctcgtcgtcgcgcccatctgtgcggccttctggagaagcgccgtcgccgacatctgcggcggcgggacggtctggtcggacgagctgtacaaggacgagaagccgccgccgccgcccatcatgttcccggagaagatgctccccgagtcggcgttgttaccgctgttgccgtgctcgccgctgccggcgcgggcgccgttcccggcggcgacgccgttgaactgatccgggaagacgagtcgtccctcctggtggtggtggtggtggccgccgttcccgccggagaagtagctcaggttaaggaggccgccgccattgctcccctgctgctccggcagctgcattaggccgtggaacgccggcttgccgtggagcagcgaggtgtgggcctgtccgtcgtcgccgccgccgccgaggtagaacggcgaggaggacgacgacgtcggctgcgcggcgcggaacgcaggggagccggccgcggcggacgacgtggccatgaggtggtcgaactgcgcggcggcgttggcggcggtggtgatggcggaggagtggtcctggaacggttggagctggtgggaggcggccatgccggtgaggccgccgatggccatgccggcgccggcggcggcgtacagggcggcgcccatgggtggcataatcctgccgctctcctgcgccagcgcgtcgcagaaggcgcggtgggtgatgaagctgtccctcctgcatgtggtacaaagttttttttttcacggtgatcaatatgatgtgccacttaattattaatctttataagcaagatatatactccctctgttcttaaatatttgatgtcgttaatatttttaaacatatttgattgttcgtcttatttaaaaacttttgtaaaatacgtagaactatatatatacataaaagtatattcaacaatgaatcaaatgataggaaaaaaataataattacttaaattttttgaataagacgaactgttaaatatgtttaaaaaagtcaacggcgtcaaacatttagggacggagggagtatacaatttactcctagctagagataataatgatactgatcatgatgctatacacaatgaagttgggaagaaatacactacttgattggttttaaattaattacttgccgttctatctttatcctcggtctcaaacatccatatatttgaccatcaatttttaaacagttgtatagtttagcatcagtgtgatttatgcatgttttcagatttaccttgaaaaatatcttcataatataccttgaaaagtacagtttttctagaaaccaatggccaaattaagataaacatatttgacttaggagatcaagctaaaacaataagtaatttgaagggtagcaggttggtatatgtgcattcacatgttcacctcaaattcactttcttcttttattcacttgtcatttaattcactcatcttgtatatagttgtttcgttgtgcagccagcacaacatttatcttttaattaattaagttgatgtgaaaacagaaaatgtgaacattatgatttgttttacagatcaatatatacgttcaacttgtcactccagttatctttttttttttaaattcaataataccatcggttatgagaaaaaaacagttcgccaaattaataaatgaagaaatgtctaaaagagcaattaatcaaactagaatatcaagatccattgcaatgctaaattgagcatatagctttcgagacatatatcatactgctgtttaatagcacacgaagttttcccccaatttaagcactatctaacttatacacaaaattacataaacatatatatggtaccatcaaatatcctttgctaacatatatagcaacaaaaaaattgttgaaaattatatatctatttactaattaaaaaccatactaatgtgcatgcatgtcaacatggaatttatttgtggacagaaaaaacattggcttaatttcactagtagtacatgcatgcttgattgtctttgtaccaatatatccaaatatatgcggcagattgtgcaaactgcgactgtagcccatgatcaaaaagccagaaatgggaaggcaaaacaaagggaaagaaagaatgtcaatgcaacaatacccaaattaagatgcatggtgtaactgtactgtaccctctctccaaaacattcatacacaattgcaagcaaggttccaattttcagatggggatgcaagagcatatctgcatatgtgtgtgtgtgtgtgtatacacatgaaatggttactaattacacatgcatgtatgagcagatcgatcaggtcgccgagtggcatcatcaaatgtcgatcgatccgaatgcaacaacaagtggttcaggctgaatagtaaggccaataggactaaaactttaagtctctatcacatcggatgtttgaaaattaattataaatattaaacgtagactattaataaaactcatccataatcttggactaattcgcgagatgaatctattgagcctaattaatctatgattagactatgtgatgctacagtaaacattatctaattatggattaattaggcttaaaaaatttgtcttgcaaattagctttcatttatgtaattagttttgtaggtagtatatatttaatactctaaattagtgtctaaatacagagactaaaattaagtccctagatataaacaccacctaagctaacgcagctgctcgtgctagtagctagcacagtcgccatgaaaagaatagagctgtcgtctctgtagtctgtatgcatggctccatgcatcgatcgcatgcaatgcaatgcaagagagagtagtactgatgcatcccatccgtcacaagagaacaagccatgaccatggccatggtccttgcttacattgctgtagtacgagtatacagagagtactagtactacagttgcagctagcaagggctcttgtcatcacgtgaacacgtagggacgatgagagagagacagagagagaaggatacttgtatcaagatggtgcggattccgagtcgaaaaagatgactggcttttgtttttctttctgaaccttttcaagaggaggaggaagaagatgaccatggcggcatgatctgcagtggcctctctcagctggcctgcctgcctgcctttgtgtccccctccggacaagagcagttcacgtgtgaccagctaagctactaatcctatatactctctctcatggaatgatcaatgggaaaagttaatttgttgtaagaggagagtaagcaaagggaatcaaaatcaaatttccaaacaagaaagactcgagagacacaaccgtacaaggccagtcacactgttactacctactgttcttcactgcagcatgcgcgagtggtgacaaccctaaccctaacacgtagtagtactcacccgggccggccggcgacctagctagctagctagagccatctgcttcaatcaaatcaccatcatctccatctatcctagtatctaccaaagctattcatctcgtgcctttcagtgcccggacctcctcctcatgagtgtgttcatcatgactcaatcatatgatgaacaaaatatataaaagtacatgaaaaggaatcatcccaaatccaaacaattctctaggttgccacatcttgcaaactaatggaatatctaataattcaagacatactacacctccatctcaaaatatatacggtaacttctagctatacatctgacacaagacgcataaccagaagttgctgttgagaccacagagggacatcacaaacaaaaaaaaaacaaagaatttaagagatattatctccgttctcaaatatgaaactttttaattatacatctggcacagtcatgcacatataccagatgcatagccagaagttgctactgggacatacggaagggagtatgattcgcaatagaaagacgaagatgacgacttatattttgagacggagggagtagtacataaagagtacctggagaagagggtgccgcagtcgcagcggtactcgcgggtgccgcaggtcttggagtgagccttccagtcggactggacggcgtagcgcttgttgcacttgtcgcacttccacttcttctcgccgtgcttgcgggagtagtgcttcttgatgccggtgaggtcgccgagggctcgcgacgggtcgtggtggacgcaggacggctccgggcacaggtacacccgccgccgcgtctccttggggttcttctgcttcagcttccatggcaggttgtgccctcgccggtgcagctgcaggttctgctccctctggaaccccttgttgcacacctcgcacacgaacctgttcgtcgccagcagcgtgtgcggcgacagcgccaccacctccgcatcaggatctacgtacattatcaattcatcattgaattaattgatcatctgcgaaattcattcagaggaattatattaaatgagatacttgcttggattcccgggctgattcctcttcttcttgggcggcggcgtggccgcgaccggagcagccgcgttgttctgcaggggaggctgctgctgctgctgctgcatctgcggctcgccgagaccgaagtagtgtgcagacgaggcggctgccatctctatctctgatgatagttaatcagctcaaaccactgatagactaattgtcttgttctgttaaattgtggctgaagaagaagataggcatggaattaatccaatccaattaagtcacactcttcgatagtagtatgtgtatcttggacgctagctagtctaccagctgacttccaatcctcttcgatttgcacgacctgaaaattaatcaagacaaaattaagcagagatccaagaggtaattacatgcgtggatgaagctagctagcatggaagatggtggatggatctgtactgtgtgcagccataggacagacaaactgactgacctgcagctgatcgatcagatcctctctaataacaaagcaacaaattaaatcaaaaagggggaaggaaacgaaaacgagaggggaatttaatcaaggaattaataagagaggaattaattcacaagctaattaatccaaagttccaaaaaaaaaaacatgcaatcgtacgttgcacatactcacaagcaaggcagctagaaactagctagcttgaaaaaaggagactggtcaataacatgagataaggcatggagaccgaggtagaagaagaacagcaacacatgcaggagaaaaaaccaaaaaaaataaatcacatgtcatcgatctgagatggagatcgagaaccgaacaaacaagttaaagaaaacaagctaggctccttgttgaaaaaaggaagaggagaaaactctaattaaggcgatggagatagaaatatatagagagctagcaaacacgaaccggggttataataaattcgaaaagccaaaaacgagactgcagctatctcctcgtcttcttgctgctgggctagctagctgctgcaatctatactagctagtacacgtacgctccaaattctccaagttttgtttggagctagctatagcacatgatgacgacgacgacgacgtaactggtataacaagctagcttaggagcatatgctactatatggcgcctgtggctggagaagaagagaggaagaagacgagagagcgagcgagcgagaggagaggagggagatcgatatggtgtggatcgagtaatcgatcgactcgagttgggtggttggttatgagcgagcgagctagctagctctcctccggcgccggcacaagggtggggcccacgtggcgccctctatgggcccaccatgacatagacagatgctctcgtcccttccactccaccccgacctctccatcctatactagctcatgttccctggtatatatggatctatcatctatctatatctccaattcccaatcagatgtacatgtacacgtgaccgtgtacgtttagggaagcttttagtagcggcaatttcttttaaatcttgagctctcttaaatagtttaattagattctcactccaatactagggattctctgtagttatagaattcagaaaattaactactaaatagaagtaaaagattaaaaacacagtttgcttcgtattctcactagccaaggctactcattagtttcttcctagaatctcaatctctccaaacgtggcctaatatcttgagatttctcgctcaatctatatatgtgtgtgtgtgtcgctttcggaggggtaaaacgcttttcaatctattgtattattaaaacatcattaaaaagcgacattaagtgaacgatggggactataaattctcacattaatcaaagaaaagaaaaaatagagttaaaaagagttcaaattatagttcccagcggtaaagagaattagcaatagccagcggtcggggcgtagaagtaaggtgacgatgtttattaggacttctaaaattataacaagggaaggacgagacaatgaactctaaaatagtacgatttcccaagacaacgagatattttttaatacattttaaaattatgtgtaattcttttataattttatgcgggtgctaggactgctagcctcataattgtacggggcgcggactactccaattactggcttaaaaaaacgattgatcaatcaaatttgaagcgctagctgttgtgagtggggagcctttttggctggatgttttgcttgcctgattaattatacttgcagtggctgctgtcaggggcatgtgtgacgtgataacaaacactgaatccgctgtagagcggctcatcaatcatcaggccctgaatgttgcggcacagagcatgcatctacagctagctaggtacatatatccacgaccaagttccatgtgatcattgctcatcacatatgtaaacgggataaagatatatatatccatttatctaaacataatatatactatatgtaattggcttagttaaataaaaaaaatgttatctaaaatttaaagtccaaaaacaattatatcaggcggcggttgtgcatagaggtacatacatgaacatatggcacgcgtgtagattttttttcttcggcgcatgcatatagcgaaactaagtgaaaaattaaatacgaaaagcatatattaatattatatgctcctcatgcaaattgagaaaaaatatctttgtgctaaaagattagttttggcatgcatatatatctccaagagtttcatgacattctttgtcacatgtactttgcttgtcaagtgcttggcagcaggctatggctgtgttcgctgctggcggttcccatgcggaaaacggaacagtctattagcgcgtgattaattaagtattagctatttttataaaaaaaatagattaatatgattttttaaacaactttcgtatagaaactttttgaaaaaaacgcactgtttatggcaatttgaaaagcatgcacgtggaatacgatggagaggggttaggaaccctaggttctgaacagaccctatataacacaataaaatactacgctgttgaatagtaattcctctacgaggcatgcataattgcatgtgatgtgtattcgagatcaaaagtacaggacaaaaacaaacatatagaaaaatcaggaacagatacatacttgtgtgtatatgcagatgtgctcacatgtgatatataattagctgatcatttcatctccccagaaattccaaagtagcaaagtttaatttagtggattacgatgtataggaaacagcaactatccacagagaggaattacacaatggcgactaaaggacaaagccgtgtattgtcaacagcacgaagaaaaacaaaattcttgtcacgaggctgactgtaaagtacagcatatatactacctgtaaataatccctctcaattaaattcaaaaataacacatgtgcatgagcaagatattaggtcgacgattcagcatcgggtataaaagggcatccaaaaccttaaaataatcaaattcaagctgttccaagaaaattcaaaatctctacacctgatatccaaaaacctcccatatgcctcaaatattaattattgaatcaattagacatatataaatcaaatgttacgatagacgacacgagtttgatgttgacggctagctactagataaacttgatagcagaagaaaacacaacatgccatgttgccatccatatgaaccaatcatatatctcttgttttctcaatcctcattctggtttattagttttacatagtagacaaataaagagtaaattgtgccggtatatctgtgatggtattttgaaactcgtcgacagataaaactaatgatatgggggggggaattctatagtgttattcttgttttgattttccatgcatgcatcatcctgatcactactccaataatgtcaatactaccaataataatgtgttaatttcctccatatcttatatgctatctacttctcatcagtactaccactactagaacaacgatttttgcaggtagccaaaacgaaacagcagttggacgtggtggtggtggtcatcattgcagggaggattgatgccgccgtcgccatcgagaagccggctttccatggacgccgcttctaccaccacctccagcgccaacattgtcaccaagaccaccacgaggaagatgacaacaaacagcgcgaggagggtgcgcccttgccaccatgatgaggaggaggccaagacgagtcgttgccagatccgccgcctccgcctccctcatcgccggatccaccaccctcgtcggagaaccgtgtgccacggccgggggagcaccgccgctgctcccttcccttccaacactaccgagccccgccgttgctgccgttcgggtgaggaaagaggagctcaagagaggaaaagggagggagttggggacttagaaaaaactggtgtttcagttttcttttgcgtctatttaaatgccacaaccaaatttcaccggatggcttaagaggcccacctgcaaaaataagggtattattgcaggcagcccttttaagccatctgcctgcaaaaatgggaataggatattcccaggcggtcggccattggactcctctccacacaacgtacaactacacaggtgggcaatcgtagtcgaaaataagatctgcctgtgaaaatctatgtgtttcattgtagaaattcgtttttctagtagtatgccatccatcatcagccgcaaggagagagatgaagcaatgagcaatggatgatcttcttccaatgctagctatctactgtggctatgaacaagaaggcggacatatggaaacaaacctagctataaataaaacagagagaaaaatttagatgcctactaaatttgggcataaattaaataaaaaatcatttacactatttgaatggaaaatatgaataggctcacatttttcccaatacttttgtagaggaagctagcaggtcctagtccttgaacactgaaatacaatatatatgtaatgacaaatttaattagtttatcataaataaaagaaaatgttattagggaatagggatggaactctgctaattaagggttgttcgagttcaggctgctccttaagatcaccacggtgcggttttatggattggtgaagcatggtaaaagaagattcaaaaagcttacttttctacattttttttgaaaataaaacctttcttttgttttgttgtttctcagttaagatttttggaaactaacgatttttgtaagttttgtctatgtatagtatatctatttatggtagaaggtctgggatctctatctattatattgagacagagagagggagagaacaaacaagtgcagtgcatttgcaccggacctgcatgcagctttagtggttggcaattgccattcgaaatgaattaagaattggaataggaatatttttgttggctaccttgtgaaatgttaggtaggcttgcgtccacgcttgattcgatcacattcgatcaaccaatgtttatatatactttgatgaaccattaaaaataaataaaaataaactagtggcagctgctaattaactaattaagctgttaggttgttttagctcacagcaatctgctaacctatatatatccatcgaaatcgagttactgtgagagaggctgaaatcgagttactagccggacatgatttgtagtatctgacaattctggccgtatacggtcgttgcctagtttgacgtgttgacactgacttgttgcgtgctcacgatttgatttgattcagaattgaacggattagtcctaattataaattctagtcaatggctgccggcctagcgcatgcacatctccacttgtttaatttcagcctagctctcgcttgttccgcttcctccatcttgcgcaggagcagatcgagatcaacctcttttctactcgttctccgtgattttacctacttgcttggtgccatatatagcctggtttctctagtatctcctctattctctagcttctccccgagctcatgacataatcggatcgaggcaagtcaccttttcgtggaagttcataaaagacgcaaatattgtggaaggaactaatatcaaaaattagaaggggtgagacttcgtacccaagtcatctagcccaacagaagacccctgggcgtttcgcggaagttcatgtctctatgaacacaacttccaatccttggtacttaattttacaaccaaaatcaagaggattaatttgaagcgatgtagctctaataccatattgataactactcaagaacgcactcgaatcgtgcaacagacatgatgaatttcagttgtagctatgggcaaatcaatccggatcaagctagagcaccgccatcgctaggttcagatacaagctgagtctgtcatttctttccccttatataagcttagagcatgaccgatgtttaatccattataagatcctatggatagacacccagtgagggtagcacccttcaaaaattcttgcaatgtatagaactagtaaatgtcttataggtaggacgcgctataaatggcaataggttcatggtggatgtaaaggcctctgagaggcgggcccatatattctctcttctctatagccagatattatgattgttgactggttctatattaaaaatggtaggaaaaagtttcacaatatgtaggttagacttattcttctctctctctctctcccatagaacccctccaaatatcacattgtggatgctcttatacattacctactatttatatatttttttctcatcagataggtcgtgatctatccataattgtgtattattacacgacccatgtcgacccataatactttaaattattgtgtttttccctcctgccgcgtcttagctcctctcctgccctgtcttcagctcgatcagcaacatcttctttctttgatacaacgtctccctcagacccagcatctccctatggtggctaacacatacgtagactctgcaatcattggatgcagtactccaattttgccagccaattgcccactgcacgtacagtagcacatgtgtacattcttcttctttccaaattgaattgaccattataatactccccccatccacagaagttatacatattacttttgtcaccaagaccgaggagagattaaatcatctaggagtcaccaagaccaaggagagattaaatcatcttgcatattacaaaatcaaggagtgaatgtaaacatgccaccaatgagtatttagatgactcattgaattctaatcaaacatttaatttatcacttcatttaagtcttggatgcataaaaactacaaataggaacaacttatttggaaaagctcaaatgtgaaatatctaacttttgtggatggaggaagtagtaatatagcacatgcaaaatagtttgagatttgtgggttgctaaatttcagtcacatctttaaaaatctcgctcaaaatttcccaccgtgtgatttatgtcaagatttgtgccctgacgtcttccccaatgacgtcgggctagtagctagtgtcgtctccggcagcgcgagcttctagagacatggaatgacaattgaccgagggtacattgctggcgttcatcttaggaggatgagtgaggaagaggagaggacggggcttgatgatgaggtagagcattgatgggcgatcaagaagaagagaagataagattagaggattggagcattgtaggtgcacgaatcttagtacaatatgagtcactgaaaaacaactgaaattttatgatatttttggtaaaaaatattcgataatagtacatgggtagccgatagatggaaactgaaaacatacatgcagctgatatataatacaacctccatctcaaaaaagatcaacttctagcaataaattaagataagtataatattattttgggacgaagggtttgtaagggaatcccaaatgcatgaaggtgtggggcgtggcggtatccaagggagggaggaggtccatgctgcatgcatgtagtgtgaactgtgaagctagtatgcagcacgtaccctagcttgtttgctttcctgcaggacacagtcatctgacagtcatatactgtagtattaggctattcctaacccaaagcactgtacatagtttccataaactccacatcatcaagaaactagtactagacactactctttcaatgcaaacaccactatctatacttaaatttaatgctacttatctcacatgatgtcttagatgttgtgtagaaactatgtctcatgcaagacatggtttccttctatttctttatttatttacttgtgacatcattttttatcttagatggcagcctatttaatactatggacatcatcttaaccattgagttaggaatggccttagcttggcgccacctgcagggacactgcatctgcatggtcggttcatgttacagcgtacaggcctcaacctctctccgctatatacactctcctagctggctaacatgtgtgtctgcatgcactgaatttttgtaaattcgtatgctagtacatggacaagaatgcagagaaaagaaacagatactagctcgatgaatgaattaattggctgtgctaagttttgagtactctctctatcccaaaatataaacatttttaactatggatctggacaactatgtatctagattcataactaaaagttattgtactatattttaggacggaggtagtaactagctagtctttacataaacgacagcataggccagattagttgtgatgcttggcctctcggaattactcctacacatataactcatgaaattaatagtgctgatgcatttatcttgaactcattttcacattcaactatatattatacgtactctgttcgttccatgttactactatgtttcatattataaatcgttttaattttttgagccaaactttattaggtttgactaaatttataaaaaaaaatatagcaatatttttaatacaaaacaaaaaaattatcaaaatatatttaatgttagacgtaatgaaactaacttggtgttataagtgttgctatactttttttataaacttggtcaaacttttaagaagtttgacacttcaaaaagtcaaagcaacttataatatgaaacggaaaagtgtaagttactttagatttgttctaagttaaacatattattgaaaaagtagcaatatcagggaggagacaggcccataacaattagagcttaaattaggtctaagctagtctccttaatcccttataaatcatttcaaaatttcattcaaagtctaaagatttgataaattatgttggtttagccttaggtttaattaattagtaaattcctgactcggctcctggttccaccctccatccctaaattaagtgaagctacttttagtatagtaatttgttctaaattgaagttatagtaatttgttcacctatcatctcatctcaaccaatattaaccattttgtgtgtttagtttctacacctacgactttctctcagtcaatttacaaacatctcccaaatattttcaaccactctcttcgtttcaggctataagatgttttgactttggtcaaagtcaaactgcttcaagtttgactaattttataaaaaactatagtaatatgtacattaccaaattagttttattaaattaataattaaatatattttgataataaatttatcttgggtcaaaaatattattgttttttctataaacttggtctaacttgaagcagtttgattgtgaccaaagttaaaacattttataacctaaaacggagtgagtactttcttaatttgtgtgaagctgttcagggatgtttatattttgggatgaaagcaatacattttttttgtacaaacttgaaataagagcaggtacaatagcaggctataagtcagttataaacatattttaaagagataaaggaagagagagaagagtagctggcgacagatttgtagccagctgcagcacgggctccaagacgcaatgtgtgtatgacaggtggtaccgggtattaatagtatagcaagcaactattgtatgaattggctattacattggttatagatgatttagagctggcagtgggttataccattaaactcgctctaaggggagtactagtgtgcatcaggcactgtggcagctacaggctacagctagggcgcgcgtgcatctgatagatatgatgcatgcacacatcaatgcacgggcgcgcg

SEQ ID NO: 7352 - DNA, 104634 bp, Oryza sativa
gtcatctattaaaaaacggaggtagtattaccgaactatttggtccgttccttaaaaaaaacctcttaaaattcataaacacatactggccataaattttcatatagtagtattattttccaacatacgtataacatctacacgtgtataaattcaacatgtctatatcctatgtgtacagaaaataaaacattaaatagcgaaattagaacaccaaagaagtagtagcaagaatctcattattaaaaatcttcaaataaattcaaccaactataggtttaattgaaaattaaaaaaaataagagaaactacaagtacatagcaagtaacaccaagaatttcatatgattttgaaaaatatatagacaaatattaatatacatggtaatacacacatggctataaatttacaggcgtgctaatcagcacgctaattttctagttttacatcgaatccgattttcatccttgaacaccaaaaccagatacaactgatccccgaattatcaaaaccggtgtaaacaaggtccctcggtggttttgaaggcggttttggctgacgtggcgcctacgtggctagtttgactaggtctctgtcccacatgtcagccacacaaaaaaaaatctaaaaaaggtgtggcccacatgtcagctaaaaaaataaatatggtaggccccacatgtcatctccctctccccactcggctctccctcttcttcctcgtcacgccgcagcatgccgccgccgtgcatgccggcggagcggcagctgcggcaggccgtgggcgaaggggcccacgaggagcggaggggcggacggagcgaaggagtggcagggcgcggcgcggagcgcctcctgcctcctcccgttcctctgggggctcgccaacctcccgccgctccgagtctccagcagcgcgcccgtcacgccgccgctctcgtcgccgacggcatcgcaaccgcccaagttcaggaagccggactgagacgttgaccccttccggcaccccttcttccaagggcaaagctacacaagctgatgggggtgcacatgaaccccctgtatttctatttttagtgcttgatgtcatgtttttgctacatgtgcacccccctcatctcagttacgtgcaccccccaacgaccggccaaagcgtggcggaatgagcgcacgagcctactggtctgttattttgttttttcggttttactgatcatgtctatcgccaatactacatgcttatattgattggatagaggcaagggcatgcatataacttgctcatcttatttcttcaatttgtctgatttcttcacatcaaaccttaaagtttaaatatagaattcaattttagttattattttaatgtttctagatagtaatttaggatttaaataattatactgttttactaggatttaggaaaatggagtagtattgcagatcgatcctaagtactaatatttcaattagaagagttatggcactagcttcttgacttttaaattttacacacaccaatatatagtactcccacttaactagtgtatgtgtgttagtttgaagcataagagagacagaaatcctttgtttacgcatgctccctaaactgctaccaatgtgtttttctattaaaaaatctataaaatattgctttaaaattcatattaatcaattttcattttgaaataattaatactcagttaattactcacctcgttttacgtatcttctcaatctcttttttcatatcctctcaaacacaccctaatattattcaatggttcaatgtatcttgcaatgttgagtatcatttttatcgttcccccttcactttacattttaatgtaagaatttctaatcatatcttcatcatacacttagccatcatctagtatgatgtttaacaattgatagtttatcattatcttgtatagcatggcttcaaaatttcgtgtgctactgcatatacggttgaggtggtgcaccttcctccaatttgttctagcttagccactaccttcttcgcagtctccgcgccggcaagcccgacccgaggccgccgccttgagcacccggacacgataccggagtgcgacaagtctgacgtctcgacggtggactccggccggtggttcagcttccagatggccaccatggcgctgacgtcccgcacctacaacctcatcaactcggcctggtggattgggaaatttcagggtgaagtcttcgatgcgagtccttcccgtgcacgcaagaaagggcgctgtgctgtgaggagatcctcagctttgagcatccatggggttcctcaaccttgtgggcaactcctttgggtgctcggcttccggcgagcggctcgtctcggcggccagggacgacgacctgcaggaggcgcgcgcgctgctcgagtacaacccgcggctcgcctggtactccactttcggcggccgcaactcgccgctgcactacgccgccgcgcagggtcaccatgaggtgatgccatttgtctgccaaactaagctgaagtatccgtgtttctgtatagatgggtaaaagaactgcaatactgcattcacattttctgttgcttggatgttcagattgtttctctattcctcgaatccgacgtcgagatcaaccttaggaattacagggcccaggtaaaccaagatttctggtacatttagttgtttaagtttcacttgcgaaattcgacgaggggagggtgacgccatgggagggcgagaggaggcggcgtggactggggcgaaggacggcggccgcacaggaggacatgtggggagagggagatgacttgtggggccggatgtaggtagcgacgtcggtgtcggagtggccgtcgaacacggctaagaggctgagctcgttgccgtcctctaggcggtgaaactcggcggcgacctcctcctctggccacctccgccgcccgcaccctgccacagccgctgccgctccgcccgcccctccgctcctcgtgggcccctttgcacgcggcctgccgcagccgccggtatgcttcggccgccgtcgtcgtcgtcggcatgctgcggcgtgatgatcaagaagagggagagccgagtggggagagggagatgacatgtggggcccacgggccccaccatattttttttatagctaacatgtgggccccatcatttttagattttttttttatgtggctgacatgtgggcccatgatttttattatttttccgagatataactggcacgtcatcgccacgtcaatgtcacgtgggacggagacctagtgaaaccatccacgtaggcgccacgtcagctaaaaccgcctagggacctcatttgcaccggttttgacagtttgaggaccggttgtatctggttttggggttcaaggatgaaaatcggattcgttgtaaaattaagagacctcagatgaacttattacttttatatatgggcctaatggttgtgttttgggctctacttgggccttcaggttgtgacaaagaaaaggaagtttaattttactccttttatagaggccggatttagttcgtaattcttaaccgtaaaatcgggtatatatatcgacctgtctaactattaaaacatgttcaaatagactcctggactgtttttagggtgcttttttttttaaaaaaaaaaggaattcccttgccacttttatgtgggctctatgtttgttcttaattcctcatataactaggctgctaagttagacgcatgagccaaaaccgtctttaaaacagctaaggttttttttttcacgattttaatagttgaaggtaacagagttttgagggatatgtgttaatccggaaatatttgagggagttaacggaaaagtagcttgggctttcgtgttggacctctgctttggcgcggctgcttgctgtgcgtatgtgactccgagtgtgacacgatgctctgtgccaaacctgaaaccctgtgtgcgtgccgccggtaccggcgcttactgcacttgattgtgttgcaacttgcaatgatggttttcagatgcgacgacatgaaatcatatgggtgcagtaggtcgttgataaccagcaaaaccaggtttctctcttggcataatccgcaggacagacatgcatatggaggagagacctcgatcgacatatgtggcgcgtgtaaagtcatccatctgcgagttaattgcccacctgcacatgtggatcgttagttcgttggaagaaaaacaaggccacatcacatgcaacagaaaaagaaacacgcacgcacgctggttcttgctgcaatcggcatgtgattctctgtttcctcggtcgaatccgtacgcacaatttgggtgcgttctcggttgatcgatggccagagacatcatgcatgcatcgacgtatagtgtcaattactccattgattcacacggagtacgcaacagctagaggcactagctaaggccaggaagattacgctggccccacacgtgcaaccggtgcagaccgtttgcttccttatcgcctacgcgtccctaccgagcgcgagaaaattgtgattttgctatcgcaaaagaatggtttcgctggaatactatcccttcaaagtgattcattaaaatactattctaaatcaaggggtgttcactgaaatactattttagatctttttggttgctagaaatgattttactctattttaagttttgttctgaccaaaatactcttgtgtccttgtctctattatgttgtgaacagttgtgaaccatggtgcatgtgaactactattatgttgtgaaccattgttatgtgaggtattttgtgaaccacatgctattcaatattatgtctacatgctgtccaaaattgttctattttgtttttacaattttttcatgcccaaattttatgggttaagctagcttcaccattatatctttataacttggagtgagaaaaatcttaatctgtatgcgcgcttgtggctaaactggactacacaccatttttattgtacaaatgtgaaaacaaaatatattgctctagcaaagcatgtgtcaaaattaaccagagaggtgctgtttgacttttaaaccagtgcactagagcttactagagcttttgtattagtgttaatgatcaattagtatatacatatcacgcagcggagtgtgagccgtacataggtttcacaaatatatagcaatatattttgctctagcaaagcatgtgtcaacctgccattatcctgggcgaaaggaggacatagaggcgagggtattttggtccgaagaaaaactaaaagagagtaaaaatattagtactaacaaaaagatccaaaataacatttcagtgaacacctcttagtttaggatagcattttaatgaatcactttgaagggatagtattccaataaaaccattcttttacgatagcaaaatcacaattttctccccgagctcagcaagttgcagcggcaaccactggtgagtggagtggcgctatggctcagtggatagtcgctgatgatgatgctggtgcatgtacactttctgctttcattgtggcagcaactagcagccaaccacgccgccatagatagggaatagtggaatgtacctttcctggagaaaaataggctgaaattgggaagaagtttggagaaaattggtagtttgaaaaaaaagttgggagtttatgtgtgtaggaaagttttggatgtgatgtgatggaaagttgggtgttgagggaactttggtgtgaactaaacatgcctatagtacagtaattcaggaaattgtactccctccgtctcataaaatagtacagcaattcagtaaattatactacctctgtcctatacatatgtccagatttatcatattagaatatgtcacatcgggttctatatttgtgttttttatggaaggaaggagtatgtacactgcaatacatttaaaccctgtttaaagcgtttaaagcaagaaaactaaaacacacaagaataaaaaggtgcaagaaagcaaaatgcatattagctactcctagtagatgggaagcatcagtgcatctatgtgttgcctgtcggtggaagcaaagcgcgcgagccagccgccacggatgcgaatgggagcgcgccccttctggctttcgtgtgcgcgcgtagcattcactcgcagcggccaaagcaccatcatcctcgtcgcgtgcgtcatggtacgtgccgcggtgcgccgtttggttggcgaacgtacgcaagcagattcagcacgacgtagtacgagtaatggaatgtcacggtccgtgacaacatatcgatcctctcgatcgatctgaacggccggccgtcgccatgattattgatcgtgtactccgcccgccgtggtcaccaccgctacctccttcacctaaatccgatcgatcgattgcccccctcatcaccctgggcttagctagctacctagcgttattattgacattattgtgggcaatagaagggaataaaaagtcagtagctgctattagcactatatcctcctgcctatgacagtgtctcgttttcaaaggcaccccaaccccaaatcctgccctcaagtgatgaacgctttctgagtaaacaagatctgcaaagtgtgggcttcatccaataaagtactactagtagtatactagtattacatcgaagtgtgttgactgatacagtaacattaagataacacatatgcagtactgctacttttctcttgcaaactgtactgggtttcacctaatccaggatcactcggactataatactttgtctgttgaaaagcgatcgctagtatctaggattaggaattacgagtagggctgcacttcagtgtgcagttcctccaatcgcatgatgcatccagcatgtaacctacggccatagatgctccagcctccagctgcagtagcaccattgctagcattgttttgctcccggcaactagctggagtgcttttcttctcttcaccacctctacactactcccatcacatggcatcacatgaggtaggccaaatgctttcgggacctttttcacatcacgtagacagaggaatagctagcgatgttgtgggggcatttctttctggggttcaagatgaaaagctgaacaccgtcacagtttcttttgcacatgcatatgcaaatcgccaacgtacccaccaccttcttgatggagctaatttgattcgcggtgtacggtgtacgtcgcgcatgcgtgctcattcgtgcgcagcaaacacacgtttgactacccatggcacaaataggggtgaagtccaatttaccatctcgaaaccaccggagtgtagaaaataacaatccggtttttaagtgatggttttacaaatttgacatccaaatcgttcgtttttttactcatatggttttttcttgaaatgtcttatatatgtggtaactgttctttacatctcttgctagttgctagttgctagttgcctagctagatgtgccgcggtgaaaagtaaacatacaaaattctagtattgaatcgggttttggaatatcccatctctaatcatccaattgtctacatcgacctcaaatgatattgagggcatgtttggatcaagggataaattttagtccctatggatgtttagacactaattagaagtattaaacgtagacaaatgacaaaacttattccataatcctggactaattcgcgagacaaatctattgagcctaattaatctatgattatcctatgtgatgttacagtaaacatgtgctaattatagattaattaggcttaaaaaatttgtctcgcgaattagctctcatttatgcaattagttttattattagactacatttaatacctctaattaatgtccaaacaaccgatatgacatggactaaaatttagtccctaaatccaaacgccacctgagtccatcccatcctatgaccgctcgaactcccaccaccaccgttgcatcgtgccttctatagttatatgggggtcttaacgtcattaccaccccaatgtccgttgctaccgtggccacgtcccaccattgctcccgccgttggttggtttacttggttaccgcgaagtttatcgtggtttaaaactgatccacgcataataaccgcgtgataatcgtacggttttgcaaaccccagctgtcacaaataattttattttgaaacaacacgcacaaaatagtacggcgtttcgtaatgatagagtagaaaaaaattacaaaactatagccctagaaggctatagtcaggaaaaaaaagacaaccacaccacacgtcttcaaccagaaaatcgctagtaaagaagcaggaacatgacatcctaaagaaaaacgaacctctaaacgacgccttcaggaagggtatgacaccaaggatgccaccgtcgcccgtcctagggtttaggatgtggttttcacatagaggaatccataggggggcaaagagagatcactcaacaatgcctcaaggggaaaactgtgcccgcaaacgtcgtcgttgctggcccgaagaggctaggctttcactgtaatcttcctgcacccccgtgccaccaccaatcgcacaccttcgacgcgcagccaccgtgccggtgcctcttcgccagctgcccatgaagtaggagcttggcattcggcacgctccaaatccatccacagatatgttggaaagggatatggtgtgagggaagaatggatcccctctcccacacactagcttgccaacgtggtcatcttgtggtggcaaggcgctgccacaagaggactaacgtctggactaggacctgttgtaggcctgcaatgcccacctcatggtgccactgtcattgccgcctcggtcggactgcccgtgtcaccgtaggcagctcgttcgcatcgctaccgccttgtcctattaccttgtgccgccgccgaaactccggccaatgcgccgtacaccgtgccagctgagtctgccattggccgcagccccgcgcctcgctgccctccacgtcgtcgccgcatcggcctcctactgccgccgggcacaccaagcaccacgtcacatcagcctcggtcggccacggcttccttccatcgccgactgtgtcgagtcagcctcccgcaggacgtcccacataatggacacgctgactttctactccgtgtgctgtcatccattaccgaccgtccactgccgcagctgccaccacccctcccatgtgttgccactgccccgctgtcgtagctgccgacgtcagcctcctgcttccgccgatgtcatcgtcctgtagccgtcggcctcctgcgtcggcccctaggcatcatccgtcgcgcgtagccgctcctgagtcacttctcgtcgccaaccacaccagggacgcctcttcccgttgcccgtcgtgctgcgctggctgctcgaccccgacaagatccaagcggggacgccagatctggccatgggggcaccggatcaggtcagggcagtgccggatccaccgccaccatactagagttcggtggcggcttcccaagccctcgccagaaatgaagcatcgtctggttttggccgcaccgccctgttttccaagtgaactctagcagcagctagaagaagaggagggtgggagtggcggcagtgggcggcaagggttttgccctaagccgcccgtgtgtgggtgatgcggagctctgtattctattccaaattaataagttttgtagaatgattaagatagaatgtagaatatatggacgaaatttataaaataaggttggaggatgccagggtggagacatatgggggatattttgtaacacaagtatgcacaaacatttattaacgataaatataatttgtaagtaaaatttttatatatgtgtttctcgacttaaaagctaatgctaaaaataaaacacaatacaaaacatcaaaataaactttaaaaacatgttttaacattttatttagctgtagcggataagttgaagagcaaaaattgggctgtacgagtgataggttagatatgcttcaacaaccgttggatagttcgctagctacgcgtgctcactgacaaagagctaccccaagttagagtgtagtggcaaccactactagaaaaagtattttcacaggcggacaaaagtaatttttgcaagcagagggttggaccgcttgtagcacaacgatggtaaaaaatcaacgattttcgcagtcggggcaacagcccgcctgcaaaaatccataaaatgcacaaaaaaaatcacggcggcggctcgccgacgccgccacgcacctcgccgccgccgccctcctttggccggatctgggaggggaggggaggggagccgcaccccgcgccgtcgtcgtcgctgccgccaccccacgccgtagtcaccgccgccagcctcccccctccctcctccagccggatctaggaggggggaggggagtcgccgccgccccgacccatcgtcgtcgccgccggcagcctcccccctccctcctccggccggatctgggaggggggaggggagccgccgccgccggcctccccctccctcctccggccagatctggagggagaggaaggggagccgccgccgccgccgccccgcgccgtagtcgccgccactgccagacgccgcgccgccccggacgccgcgccgctgccgaacgccgctgccgcgctggccggcctcccccttcctcctccgccagatctgggaggggagccgcgccgccagccggacgccgcgccgccccgcccagtgaggagaggtgaggggaggggagggagggaggggagccgcgccgccagccgtacgctgtgccgccagccggacgccgcgccatcgtgccgccttccaagccaccccgcgccgtagagccgccgtcgctcccccttcggcggccggggagaggaggagaggtgaggggaggggagaggaggaggcgtgaggggaggggaggggagaggccgtgaggtatggggaggggagaggccggccatgggtgaggaggggagggtgaggtgtggagacttagaaaaaatcaacccctacccaagtctatttatatttaagtctattttcgcaggcgccgcttaagtggtccacctgcgaaaatagattttcgtaggcggaccgaccatttcaccccgatttatatttttgtaagcggttatttggttttaagagtcatatccgcctgtgaaaataaagcccctatgtcgggaaaaataatttttctagtagcgaacaactcagatatgggcgaggaattttgattgagtaccatcaaatcatcattgaaaatcagggggtgtgatagcaatatcttactgattactgctagctggggaccatgctagcacggcatgagaccatacggacaaaataatagtcgaaataaaaacgatgttggacagttggaatccatcttccaaacgtacgtcattgctaattctgacggtgcataataagggtcgtcgtcgttgcaatagtgtcgttttcccggtaaaaacgacccatatggatgcgagtaaacaaaagggcgaaacattgcatgtgcggccgtgcacaccgcagctcacgactttcttccactctttcctggttcgtgtttcacgccctcccaaactggatttgctgtggcaaagagacatactagtagtgcccccccccccccccccccaacgttaacgtttctccaacactggggggtgacgtggttccgacttccattgcttctattagcaagtctataatactatagttaaccataacatatatataataggttaaccatggcagaatccaaaaaacttttttttatcaagaagctcccgtgtcgttctcacgtgggcggctcaggggcgaaaccctagccgccccggcgtcgccaccttcctcaccccctctggctgcctagtcaccaccgaaaaccgtgcagccaaccgggaaggcggcagcggggaaaacgagccggcggtggagctcctcagtgtgggaggcggagcggcgcaagtcgggcgggaggcggcggccggagtggtcggcgggacggatttgcccccctccacccacggccaaatcgagagtgggtgattccgacggcggcacaacccggtgaggctgaggcatggggtgacgcaacggttgtggccagtggaggaggaggccaaacgtcggcagggaaggggcaactgcgacaacggtggcgaacgccggcacggcgcgtgcgaggaggcgcggccggcggtggcggagtccggagcggcacgaggagacacggccgctggccggtgacagtgaaggccaacgtggtgcgaggaggcgtgatcggcagcgtcagcggcaggcatggccaaatgccatcacaacgcaacgagggtgatgtcatgcggagactggccggtggtgcgcgcgggtgcaacggtgcccacacgccaacggaggttagatggcggtagagcaatggtgtgtcaagtgtggataggcaggtggcgggcggccggtgaaaacatagctcagctttggccaggccggcaattaatggtggtgtttcgagtgtcactccccgtcttaagggcgttgtcgtgccgtctcatcccctctagtgcggctgcagggtgaaaacccagtctgggttctctttgagaactcaacggacggtggtggcggtgctttcatcgcttctctccctagagacgtcgtctaggcagctcccttgccgaaacctcccaaacaactagtgcaagctagctctatattcatgtcctattgtgtcggtgtcctagcaagagcctagggggagagcggcaccgcggtgcagcagtgtcctctgcgtcagagttggcacattgaagggcctagggggagagcggtttcattcttctctctcaccctctcttcctcaatcccaaagatgtagatagagtggtttttttttaagggttgggttttggacgatcttggttgtggctcctttgttgacctagccacggccggtcacgcttaacagcggtcgatctagtggtagcattctcccgggtttgtgcgttggtgctgttggtgcgtgagtggtgatatactttttttcgtttttcctggtaatttcttcatactctatcgatacgaaccttgtattatttggtgcgagtcgttaaaaaagattaatcataaggttgctctattttttctctcatttctctttatctcatgtaaatttaatgtaagtattttgaagtaattgtataactagctctcacatgagagctaatactcctcttttttttaactttttttcacataagtttatagttagcttacagagttatagcccactattattctagatcctgatgctactttacaagcagtgtttatagttgctatttatttttataaattgtactgggatatagaattgaacgaaactaccatgttttcatagtgtcgttggaatgatacgataatactactagcagttaaaacctttttttaaaaaaaataatcatgttttattgcggggaaaaactaaattaccttagcccaaaactataattgatattcctatcattatcttcaaaaaatcgatattcctatttattactactaaggaactagtactctctaaagtaaaagagatagagtgagagaatcgtaatatgggtcatcttctgttgttaaaggtttactttggatttgccctaaatcaattattttacttttaatcgagtaattcttgcactattacagtttagattagcctaaacaacttgcacggtccaaactaaaatagcaaaatcacccggtctaaaaataaaaaagatcagtttagggtggtcgtccaaagtaaaaattttgacaataaaaatggcttaaagtgcaattcacttaaaaaatataactataattgatattcctatcattatcttcaaaaaatcgatattcctatttattactactaaggaactagtactctctaaagtaaaagagatagagatagagtgagagaatcgtaatatgggtcatcttctgttgttaaaggtttactttggatttgccctaaatcaattattttacttttaatcgagtaattcttgcactattacagtttagattagcctaaacaacttgcacggtccaaactaaaatagcaaactcacccggtctaaaaataaaaaagatcagtttagggtggtcgtccaaagtaaaaattttgacaataaaaatggcttaaagtgcaattcacttaaaaaaatatttaatatttggaacaagattgggtaaagctttcaaaattttgattttatattaaaatatccatacatacgatttttgaaactaaatgctactgatggttaaagtataaagagtttatcgaatcttatgctaagcactcaaaatttacgaccgaaggaagtactccctccatactcgtaaagaaagtcgtttagaacagcgacacgatcttcaaaacctaactttattcatgatttatattcccaagatttgatttaaatattgtccgagtattttccaggatggcaggacccgtcgagagagatgcaaccgaccttgcacaactgcacgtatatggccgcatcgcattacggagcgcagacagtaaaaaaaaggtcaaattagtatgaccactgcgcgtatacgggttacgagcgtatgaccactgtagctacagggacccaccagtctatgctactatagtactacctggcgttgcatgcgtcctttgcggtgttgactttaccggttgcattggtttccgtttaggcaagccgattcgtcatcgacggagcctcagatatgcgtcatcgatacttggagcccgcgcgggccgacgggatttacaatttttcgttgaggatttcgtgagcgacatgtccgagccgcggcatctacagaagtccacagccgtgtgcctaattgccaatggactacggagtactatatatttacgcgactagtagctggggtagcgacggaagtaagagcatcttcaacagtctctccatctcactcttcaagctaaattttagctattatagtctaaaaatatgctccaacagtctttccaattggatggctaagtcatccggctggccaaaacccctcctccactagcctaatttggccagccagaaaatcactggcctcccacccccctcctttggcccggatggcgcaggcggccaagacctcgacgccgccgccgatgcagcgccgtgcaccaccgctagcaccggcttccgtgcgccgcctgcatctccaggatggtgcggcggagctcctcgaccacgagcgctgggccgccgccgccggcgaggagggggccgtggcggggttgttggggagccggcggcggagagcacgacagcgagtgtcttgaacccatgccagagcgccaccatcgttgtcgaggtcgctagccgctgtcaccttcgtctgcaccatcgccagttgtccccgtggttgccgttgccgtcgtctggatctggcggcggccgacctccgttgcctccgtccccaccggcgcgatgtggattcgggcggcgcagcatagattcgggaggaggatccgccgtccccaccggatttgggcggcgcggcgtggattcgcgcggcctccgccgccttgctattcgccgccgccaccatccccatccactacggtaaccgtcgtcgtttccattcgccactgttgaggaagaggaggaggggggagaaaatctagaggaagaggggaagaaagaggaaggagggataatagaggctgacatatgggtttcaatgtcataggctcgaaatagggagtttagatggtgaggctgttggagtgaacaatgagtttgactgaccaaatcaattggctagctggctatatgggtatttggagagtctattttgggtagtctattggagatgctctaagtgagtaaaaaaaatataagcgagttataaaagttgccacatcatatgaaggagagatgagaagagagagaaagaaacgaactaaagattagtagccagttgtagcatggactccaagatatatatgaattagatattaattatgcagtgcatatctacaactaactattgtataagtgtgctattaggttggttacaaatgatgtttcaatttttagagctatggttggctatattattaaacttgctctaaatgaggcgagagacgacagtggggagaaaggaccgaggatatatgtgcaatcgtgcatggcgtgcggtccttgggttgagatgacgaattggttatttccgttccagcggccatggatcaggagattccggagacgaaattagtgacgttatatcaaacgtttcacacaccaaactcttcaaatagaaataatggcatcttaatacattctggagcggatatttctcctacatggtaatccatacaacaaaaggtatttttaaaatctatggcatccacctagcagtacatatcacctctttcatgggcttgaccttagcggacaacaccggcaaggcatggctcaaccaccaccactctatcttcggtcgaggtgataatgagaagtaggagacaccagcggacgataggttatggcttgggatatatatctggagtggacgagccaaagagaagacaaactcctcaagctgtgcaacagagacaaaacctgcggaggtacgacagctgagaccatggagctgagcagcaactcatggtgctcaccatccatggttgcctctacatcttctcgtgacggagcttggagaacgggaaagccttgagcttagcgtctattcgtcaccatctcgaggtccacgtcagtccacccccacctcgagctgcacgtctatgaatctcttccaccctaccaagctcgagaaaacgatggctgtctgagctatggtgttcgccactgtgttgatagctccagcaatggccggcgtagagagaagagattaggagagcagagtttgagcttcgtcgccggctatcgcctcaagtgccctctgtgaggggagcatgagcgttaagaagggaggataggggagggcattgttgagagatatgacatgtgggcctatgagtttttattttattcttttatcattggattgacacatttgatgccacgtgtactagcttaggtgaatctggccaaacaatatttaggcaatgtttttcttacacctttcccaacctctgctccctcattttttgcgcatacgctttccgaatcgctaaacgagtacgttttctgtaaaaagagttatacaaaaagttatttaaaaaaacatattagtttatttttaaaaaaaagctaatacttaattaatcatgtacttaagtcatttcgttttgtgtgcgcgagggattagttccaacttcataagaagaacacaaccttagggatgcagcgagtgtctatttttttaaaaaaattagagaggataattcactgtcgaaaacttgagatggtagctcagactttttattatggcaattaaaaaagaaacagtaccatattgtagtcgccacgtagataaagcggtaccatctgcacatgaaagccctagcaggctagcacctaaccaattcctctctggaattcttctggttgtgccgatggatcggccaccccaccgaccgacgcccgcacacgcacagacgcctcgtccgtccgtctctcgtctcacctcgtcctccccaccgcattcaaaactcggctccacttcaccacttcaccagtggcagggcacgtaaatacctcggaaccacggtgtcgttatccccgcgtcgcgctccgccatttaaaccccgcgtcccccacctgtcccttttcctccgcgtccatttccatcacgctccactcgcctcgctgcagcaacctccttcgctcgagagagagagagagagagagagagagaggcacagatttttgggttcgtttttgaagtcctcgatccagccggcggaggggcgccggcggggagcggaggccgccgccgctcgatccggtgagccacattcggttcctgagctctctctctttctcagtgtcgtggtttccgcccgggggggggggggggtgcttgcttcggctcgaagcgtgaggggtcgggcgagcgggcgctgtcgcctctggatcttgcccctgtcgcttcggtgcacgcgaatcgtggggggctgggcctggacctgaatctcttggtgtgctgtggattttttttttatttcgattttgatagttcggatttggggtttggatccgggagttgccgtggttctgatttctgaacttccgatcagctcgaaacgggacggtccagtcaatgaggagagtgcttgggttttgacaagccgaggtgaaagatctgaagtgattggcactaaaattctgtttagactaccgtttggttttctgtttctctgatctgtgcgcggaccgcaaaaattggtggatgcataagttccgagtagctgctgagcattgtggattttggttatgctctgcccatgatgtttgataatcgaatctgagtcaagaattttgggggcattattatctgtgttttttggcattagccttttcttctttgggactccgttttgtttttgagggtgagtgacgttcgtaccgttgtttgcagggttttgaagtggacgaggaactgcttttatggtgggaagttgtagtctaggaagtgattgatatttgagcaattagtccgttgtcagggttgtaacttgtaagcaacatggagggggcggttgctagcaatgtggagcttgattctgcagtcttccaagtatcctcagcccagaacaggtgattcttgctaagatattttttggctatagctgtttaatgttcctatctgtttctccaagaattgggctcaacaaatttacatacgatgcattttattcctctcctctataatggactttccgttttcctttctgcgttaggtttgaaatgggaattttgtacatgatgtgctgatgattgctcaagtcttttgtgattcacaatttcctttaatgaaaatatgaacctcaccctgcagctctctcaaatatttttttctacagatacgaggcaattgcttgcagtaaagggaatacagaattgattgcatctggtccttttgatcaattagtcctgcacttggaagatgctaggaagttccaatcgtgttcaacagctggcacttttaagctgtcgttgtctgggaatgcaaaaggatcttcctggttcacaaaatccaccatagcacggtatctgcaatcaacatttttctagtttttatgtttctccttgcagagaccatgacataattggatcccccttacaggttcctgaataccataaattcaccagatgcctcaaaatctgcaaatggaattttacatgaaatctcacaactggaggaaactagaaagtttcatcaatctctctattctaaggtatcacaactcttcccgtaaaatacccatagtttttagtcacgacgacctgaacatttcaacgtagatgccattataatgagcatttatcttttgtaggaacaacgaaatcctatgggtggtgctttatccggtacattgaaagaaatatttggtcatccattgctctgctctgtcttacttgaatgtccttacaacctttaaatgcacatgtgcacctagactcaacatactacaatctatgctagattgcatttaccattttagtaccagtttggcttgatcgttcagacttttactagcaatggtagtattcctagttgagattatcttttgctgacccttagagtagattaattgttctctagttgagattatcaatgattattttgcttgtagttaacagcaatagttgtcagcaaaaaaatctgagaataatccatccttctataagattctgttaatttgttgtcggtacatttgcaatctaaagtaaccatgtatgcctcaaggtcctcaacaagtactcaaaagtgttaatttattgtagtatgttgataaagcataccttcctttaggaagtctcttaacaagggcagaggattttctgttagaagctatttgtttgagtaggggaattttagttgaattctctaattattgtatcaagcttcaatggcccttaaaattttatgctcactttattgcaatatttaatcatctttgcaggaggtgtctttggtaccattggcgtagaacaacaggtgaactgcttttcatttctgcaagatctgaaccagctttatggttttgtattattttaagtcttacatttcattcttaaaatacctttcagggaaatgttggcccaaactcatctgaagcaacaaagtaaacctttttcttctttttttttttgctactttatcttgcccttcttttagctgacgatctatatgattactatgctaggaatgaattgcttcgagctctggatttgaggttgactgtactgaaagaggagatctttgcgttgttgaatagagcagtcgtttccaatatgtcaactagagatgtatctgatttatcctcatttgttcagcacttcggtgcatcagagttcaggtatggtccatgagcattgtgcatgcagggttcaaggccactgttttttctactaaaaataagtgtaaatgccaaaaagtgttacttagtaggtcaaataactatcctatattcatcgataagtccacttatttataattctgtcattatttggaagaaaactgacctacctgatcacttggaaataacgtgcttttttaagactgtatgttacatcctcatcactgaaattatgtattgtttcttttaattcatgtatcaagaattaactgctgtttttcttgtttgttagctggttgatgcggtgcctactgttgatcccagactgccaaccctctgaggtctcccaacagcagtctttccctgccgagaaagatgacaagggagaaaatgcacttcatactcgtaatatcagctctcataccattatccagaggcctattaccaacaatgtttccccagcaaagcttgctcaaattgagcgtgaaagctcaactgaaagtgatgattcttctgagtccagtgctgaagatgaggctgtcgttgaaagaagccggccactcatgaggtctgcttcacctaggagatctgcttctccaatgcgaagggttcaaattggtagatcaggatctcgtaggtcaacagcgattgccatcaagagtctcagctatttcccccctagtcaaagaattcctttggataaagatgatgaaagtggcagttgcaatggtgaaactgaccagccttcaaggaaatctgacaataatgtaagaaggatgagtgtgcaggatgcaataaatctcttcgaaagcaagcagaaggatcagaatccggattcgcaaaataagaaagctggcttgtttgctacaaagtcagtactaagaaggtggagtgcaggaatgggtgattccttgaacaataattcagaagaaaaaaccatagattccacatcccaaagtaaatccaacaatacaggatccgattcagagaaggatggagctgaaacacaggctgagccaggttcagcttcagcttctaacactgttgttacgccttctgttgaaggttttcacactaatatgcaaggtgttgcaatgccagaaacagagacagcggtttcatcccatactgaaatttctgctgagcagacaaagtcagggcaagaggaaaacagtgatcgggcaatggcctctgctgagtggaaccgccagaaggaagctgagcttaatcagatgttaatgaaaatgatgcaagtcatgcctggaaagttttcgagtgctaatgtcaccactactggcatcacttccacaaatgagaagaaaggtggactgcaaggtcagcataaagagaagcgagactcgaaagttcgaaccgataaaggtggaaggcggccagcaaaggaggcaagcactaggcccttgaaggaaacagttgggcagaagaagcagcaattacccccaaaactggcactgcagctgagaaacgcaattctccagttccacaaagggcacggagaaattcatcacctccggtcctaccaaaagaattgaccccaaaagcgcctgccagaaagagctcacccaaaccatcacctgcacctgtgacccgcagttcatggtcaggtggatctttgactaaagcaactactgcacagaaaactaaaagctctcctgggacagtttcagcaccgacagcaactagtcggagaaggactccagtagcaccctcatcttctcaaccaacttcaaaggtggaaagaagtgctcaaccggtgaagaacaaaaaggaaacagttgctgcttcaaagccagcaattaagggaattgaagaaaagaagactaaaacagcaacaaagacaagcaggctagctaaaagtacacctatttcagatgaaaaatcaagtgcagcaactaggccaaacttgtataacaaggttgcaaagaagagcagtgttgtaccgctagaatcaaaaccatcaaagaaagctactgggattagtcaaagtgctggtactgatgctgtgaagagtaagatgccacaacttgatgactcttccaatgacattggaaatattacccaagctgaagataaggagcactctgctgtgacaacccagccaaaaactactaaggtattggaggctgatcttgctcaaccagcacatgatgttgatgaaaatttagaaatttcgctcgataatgacttaaatattgaaaaaacagaaaattcggccccaagtttagctacaacagaaatggactccagtgaacaggttgaacctcacactgaggttcaaccacctcctgaagaggacatgggcatctcatcagctgcctgggtagaggtagagcatgaagaagttactgatgtgggtgaaaatgtagtgcctgaggatgtcacctcaccatcaattgagcccttgccatcttcaagccctagaatccgtcactcattgtcacaaatgctgcaagcagatagcaatgagccggaaattattgagtggggaaatgctgaaaacccacctgcaatagtttttcataaagattctccaaagggattaaagaggcttctaaagtttgcgcgtaaaaataaaggacacagcaacagtaatggttgggcgagcccatctgttgtttctgaaggagaagatgaacttgaagaaccacgaggtggtaatgaaggtgtaaattcgagcaggagaacatttgatggccccaagactaacagcatcttatcaggtacattttctaccatgagagggcattttttctgcagccagtatagctataggagaaatctgaatatagagtacaagctttagtttttgagctgctctgatttcaccatttaacagcgcatgatgacagtaggtagaaatgcatttccaattcccacatgtttatacacacttaagtgaagtaactgaggtcacaacattattgtttcacaagagtaccaagcaccttttttaaaagaacttgtctgcagcgaagatttatgggatgcttctgaaatggaagagcagattatctttcatgcttgctcacattgtgtttatatttatttcctttctatttcaactatgcttattcttccccagctcaatcaaccaccggcagcttcaactcaacgaattcagacaggttacgggataggcctggagctgccccatcaactaaatgttagttcttgcaaacatagtatcgtcatcacttgcattatgattataataaactgcagccatctctaatacatctttgctaccttgtacttccagcgtcaaggtcgttcttctccctatcaaacttccggagcagcagatcaaacgagtcgaagctcagatagcatgccatgttctccaggagatacatggataattggatagtcgatcccttccagtttggaggtcaactgatgtaaaaaaaaagagatggtttgagattgattgattgttcggacggagccagcttgttgtgtttggttctgggttttctgcaatttgatatagtctctgcgtctaatgtcatactcaacctctcacctttcttgtacatcttttcactttttaacagttgctggaactgcaagcttatttggatccggtcgatgttagggaaactggtgctaatgtaaagtgcatagcgtgagcctgaggtgctcacagccgattgcgatgcccgaacttgatctgacgtcgtgtaactgttcaatgagcctgtgtgcaaatgcaatgttgcaacgacaccagcttttagggggaaaatatagcgtggaaatctgaaaaccactttgggataacaaaaactagacgtataagatttgttctttgcataagatcacatggatagaatagtcgtttactagctatttgtaggacatcatcgcctcaccagctgttaaacataaacatagggtgtgtttagatccaggataaaaagttgtggcttgtcatatcggatgtatgtatatttaaagtattaaacataaactaataacaaaacgcatttaaaatattaaacatagactaataataaaacacatttaaagtattaaacataaactaataactaaacaaattacagatttcaactgtgagatgaatttattaagcttaattaattcatcattagtaaatgttttattgtagcactacattgttagatcatagagcaattaggcttaaaaaaatcgtctcgtaatttacacgtaacctgtgtaattagtttttttttcctatatttaatactctatgcatgtatccaacattcaatgtgacaagttgaaaaattttaccggggcccatagaccatcatcaaagactttgcccagtactaaagtgcaagtcctgagaggaacagattgtcaaaaaatacagcatagtagcagcgtttatttaccacacgcatagcatttatttgctgccaggaatcatcctgctacgcaacgcaaccaccagcaaaactggaaagcgaattcattggtttgtctgcagcccttccagaaacggagaagctgtgcatctttctccaagtctcaaaacacgtgggaactacagagagaaacaatctcgtcgtggcgaagaggagcagatatcagtatatcaccagtcactactattcactagtactccgtagtcaaattagtcatcatttgtcgacaacttcgatcagcgtaggctcatagtgatctggggcctcgaagccatgaagattcatgactgttgccgcaacgttggcaaggccggcactggggagatctgaccgaaatcttacccctggttgaagcccagggcctccaatggcgatgggaacctgcagatggtttcagaaagtgaggtcctaaacagcaactgcatcctaatattgttaacacggtgtattgcaaagcaaagcagatctggaagtgagcctactggattcaaagtgtgtgaggtgaggggctggacatttccatccttgtcgcgaagcggtttgccagatttatctcttttcaccatgtcctccgcattgccatggtctgcggtgaccacgaaaatgccacctacttgttctatcgcatcgagaacaatctgaataagagaattccggtccaccatgagtattttcaaacagtgaaaatcatgcatacaagactgaatggtgaattggtggcctatcaattgttaaaagactgaaaagagagagagcactgcagacatgatcaccttaacagcttcatcagctgccttgcacccaacgatagtagcttcaatgtcgcctgtgtgaccaaccatatctccatttgcgatgtttacccttacctaacaaatgaccaaaataacattaggcctattaagtggattagctgctagtaacaattatcacgccctatctatctgaagtctacccgatgcatggcctatgagctctttgttcgttcttctgaaggaatttatttgttaaatacctgatcaaatttgcgactcaggatggcatcccttgtcttcttcgcaatttccacggccttcatttttggctgttcattgaaggggataccaatgtcacttggaatttcttcgtatttttccaggtttgggtggaagtagccagaccggtttccattccagaaaaaagtgacgtgaccaaatttgactgtctcactgaaaattagaatgacaagatatgaagctgcatgctcaagtaccaacactcagagcaaacactttcgacaagataatgaacagtattgtacctgcaagcatatgtgcgtatgccattgcgcgctaagtattcgccagacgttctctctatctctgggggagcaacaagaaaatggctcggaagttttagctcaccgtcgtactgaagcataccggcatagcgaatcttggggaacctgacacgatcaaatttgtcaaaactctcgtattctagtgcctttgcaagcatgaccatccggtctgctctgaaattaaatgtcacaacagcatccccatccattatagggccaatcggtcttcctctttcgtcaactataacaaatggcggtaaatactggtcattggcctttggatcctccctgagcttcttcacagcttcaagggcgttttgaaacttatgtggcgcttcaccgagaacctgtgcatcccaaccacgcttcacaacttgccagtcattctgcagaaccagtgaaaatttcaatcatatttttggcgcagagaaaattgtgccatgacattacaaaaggcaagtattgagcagctagcttcggacaacctcttatgttaagaaatgcagctagcatatgcaacataagtggtaagatataatgagttcccggagtagtaactgaactctgaattcaaatgcttgacacatactccctccgttatcatattataagttgttttgacttttttaaagtcaaatctcttgaaatttgaccaagcttatagaaaaatatagtaatatttatagcactaaattagttattttagatccaacatttttttgtgtaaactattagatccaacattgaatatattttgatagtttctttattttatgttaaaaatattgttatatttctctataaatttggttaaagttaaagaagtttgatttataaaatagtcaaaacgatttataatatgaaacggagaaaatacctcataacggtccatcgtgacatacatcctgccaccaccagatgcaattcttgcatccacacccttatcccgtaatttagcaaggtcattctcaatcaattccacaaacttgacactgctaccgtccaacacatcacggccatctgtaagtatatgaacccgtatccttttcgctccatgctcactggctccttttagaagcagctgcaagagcccaccaaaagaacattaacaagagaaactgagatagttgtactactactcaactacaactgatcgacggatgaagtttgaaatttaattatatcaacctgcagctgatcaatccttgaatgtactcctccatcgctgagcaagccaatgaggtgcaaagtaccgttctcgaaggactgttggatgtacttaaaaccttccccctcgtatatctttccagaggctagcgccatatctaccagttttgcactgcgcattgtcagcaactgatcagtaacttggcatttgagatgtgcatgcaacactcatccatgctaccgtagtttttggaacaatcaggttaaggtgattaaagctggtcatactcacgcatgatagtactcctctgttctaaaatataagactccttgtgattcggaaattcaacattgaaaattttgacattagattcatatttcaaatatttccatctgatattaatttcatagttattgataacaaattatgaaagaaatcaatggtcaaaatatacatatttttacataaacggtcaaagtataatattggagaccctgtaaaagtctaatacatcttatattttaaaacagagagacttgtccaggaagaagagtagtgagataaaattattcataataaaagagttaagattcagcattcaacagctaggtccctgtgcaactgggctgcattactacatactgtcactggagggtgtgaatgtgcacctagagaattagagacattaaccatcttaaatgaacaagccttacttcagaagatatttacagcaggttgaaaagtaaattacgttctacttcatccgtctttcatttttcatctatcgcacatatatcaataaaaaaacaaaaataaactataatactcttactttatcaaatctcaatgcaattattttctacttcatctactcctaatatatttatcccctaattttataaactccgtgatcgctaaataatgaacttattattttagtacaaacggaaagcacgaaaaatgaaattattataggatagagggagtatctagttagcctgaacaacccaacatgcatttttctggtgtatatactactccctccgttccaaatataaggtattttttatggatgcatggaacatatcctaatactatgaatctgaacggactctactatctagattcataatattagaatatgttctatttatctaaaatcgcttatattttagcatcgagggagtaatatgcagagtaacagaattgcaggtacatgcagaaaaccagaaatcaagcagagattgctgctatgctactatactagtacagtaaagggcccctttgaatcgcaggattgaaaaaaaacgtaggaataggaaaaacgtaggattttgatagaaatgtaagtggaaaacagaggattgcaaaacgcaggaaaaacacaggaatgaccgtttgattgaaccgcaggaaaaacgcaggaattggatgagagagatagactcaaaggaaagttaccaaaagattgaagctcttgctaaattttctccaaaatctctataagattgtccattccataggaatttcaaaggattggatatgattcaatcctttgtttcaaagggcttcataggaaattctatatttcctatagaattaaaatcctctaaaatttttatatgtttttcctccaattcaaaggggccctaaaactagtattacccctgggcatatatctggcctgctccaagcgcgttgtggccaacctcactgttgcccatgtcgtcgtccgtaggcagccccaccgccgtcccgtgagccttgatcaccctccacctctccggaccaccctgcacgcgccagaaaacacacacacaagtctcgctctcagctgatcatcatgggaagcatcaaacaaacgtcttgttagcgttgttactaccttcttgagggcgtcgagggttggggtgtcggcgacgtggatgcagttgaaggtatccggcgccgcctcgccccagccgtccagcaccaccacgcccaccaccttccccttctccagcctccggtgagccgccagctcccaccgcctcgtctccgccatcgagaagaaaaaaaaaacgttgttcgtctgcctcgacgttgttcctcttctctggtggcgtcccgccgcgagccaagctgaagttaggaagaggaggatgtctggcttctttttatgctgcaactggaagtgtccgggcgcgacgaggcagctggagagatgtccaagtgttaagaggcacttctcgttgtttagttctttcttgtgagcttacgtgacagtgtgacgcggacacatgtcgtgtgaccccgataatcatccatgtatacgttcgtgaacctgcctctataaattttcatcttaagaaagaaagaatcccgccgattggaggcctataatccgtcctatcgggctgagttttcacaacacgaggccgcgtcatgtgcgagagaggcccaaagggcataaagaacccgggccgacgaacccgctgatctgccgacacaaagtgagtcgttcgccgagatggcccacccgtttccatcaagagagccgggccgacacaccgcgccggtcgtagtcgtataggttgtttagttggcatactcacattatcaaaacttgctatactttatttagctaacatgtctaacatgtggccaacaaaattaaagccacactttagccatagtagagtaaacttgccacacttttatgtgccaatgatatgtgggacccacatcacggtgaaggaatcttatcaaaagtgtggcaccaaacaaacgaatgtctaactaagttaaactttggctaatttgagttgtggcatgatgaggcaaattttggtagtgcggggctgcgggcgcacacggagctctcggcgagccgcgcggggagcgccgccaccgaccgctcgggttgccggattcccagccgacaccgacacggctgatctgatcaatcaatctgtggctcgcggatctctcatgaaaccgagggtggcgttccaaaaacaggtggaatcacgacggtgccgtctctccatcctgtttgccaagttccgtgccagccatctgcgttttctgccatgccaccctgacgccacactgcagaactccacatgcaaactgtgtattgggggggggggggggggggtggtctgcgacttgtgtgcatatcgagtgtagtcccggtgtgtgccgctttccgtagttcccacggtatatcgagtgtagtctgcaggcgcactcgccactatagaatatcatcggcatttcgttttctgctctttgcacgttctttacccttccctcgctaacatcaaaagttggacgagccgctttgcgtgctgggcttccaaaagcaacgctcaaactgaacgtgatataaaaaccaactcttcctcctctgacaaagttacgatcataccggtggtctttaaactacatgacgggctgaactaccgtagaactgacaaaggccgtgtttagttccacagctatttttttaaaagtatatgaacacacatttaaaatattaaacgtaaactaataataaaataaattacagattcttataaattgcgagatgaatttattaagcctaattaatccgtcattagcaaatggttactgtagcaccacattatcaaatcataatgtaattaggctcaaaagatacatctcgtaatttacatgtgaactgtgtaattatttttttcatttatatttaatgctctatataggtgtctaaatatttaatgtgacagatttttttaaagtttaaaggagactaaacacaatcaaaagtgacgagagcatgggggtgttccttttttttttataccctccctgtctcgtctcgttggatgttgctggataagccggcctgtagtaacagtcgtgtatctagggaaggatggcttctctcgtcgtctctttccgttcattttccagagcctgacactgccgattctcgcttagaataaacgacctggcacctggcacagtgccatgagttattttcctacaaccggcccaatccaatgaatccatggtctcggtttactcaggcctctagtatgatattagtatctgccatcccatttacgtgtcagcaccgggcaaattagccgatagattaacaagacaactagtagcatgtatcatgagtaagcacgcgctgcggagttgttaatagcagcgcatctcggacttaacagcttaattacggtgagttcacatgcggagcacacgtacaccaagaatggccatcccaggcggccgtttgctgatgataatgtctccccgtcgtatgctgctaataaagtgatcacctaccaccgtacacttcctgacacatgggggagttagttcgtcctttctttgagaggagcagatgaaggagtagctgtttattggccttgttagggggtgtttgggagcccctctcacaaaacaataagtcttattgtgagagcctctctctcccaaacattcccttatttccataactttgattttcaagtctcatgttaaataattatattgcctacttttggtgacatcgttgagtagattgtgcacatgattgtcactattttttcaacaatatatttttaggactatagaaactatacaatgctatggatgcatgttgcaaaacaaatctaacgatatgaattttaacattcaaacttcaaagagagtgatatccctatcagaaaatagagtgatatctcgcaaaaaaaggggagaaaaacagagcaatataggcatgtttactttgatgtcatttttaaccttaccgaattttggtaaagttactaaataagtggctacatttagtttgctgttaaattgtcgaaatttggtaagttttttttggcatcaaaagtgaacagaccctaagtttaccatttagtactattggttaatgtagtgttttcgtcgagccggaaatcccgaagcggttgtggttgccggcctgccgctgctgtccgggccttcggcgtcgtcgaaacggcggggcgcacgtcggttttcgccgtggtgaacgggggaatggggtggggatacgcacgcgggtttgcttggtcccgttcacgcggcgcggtatgggtgtagccgtgtagggggtcagcggtttcgcgtcttttgtatcgtcccctcctcgtcgcgccgagccgaaatcatcagagacaacggctacggtgggatgctgccgcggatcggaggagaaaggcagaaaagctgtggtacgaagggcgcaggtttccgcagaccgcaggcgaaatgaccggtagcatttggagtccactcctaccgaggcgacatggctggctcgtgacatgtttgctccgttggcatggtgtatattccggtttttcattgcttgggatgtttttctttggatgggtggcttatgtttatggcaagtactgtacgcagtactatgaacagtaaactgttttaattaagggccagcttggagctaataaatccataaaatgattaggaaacacggtgccaaaatggggaagaaaacaaatatggttttcaactattaatacatggtgcacagcaatataatcttatactccctccgtttcaaaatgtttaacatcgttgactttttagcacatgtttaaccgttcgtcttattaaaaaaatttgtgaaatatgtaaaactatatgtgtacatgaaagtatgtttaacaatgaatcaaatgatatgaaaagaataattaattacttaaattttttgaataagacgaataagacgaatggtcaaacacgtactaaaaagtcaatggtgtcaaacattttgaaacggagggagtataacctaatgatataaggaaagagatcgactttttaaagacatgtgactttgagtcactaacatatggattcaatttgctatagatttacaaaaatattaattactcaaaattacgtgatgaaatggtggaggatcggtcttaatgctggaaaccattcaagttccatggaattccttagaaatataggaattcctaaccccgcataagtatttctatgccgcattttttcctttgtttaaatgataaattaaataaaaaattgtggccatgtgcaagcactaaatggatacaaacaatctgttcaggttctaaacctttcttgcacaatccgacttccgtcgggaccggcggtagctaatgaagaaagcgacgcaaaacgaaacagaaagcctactccaatcgttgctccgtttcttgtctttctttggatataatctccggtgttaggtccacacacaacaaataaaaaagagcaatgaagccttcaatttgaaggatgtgtgcccaataaggtttgtcctactatatcaatatatatcatccatgcaccattcctattgattcttaacacacgattgggcgcgaaaatgggaatgccaatattatttaaaagcaccgacaaacctaaacttgaaaaaggcctatgaaaaaaacagagatggggaaataacgcaagagggttctttccttgacaagtatgtgggctatatattgtaagtgtactttagaaccttctattcacttcgcatcgatgcatgttgcttggcccttgtttagtttctaattttttcttcaaacttttaactttttcatcacattaaaattttcctacacacataaacttttaaattttttctttaaacttctaattctagtcaaacttttaattttgatatggaactaaacacacccttagtaagggaaaggcatggaattgtctgcagtagttagatctaggggagaggggctaaagtttaggtagagaggcctctctccaaacacccccctagctgaagcatttaaaggtgctactaaatcagtactcctgcatgttctagggctgtttggttggtggcctcagtttgccacaccagatcttaggcgtgccacaatttttcaggctagtgtttggttgcgtgccgcagttgagtcaagccacactttactagcacattggcccacgcgtcatactctcatttgctagccaaagtttgccatagttgtggccaacaaattgttggccacactttgtgtggcttaccacacttatagcaaatcgagctatggtaaagttagcctctattcaaatagccccctagacttgtagtgagtctagccagaatttgttttctctcttcaacagaaaagagagtaaagttagaaaatgaacaggaaagcgggagatccatcatcatcatcatcattcatcacctttccatattttcctgaccactctttcagttttcaggcattcgtgtagccaggaaaaagtagccataaggtcaagattagtgtaatacggagtagtagtattactactagcagggagtaaatattatttcggtagaaaaatgcacatgcgcgtcattgtcattaaatttaaatgagttggtgatactatctactggtagtaatcggaagcggttgatcttttgtggatatgccgttgtgtggtgtgtttgttgtcactttgcacgccctacatttagaatgggaccaaacaaggtttttatcgaggggatcaaataagttagaccaatttaaaaactactccgtaacatgcatcatctggtgatatatcacatttaaagtcaaatatcatcacatttttttaaatataatttgtattttatatttttatttgatcaattcgttttgctttagttattttttctacgtaatgtttttttcttagagataattctgcttgctactttttataattttgcgagtaaatatataattctaaaattatatcattatgaaagcatcccaacaaaatctagacagcttcagatatagtgatcaaactttacaaaggttgacaaaaacatattatagagaatcaagtaaacaaaatgtgtttattaataataagtgttaattggatccatgccatgataaatttatcaatttggtaaaataacattactattcgtgaaacatactaggtgtcactcaatttttctaaaattcaaattgtgccatcaccaccaagttttatatcactttctccccaaccacattccatctggatctgagactaagtaggaatgagcttggcaactaaatggggtgctgattgaagctaacgatgaccttccccagccaagtaaaagttcaacaaatttctgttgctgaaagagaatcaaagttttcctacaaagagttgccatttgttcttctgtcgtaggtggggttgatcacatccactgtgggcttcagctcgctgctcgtcaggtgatggcggtggctgagactgcgcgagaactatgcaaggcggtggctacccttgatgccgacctcatacgccactaggactcgctctctctgtttgcgtgccgtccttgccgtgtcgtacctcttcgtcatcgacctttcttgctctgggggcttaggcgctgctggccttgttgcgcttgtcttacaccgaaatgtgttgggtaagaagacaacaaacttgatggctgtggcacgattcaaattttagaaaatttaagtggcatttagcaggtatcacaaagagtgatggtattttttaaaaaaggaattgataaatttgtaatgacacagatacaataaatcctaataaaaaataattatttgacatatattgagttgtgttaatcttcgattatgaatagtaccgaaatttcattctttatgaccaatgatgatttggttatcgtttcttttattattttgctggcagtaaagatatctatatgtattagcacaatagtatgatcataaaccatgaatcatacctagacattattttaggtacatggaaaatagaaaaataaacaagtatatatatagcatttcctagagaggttactatgctcacaaacgcaaaattaatagagacatcgagcacgagcatactccaggttgttgggggaaaacctccaaaagttcaaaaccacatgcatccacatcgttcgccgcagaagatcccttgtccccgccgctgatctcataatatgcgaaccagttggccggagttaaactaaacagcaaagcaaatcgaaataaatcaaatctccaaagtgaaaaacatacatatctccagagagagagagagagggagggggggggggggggggggttattctctttggcgtatatcacatcgcaccgcaacacacttgttttatgccaaagcaaaaatcctctcccatcttccatctctctttccctaggacgcgcagcgctgtttattcctctccgctccccttgcttctcgcgcacactaaccaatccgagcatctcgcctcgccccgccccgccccgatcgatcgactcgagcgccaccccacgccgccgcccccgcgccattggccccagccgccgggaggcattcgtctgcgctgccccgcggcggtggcggtgacggtggaggtggaggcggtgtggcatgatcgatagaggagtcgggagaggcggcggaggaggagggggaggaagaggcggtggagatcgctaggagtggtggtggtggtgggaggaggaggcgatgaaggcgacgcccccgccggcgaagaggcggaggggcccgcggctggcggtgctggcgctcgtcttctgctcgctgctcgtgccgatcgccttcctcttcaaccgcttccctgccggtgagttctccgcggccgacacgttcgcccccacccctcgcgacgcgacgcggctcgagcccccccggattcgggggaatgcgggtgccgccgcggcctcccccccgatcggatcggcgccgttcccggcggatctgttccgggggctcgctggttccttccttgtcgtttagtgtgcgggatattgggttgttttggtggtattcctgttctcttattggggattgtgttttttgggggtcagttttctgattggtttggatgtttctgatgcagtgtatgtgacggatgagcgcccccaacaggtaacttgttgtttctagaaatgtgcatattgaactagtttttgatagtcttgtgtggatgttttcttacgaaaatgctgtttgtttgggacaatatgtgtcactcattgctattttggtgatttgtgtttggtacaggagattgatttgccttcattcggacgcatggggttggaaaggagcggtggagtaaccgtagtgaagccggaagatggcagtggtgctaacgcagagacaaaggttagtgattttctgtgatctttttgttacgtagtgatagtgattaatccgtacggcattgtgccttgtgctagcttggtggattttgacatagtcatgcaatgtaaaactctgacatgatcatgttgacgaaggttagtagcttggcctttgtattgcattttcacctctatggagaaggacaaaacatgaataaccattaaactaataacattagcattttatttttcataggctggacatgtcgttgtatccctcattcctcctaacgtggtttagattcttggttggttactgggttttaataaaaactacctggtttaggtgcatttgcattcaaatgtatttttgttcttttaaaatttgtatggcatggtagataaaacaactggccataacacaactgagtttacgactggagagcatatcaagacagaccatgtcaaattgaacttatccagtgaaacgggttttttgtcagcttttggagaatttggcgaactagtcataatgccgtagactgcactgcttctatactatttctcttggactgagtatgacaactgagatatggcatgctaacacgatttgagccacaaaatccaactgctacgaactacccccgacatagccaatgagcaaagcaatattgcatatcaatagtacctccctctattctagtctctttgttcatgattatgaactgcgaaggatctggaagatctatgcctgcagaaatatagaattagtaattaatttgcttcttttgttcttaataaatactgcattccataacagctccatatgtattgtaaaatcccttattcctcacacccttttctcttcctttttcaggatacacctgagatgattcacaggggcggtataaactcacatcaccatagtgataatgtcccttccaaagttagtgctaacccaaaaggtattggttataagattagaaatattataaattagactcagttgtatatatgtcaaaactattaaaaaaatacaggaagtgccatttgggcaatttaatgtacaactttgaagaaaagaagcatagattgtttttcaattttgtaggaaaatgtttatttggataatattaaaaaacaatgcagttatacatcattttggggctattgaggatgaagaccagttactattcaatatcccaacacctgcagtttactagttttaatatttacattcatgtatagtgtggcaagatggtgacttctattcataaatggtgttttgtgtgctcaagctgtgtatgagtagtccatctattctattctattttttttgttcccttagtaaactcatattttatttgactgtcttattgactcaataattggcacctgtctgcagtcccccctccaccaaaaattgaaccactgaagccaaaggcaaagtcagtaccagttccagttcaacgtacagaagtatggctcttggctagttgcagttacatctatgaccttaggctaggttgtaatttggttgtcgtttttaatgagaaatgtgctgatacattttgtttgaataaacatttactggtttcaggttattagtggcaataacatgaaacctgccaaagttcaaaatgcggacgatgtggaaaaggctaaggcttgtcagcttgaatttgggagttactgcctctggtccatagagcacaaagaagttatgaaagacaccattgtgaaaagactaaaagatcagctatttgtagctcgctcgtactacccaagcattgccaaactaaaaggaaaggaggcactgactcgtgggttgaagcaaaatattcaagaacatgagagggttctcagtgagtccattgttgatgctgatctaccatcgttgtaagtacctagcatgcatattgtgattgcccccttcaatgctttcagggtccatcttttgagttaaaactgtgaaaactaaaacatcctcttttgtgtgggggtggtaactagatcatctatgtactgcatagattcttctgcaagcaaaagaattgaaaatccatgtcttttatatcttaatccagcactcatgtgtcaaaattttcttttaacatttctatgttttctgagttgtaaatgttgaacttgcaccttggtagcttgacagaaatttcagtctggttctcttagtaattaacacttaaattgtgctttcagtatcaaaagcaagatagagaagatggaccaaacaataggaagagctaaagcatgcactgttgattgtagcaacgtcgacagaaagcttcgccaaatacttcatatgacagaggatgaagctcattttcatatgaagcagagtgcatatctgtacaatcttggtgttcacacgatgcccaaaagtcatcattgccttaacatgaggttgacggtagaatattttaagtccgctccattggattcagatgactctgctgtgcataagtttaatgttccagaccataggcactatgtcatattatctaaaaatgtacttgcagcttctgttgtcatcaactcaactgttagtaattctgaggtatgcaaccaaattttaacacattcaagttggtagaatctgctctacacttgccatttctgattttctttttgtgattttgcaggagaccgaaaatgtagtatttcatatattaactgacgctcaaaatttctatgccatgaagcactggtttggaaggaactcctacagggagtcagctgttcatgtcataaactatgagcatattattttggagaatttgcccgagttcagctcccagcaattatatttacccgaagaatttcgtgttttcatcagtaatcttgaacgacctagtgagaaaaccagaatggaatatttatcagtgttcagtcactcacatttcttcatcccagaaatattaaaagatttaaagaaggtgattgtgttggatgatgatgtggttgttcaacgtgatctctctttcttgtggaatattgatatgggagataaggtcaatggtgctgtcaagttttgtggtctgagaatgggacaactaagaaaccttctgggtaaagcaacatatgatccgcagtcgtgtgcttggatgtctggggtgaatgtgattgatttggagaaatggagggagcataatgtcacagagaattaccttcaactactgaaaaaggtcagtcctctgtttaaaattcaaaaacataatagtgtgcttagtaattctgttccatggggccacaaatttgctaattatatgggatcatgacttgctatggtcgttgaaatgaactgctcaaacttttctctgagaatgtattgttagcttatttagtaatcttattttgttacagttccaacacaatgatgatgaagcttcagtgcgagctgcagctttgccaataagcttgcttgcctttgaacatcttatatatcctctcgatgaaagattgactatatctgggcttggatatgactatgccatcaaagaggaacttgtccggaattctgtatcattgcattataacggtaatatgaagccttggcttgagttaggtataccggactacaggaagtactggaagaggtttcttacacgagatgaacgattcatggatgagtgcaatgtaagtccataatgcacttaaacctgggaaacaaaatatctgacggtagattgctacgtctgctgctgtattatatacctagaggggacgagcacttccattgaggaaaaatggggccaggaaagcagttattagccatcaattttgacagagtagatccagcaccatctgttcattgaattagtgagcttgatggatggtttttctacagttagagaaattagtcttaagctgaaggataatgcagtagacaatgatgatgagtgttagtgaggcttcaggtaaagggagcatcactctcaccttctagagtacgggacagaacgatcgatcggtggtgggctgtggcacctttattcaaattggtaccttgcgcctcatcgatgcaggttaattcttttctttgttgaatttttttgacccccttgttttgtcctgtcaataagggcatacacaggctaaattcaaattctttgttcttagttgcacattgattgttcatcatttttgtgtcggtggaaagtatattttgttgtcagaaaaccatcagttacacaacgagattgacagctgtttggatatcttttgagtgctcaagtccaattctcattctccagtaaattttccaatcttgtattcctttgtattgcattgaaatgggtgtgttatcttgcaaccatcaccgtttcaagttcagctctagaagagagtcatccataaaatcttatctcatcctaatttcaacaaccaatctaattttcggctcaccgaactcgtttgatctacaatatcataaatgtagccgaataaatacgcctgattcagcctctgtagtctgcactgcagttaccactattgtcaaaagcaataccagtgctaccgcggaatcaggcatattcgacagcccactcggactcggccactgcctccgcccacgctggacttacatgccaaaacttttcaccccgaaactaaacagggccttatgttcacgacatgccgcgagttcacggtcattttttttccttttctttgttttcttgagatgacaggaggtccggagctcacaatcttcactggttacttgaggggataagtgcaactactataagcttctacacacttgcctctaaatgtcatgtaagctcatatgatgagctggatgagagatatgaaagaagagagaatgagccatctctcatgtaagaggtaatctctatacaaactataagagagatgataacaaagagaccaatgaattgataggaaacagataaaataaaattaatactccatccgtttcagaatataaacatttttagagttagacattattattaagaaaatagatacaattaaatagggaagggttgtgattggatgagaagtgaaggtatgtaggaacattgaatggtggggagttgtgattggttgaaaagagaatgttggtgtagaagttgttatatttgggacaaattctagagactagaaattgttatattttaggacggagggagtatgatgtggggcaagtgtgctagaggtaatttgttgtatctatattgcctcttaattaatgagttgatgatgtgtactaaattaagggtgactatcacctccactataaaacttgccctaaagaacaccaggatcagggtgcctcgaacactaggagggaatgctatcactatgcagcagcgcgggactccgcggtagcggatggccatggaaccagcaataatcgttgtcaactgtcaggttctttttcacctacttcgagcaccaccgctgcatcttctcatgatgccactgttaccgttctagaccagtggtttagcccctctgctaccaacgttgtttacgccgttcaattcttgttcgcgcgtattggcaacattagtgcacgcatttgttttgagttgttcctagggttggtaaagccggtatgatgtctaatccttcacggtttgacaatttcggttattcgacgtcatcttccacgactgtctcgattaagttaccgttttcgtcttcagtgcgtccctatgaaccttagtccagggtgtcgttccatgtgcccacaaccactcgttggcaccccttgtgccctgtgacttggctaaattgtccatggtaccccgatttcgattacatcatctaaaggctactctaatcacgaccctttttgaaattagctctgtcgcagtccacatttcagctacaccgctatcattgttaagtcatcctactgatgtcttctctagcctaaacgttcgcgatgctttcgcttgaattgtgaagggaaattttaagtatatagtagttgaaagaaacgctaggaagagaattcatttgtggattccattactgctatatatacccgcccctgatcaatatccatcatgctcatgcaacgtacgcaccaccccctccggccctccccatccgagggcatcctcatcaatggccgtgctgactgctgtgactcgaaccactggccgtggacacatcaacgagcgccatggcgggtgggtgccattgcacgctcgttggggccgtgccgacagccgacacatgcacggagatctcacgccttgttggaagcagctgaatcatacagccggctaggctattgcagttttagtttggattcctcgaggagaaatcaccataagactatttgacttgaaagcttcaaacaggtttagttcaaccttaccaccattggttcatgtacttccaaaaaaaaaaaaaaaccattggttcacattcaagagataccagtaactcgggacatttcagtacctagctcaatatcttctgagctgcaaggaggaagagggagttccgtagccttttacaactgactccctgaaataaaaattgtacccaggaagatggctagatctcaaattctccttatttcatagtaccggagataaatttgagttattgctactgaattataatacaagcggacaccaaacagttccccttctctattaggcttttttatgttccttttaaatagttcagctcaatagacttggatcagcactagaatttcagccaatatagatggaaccatttttcttttaccaagtacatgggcagaacagctataatctgaatgcactctacattcagatgagttaactgtcaagattcatgcactctacgacgcttctcttgggggagctccgatccatcagttgcaattactggggaatcaggggactcggttgctgcagttttcaggttggcacctacattggtagaatttttagggtggttgtctcctattctgtttgggtccaaggcagcctcactgtccttgtctacagaattgcttggctcagatggagttgctgtatctccagacgatggatcctgcacactctgtgtgctggatttacattgcttttcaaacatcttctgcagatatttcccttgttcttcaattcgaagctgcaatttcctctgaatctgcaatagagcaatcaaatgtgcttcaggtcatgggaatttaatttgaagtatatgagcatgtcctacccctatattattaagaccagtgcaattgtagcatgccacattcctgcagtcacaattttgttcattgccacaaactagtgtcgaaaggaacatttctgagtctcatatttgtatccccaaaagggtagcaattgttgcatgcctcttttagtttattaaggtgccatttgcccatttggcatgagcctatttcaaccaaatttagagtcagtgcacatgcttttgaattagtacctcgagttgttcatgaaggcgcttctgaacttccatctgaaggcgcagtgcttcagtaagatccatgctcctacataagcaaaacaacataatgcaagggtatctagtactggtgactgggaagaacatggtgcacttactgatccaacagaaaaatgaacatgaaataccaccattccctcaataatgcataatggtaactcctaaacataatttgaagtaaaatggatatatcttctattgtgctatatgagcaaactgtagatttgaaccatactagtaggcgaatccctactcttattttgaaaccatgctagcaagtgaatcacaaatatatatgtgcgaccaactttttctcaaggcaattatttactttagtcggtaatgcaatctgccatccagtcatgcctacgctcttgatctgaactttgatgcatgttgatttgtaaaccacacagtaccctacttattagttagcgccatgtgaagtgtaccaaaagtacaatgaaacaggagaagagacgatggaataataatatccactcacgctttcaggtccaaagacaactcatcggtagttttcccttcttgtgttttacctgcatgatgagttaagaaaaggtcagagttgtcttaacaactcacataaactagaatatggttgcatgcgtgctattttgcaacaagggatcttacactaagtatttaatatttcatcatgaaaatatgcttttacaaataaattcacagcccttgccattatcatgaaaattgtacttaagttattgccatgaagttctaaaaaaaaagttattgccatgaaaaatgagttcccgtatgtaagaatatgtataaataaaatgcaagtcagagaggaacccaattgatataaaccttctgataggtctggcttgtagcgagctgtgcggtacttctgcagtaaaaataagtgcagataaagaaagtcaaaactgaagtctcctttcagcaaatatgacatttagaaagattaaaaaaagaacctgcagatgactcttaacatgatagattgtcaaaccatcaactttcataagcttgagcacaccttttggagtagcttctgaaggttttttttttttaaaaaaaaaaaactattagactatgccagaataggattcgtatatataagagaaaaccacttgagtggtatttacgacacggaggacatactttcactaccaccaagcttatttacagcatggacaaaagattcatgcaattccggggtccatctcatccgttgtttacttgcagaggcattgctgttgttgggaggaggacttgtgacaggacaaatatcgccactatgggatgaagttgactgattgaaagcaggctgtgatgcagcagaattggaaggttgggccatggactgtaacaaaagagatccataaatatttagcattctgaccagggtagaaacataaggagcgctatctatagcatcagggacaaaaaaaatgcgttaaaggtaagatgcagtatacattgcttagaatttccaggagcagcctatgtcaagaacatgaacaattcgttacaggatttttaacacattgaatcaaatatttaatctaccaacagccacaatctcttcaagccaaggaacaagtaatcattgctcttgtacaggtaatcactttaacaaatgacatctcacacaagtttcgagcattcaataaatgaatagataaactaacaaaatgcccttgtgtaataagggaaaaaaataccgccatggttacagaagtatgttgctggaaaggcaaaatttctctaaaattaatcacgatcatataaattagtaaccgggttagagtgtaggcagatggtaccactattaccagtaggatgatgtcaaaatactctcaatagattatagtgttagaaactttcgtcaacatgttaaaataaataggtgtatttctaaacttccagaacacaagaaagggatacaactttactctttatggtattgcagttacatacctttgactgagaatcagtagctgttgcatctagaatatctttccagtcatcattcattatatctgcccaccattcattttgtttagcagcatcagatgtaacagtagaggagccgctctgggtgtgattatcagggacagttatagtatccatgtaatctggcgcgccacaggcaggagctgggaaaaaggttggcacagtgtgtcccccatgggtattattattacataaatactggagcatttcagcattcgacgactgagaaataaagggagcagccataaaatgcccctcatggctagacacagaatcaattgggttagcagcatatcctaacattgctgaatatgatgatctgacaacactggctcttgggtgcgaaatagaagattgagttgcactctggtgcaaaggcatagaatcatttggcagttgccctggcatcagaatattctgggtattatgggatcttgggatatctttcaaagatttcggtagaataggcaaggaggatgacatctctccagaaatacttgttttgcaactgcctcagatcaaacttccctcactgcaattctgcaaatagtgcataagatttgcttctttcccataaaatagtttgaatgcctttctacagatcaaactcgcccaaaatgttagtccatcactctgtacatgattaagaaatgaagagttaaaggggtgagcttattttgaggtcatggaaataatagtataattgtaaggaacatatatagactgtaaataatatttcacacatttaagcatgctggaactaatcatgaataagcagcagtgttgctagtgtcaagcagatgacacaagcagaaaacaaaaacggctaagccatgaaatgtacatctaggtgtaaaccttttgtacactgatgcacaacaacaaattttacacccccaatattttgaccactccaatggtagattacattgcataaacctcatttattagcattacaaaccggatactttcggaaaagttaaaatgtaatacctgcgatgcaggttcgacttctagctacattgcaaaaatgccgcaaattccagttccaaggtattattcagttaacatttttcttgaagctataaagtgatatttttcctgcatagcaaacccacatgcagaactctgtggaacagggcgccataatgatggcctgaatagtggtggcacaactggccccaaccatcttttcctactatcaagcaaataactctttacctaagacttttttgccacacacacacatgaaatgtgtacttctctatcacgcctgcaccgattaactcacagtacggcaaccaatggttaagcactagaatatcctgtttctagggcggaagcaaaccatcacagcactacaccactccacagtactacctaataattctgccgtgaagctcccccggttcgtaccctcacagaatcaaccccccataattccctgtaccaacaccatcatgtccgctcacgagcatgcggtacagcagctcccccccaccaaactcccacgccctacatgtcgcgatcaaaaccctaaaccaaaaaccccctacccccagcttctccccggcgggcacgcgctcgtccgctcctgttccataggctccaaccggggccgatcgatggagacggcgtggactgagactagattggatgggaggagaggaggcgtacctggggctgcggcggcgcgatcggcgcggcggggagcggcttggcttttcggaggcgacgagggaagtggggaggaggggggggggggaatctgattggggcgatcgcttttttttttcccctcggtgtcgcgacgatgaggtgagggtgaggagggagagagagagaggatgcgggaatggaggagagattgatcgagatttcgtttcgttgaggggaggggagggatggggagggggggagagagaacctggtgcgcggcccggtgaggcgcacgcgcgccgcggactccaccatgggaggcttttcttgttcggccgtgtgtgcggccaacttggacggctgggatggtggtccatggggactggggaggggagagagtggcaacgtgtgcgccagaactttgaagaaagaaaagcggaataatgatgcaaattgcgaccaacggattaaaaacatggctgaagaaacttaaacaccccctacttattattaggttaagaacactttaacaactacccaatataaatatattttagagtaaattatattgttagtacacaaacttgttaggtgggtgtaatttagtatataaacttgtaaaatactcgttccagtacacgaacttatctagctagttcgtgcgaacgaggaccaaaataacttggcaatattaattttacgaagttgatattgattaggatgtgacgtgcatacgtgtagtgagtatgcataagacatgtaatatttataaatttagtctctatttcatccttcatcattgaaatgatgaatttcatatgtttttaacccttatatcagtgctcgttttttaatatttttctactatcactaaatcctattctatattttattgaatatgatgtctaatggtaactttctctcatgtatgtgtttacatagtatcctaatcagcccctaaatcaataagattagtcatatagtgtcctttttaacttccaccgcacgcaccatacaagtttgtgcactaaaacaagcattttataagtttgtccactagattgcacccacctgataagttcgtgtaccgacaatgcaaagagtaaattgcatcggcggtacacgaacttgttaggtgggtgcaatctagtacatgaacttgtaaaatgcggtacacgaacttatcttgcgcgtgcgaactaaggtcaaaaggatattacatgactaattttgttgatttaggtgctgatcaggatactacgtaaacatatagataagaaggttgctacttagacatacacctgttcaataaaaagatagaatgagatatagtgattatagagaaagagataaaataccgagcaatgatacattggttagaaacatacggaatttaagataaagtagagaacatatttataaatatagcatgttttatgcatactcactatacgtatgcacgccacatcttaatcaacattagctaggtaaaattaaccttgccaagccattttggacctagttcgcacggattagataagttcatgtaccgaaacaaacattttacaagttcatgtactaaattgcacacatctaacaagtttgtgtaccaccaatgcaatttactccattttatacatattgaatgggtcaccaactactcctagctatcagtacaagtagaatggtttgctaatttctagagagatggatgtgcaaggtgccactgttggaaaacagagtaagatatatgaatgctcaattaccaatcctataagtgaactacaatctattatactataatcttgcgtaattcgagacatagttttaggttcttgcaaatatgctatatgttgcagattagcctttactttccaccggctttttttgacatcttttggggaaatgtatcaagcgaaagtatccaattgttgtagtcatcaaagaggtactctttcctctttgatgcattgataatgtacatttgcttttcccaattcgtcattttaacattgtacaccaataggtaggaagaaggatctatgatccaaaattttgaaagctaatggtacgaacgacagtcactataccattgtaacatcgtgtgtgttctctttaataaaattgattcatttttaatggaaaggatgaatgtgtttgcacatggaggatacaaatgatagtaattgctgcgtgatttaccacatgatcaggagaaaccataattcaggtcatgttgaccagggaaatcaattcccgttcggaaatgaaaatttaataaaatcagggtgaatttgttcaaaggtttgaacatgattccgaatttagggtaaattactatctgaatgaaatttgaccctaagcctctcctgatcagccatggtgttggacggttatgtgtccatcggagtggtgggagtgacgaggaggctggagatgcctggaatgatggaacgaacccttaaagcctagtatttttctgattctgacatcttttttgttgggaaattttgataaaagcactatgactttgtggttttagctgtagggcaccgcactagtgacttttggagggaaaacacccccaaaagttagatgtttactgatgaacaccgcacgtattaaagtaataattttcagttaaaaatgagagagaaatcgtgtgaaatgtcagaaatgcccttgggcacacatgtcagctctcctatctctctctatcccctccttcacttctttctctatcccacatgtcagcgatgtcggcgcgcaggtgaggtccggcggcagcggtgacgggagggcgatggctccggccgctgacaacgcccctccctcctcactccgcgtgggcgacggctccggccaatggcgcgcccggacagcgatgccgatcgccgacggtgcccctccctcttcactctgcgcgctgcagccgtcgtcgtcgtccagccgcgccgcctctcctccacacgttgttgccaccgccgaacctcgcctgctgtctggccaacaccacttgccggcgccggcgctcctccgcacgccgctggtcgcgtccgctctgccctcaccctcgccctcgcctgtccaccgttgttgctaacatgtgggatagagagagaagagattagagggagaagtgtaggagaggatagagagagaagagagataggagagtgggcccaaggacatttctaacatttcacacgatttctcctccttttcaactggaaattattactttaatgcgtgcggtgtctatcaacaaatattcaacttttgatagtgttttcctccaaaagtcacttcgtgcgatgttctatagttaaaaccgcgaaatcacggtgtgctgtagcaaaatttgctcttttttttttctgatgacctactctcatgtcatctctctctgtgaaaaaactagaattgattgcccttttgatctttcgccactttggtagcatccaatatccattgatacagctaatctaatacaagtaagtagtaacagccagcagggaccagaggagaatatgttctttcgtggtgcttctaacaatatattagaaaaatcaccatacaaaatcactcttaaagagtgtaaatgtaccaatcacataacataaaatttcttcgcatctctacatattcgataatccacttgctgaagaggaagaaaaagatcgaccaaaacagaatcccaatccggttatcttctacttcggttcgatcttggattggaaggaataccctccgctgtagtcgaacgagtcggtgctcatgtccttgtccttcttcgggagaggatcgttgtaaggatggcgtggggcacccttggtgacgtcgaactccgtcgcggacgtcgacgccgacgtggaggcgctgctcagcccctcgctctgcagcatcatctcgatctccttgacgacgtcgctcatcgacggccgcgcgccggccacctcctcgacgcaccggagcgccagctggacgaacttgctgaatgcggccaggtggttggtgttcatgatcctggcgtctatcatgtccttgatcccgcagaactcggcgtcgccggcgtcgaacgcccgcttcacctcccggacgatgtacttccctttctcgatcggctgcttggcgatgatcagctcgagcatcaccaccccgaagctgtacacgtcgctcttctcggtcagctgctgggacatgtagtactcgggatccaggtagccctgcaagtatggaagaaggagaacaacaaatcagacgagccgacggcgaagggtgcagcatatcggtcggcgtggtgcgcgcgtttaccagtgttcctttgacttgggtgctgacgtggcccctctcggtgtcggacactagcttggagaggccgaagtcggcgaccttggccgtgaggtgctcgtccatgaggatgttgctggacttgacgtccctgtggatgatgggcgggtcggcgagctcgtggaggtaggccagcccacgcgccgcgccgagcgctacccgcagccgcttcttccagtcaaggtgcagcccgctcttccctgcaaagaaaaaaatccaacaagttcagggcgcgtgccgtgcaagaacgcgcggcgcgtcaggaacgcacggacaaatgtggtttgtggttttaccggagaggctgtcgcggagggtgccggcggacatgaactcgtagacgagcatctgctcgccctgctcgaagcagaatccgacgaggccgacgaggttcttgtggtggacgcgggagagcagctcgatctccgtcttgaactcgtgcccgccctgcatcgacccctgctgcgccctcttgatggcgatgaacgtccccgtcggcagcatccccctgtacaccttgccgtaccctccgtacccgagctcgttcgcctccgcgaagttgttggtgctccgcttcagctcctcgtacgagaaccacctcgcccccttcagccgcggcgccccgcccctctcctcgctccgtttccacgacgcgaacggcccgcccagctcctccctcgccttctgcgcgcgccgccgctgcacgagcgcgtacaccgccgcgcccacgagcgccaccaccagcacgccgcatccggccgcgatcccgatgatggcacccttgctcctcgacgacgaccgctcctctgcacaccaacaggtcagtttgaatggtaacgagctgaacaatgtctgaatcaaattgatccatgggagtcatggactgacctgggaaggggtagggcgaggcgatgaagtagtaagggccaaactccttgggcggcttgaaggtctggttgctgaggtcgaagccgatgcgcatgacctcggagcggttgaagtaggcggagccggaggggaaaagcttgacctggacctgcatgtaggcgtcggcgttgaagaaggggtcctggaggaagacggagcccggggtgaggtccagcttggtccacagccggctctccagctcctggaacgccgtgccgttggtcacgtccccgaagaacggcgccctgaagtacatcaccccctggtacgggtacgcgcacgcgcagctctgcgggctcatgctctcccccaccgcgttgcacgtccccgagaagcacttgacaaggctcgtcgagtacggcgccgccgcggcgcgctgcgtcacgttgcagtactgcgtgttcggcagccggtcgcacaccgggttcccggccagcctgatcgatgtacagggagttaggcaaggagaggcagcagcgaaggccacggcatcattcggagatggttggttcaatggactcacgaaagggtgccgttgtagctggcggtgaccgtgacggaggagagctggttgtccttgaggctgacgatgctcagctcgctgctgatgtacttgcccatgtcgagggtgccgttgaacgcgttgccgtcgaggatcctgcagcgaatggtgagcgtcacaagttgttgaggccattttgtcaggcggattactgcacagtgaggctggtttgttcagtgagcttacacttgctgcaactgtgggccgctgaacagcctcatcggcaccgtgccgtaaagcctcccggattgtatgatccttgatgaacagcatcacagagatgatcaggtcaggttttttggttatgccacatgtgagagcatgttctgaagctggaggcactggagaaggagaacacttacagagctgagagctgtggcagcctccaaaaccattgtgggctaggagaagggtcgaacgtgttgttgctcagatccctgtggtaaaattggaggagatttcaagtcaaacatgattgatggtatgtttaagttagaagaagaaattttgtggaggagtgccagtatcttacacataattgagttgggtcatctgagatagatcaggcaatgggccggtaagctggttgttggctaaattgctgaaatatgacaatagcttgtttagtgtgaatattccatctcacatatacaggtgcactggaactgtcaatggtatctatgcaattcttgaacaacttacagctcatttactttagtgaggttattcagattctctggaactggccctgagagcgaattcctatcaagccggctgttcaaacaacaaacagagcagatgaatgttttatgtaatccgacataacaaaaactgtttacgtagtttcatgtgaagcttttgtttgtggatggacacttacacaacttcaagtgtagtaacaagcccaagagagtctgggatattaccagtgaatttgtttccatcaaaaagcctgcatcaaaactcctaacgtgttagttcacctttttagctgaattgccaactgaatcaaagaagcaggaggtcaggaacttacaaatggatcagtgtcatctcaggactgaagagggcatctgggattggaccggacaattggttcttgttgaagtggctgcagagagaaccagaaacatatggtcagtgctacatttcatttagtatggcctcttgaggaataggaatgaacaaacttcttaggacctacaagtgtttggttttgaaaagcttgtctaaacccattccaccatttgtcgagattggtaagggacctgacaattgattgtcggcgatgtcgaaccaatagaggttggaaagattgcccatagaagctggtatttttccagagaactgatttgagttcaatgccctgaaagacagattatgtcagtcttcttctccagacactaagttgcagaagtctcccaattgtatgtctactaattcaccagtgagtaattctcacatgtaagacaattttggcagactccctagctcatccgggatgttgccatggaaactgcaaccggccagaatcctacaaaataggcagcacatgagcatactaacttcttagatggcagaaacctgaaagagaaatactttcagaacttacaaggtggtaagctgcttcaagtttccgatgtttggagtgagcacgccgccaagatccttattaaatgacatgtccctgcatacatgcagttctctcatgattcaccgttgcaggtcggaacaacatgaggtttcagaaaaaaagatcaatcttgaacagtgtgctctgctgctacatacagggattgaagctcggtcagttgccctatgtcagcagctagaactcccttgatgcccatggtagaaattttactgaaacagtcgggtagcagtgggtaaacgtaaaccttgtagttggaaacatgcagagttatagaacagagcagtagagcacttacatggagatcactctgttgttgctgcataccactccatcccatggcgaatcgctgcatgggtcgtcagactgcccccacgttggcggcgcgttctgccactgatccatcaacgcgcggagaacagatgctacaaccaaatccacggttcatttcattcttcaagatatcacacaataagatcataaatacagagcagcacgagcttcataaacaaggttatcccactccttcaagattggacaatcatggagacacgcctctggtgttcccttccaatcatcgaagaatatacagaacatttgttctttccctcctcaaaatcaataaatccaatcgttcaagactgagaaaacaaaacgatcttaacactagctgattaaatggttgggtcatatggtactcactgtcctggctatccgtcacggcatggcttgctcggacgcacaccgagagcagcagcacgacgccgagaaccacccgtctcatcctcgcacagcctccgggcaccggtgccgccatgcatgcagacgacacgatgagctgcgtgcgagctgctgctgctaccagaggtgcggttttaggtcgccccggccactcaggaaaaggctatagctgtagctatagctcgggagagagagacagagacaaagaacgcgcaaggcaactaccagcaccacaaccgcatcagcatgatgcgcctcatgatgggatgtgcattcaagaagccaacatgacatgataagcttggaggttagagatacacacagtggaacagagtgtggtgtgtgtgtgagagagaaagacgacgacgacgacttggcttgaaagcaatgcaagctcctggcccggccgcctgggtggtgtcgtggtgagctcgcgcgcgcggtgtccgcggaagccaccgcgcgaggggtcaaaaaaaggaggaagaagacgctcgcgcgggcgccctcgtctcatcaacatatccctcgttccacggcaagtcctcactcagattccctgtaccgtggcagcgacgtacgtagacgtggtgctagtgctagccagattgagatcatctgacgtaaagttagaggacgtggttactgatacatgatcctatcggatccatatattagtgatcatgtcacggagaaattcacgtcggagaagctgcttccatgctaattttggtggtggactggtggttcccggtgtctaaagaaaaaaaagagaggaagaaatggtttgttccatagagggttcttaaaggtgatgatggggagcttagtgatgatgaggggtgtgatctaaggtacgtcgacgggtggacaatttggtggggattaaacaaaattatgtccatgatcaagtgctgggactttggcatgcactgggagaaaaaagtgtggacagattgacagaaggaatgttgttaggatgttttgtaggcttagggtgagtttgggagggggattgggaagatacgcaaaacgaggtgagccattagtacatgattaattgagtattaactattttaaattttaaaaattgattaatatgattttttaaagcaacttttctatagaaaatttttgtaaaaaatacatcgtttagtagtttgggaagcgtgcgcgtttaatacgatgtccttttctcacccaatcctccagaactcatcacaacgaacgcatccttagtttcagggagaagtgaagaaccgattgttgcaggcaatacatgttcgatgatgctgatttgatgcaagaaaactactatcccttccatttcataacatagtaattcgtaattttttttaagtcaaatatttctaggtttgataaaatttatagaaaaatatagtaacattttcaacacacgctacatttaataaaactaatttagtgtggtagattttgctagattttctataaacttagtcaaaactagaaaagtttgactagaaaaaaaatcccaaaagtgagttatgatataaaacagaactacgatatagagatacacagagacgtcagtgtcagcatggtgtcacggcctaactaggaacaataagcaagactttgtcaaatggacttcactgatgttggtccgtgtgacaacagtgaaatgagtgagactgtgagagtgatgcctgctgcaagggaaaaggacagccagttatacataaaaacagagctttgatctgatatgcttttttttcccatcagaatatatactcagttggaaacgagacgattaacgatggcttgctacatggttttgaaaacatatgcttttttttttttgaacattgaaaacatatgctctctcttgttttttaccctcggtgctgtgaaaattcagaagtgaagctcttctttttaccggctggttcatgcgttttagttcatgatggtggttgatgatgatggctggctggtcctgaatcacgttagcgggataattgtttcgaagcagattaatttcatatcatgattgggctacttttacagcaattttacattgtaaaattataatttatgaaaaatacatcaagcaacatggtttcaagtcttctggaatatgctccacgcagttgccaacctgcggtgagagctgccaagtagaaccccatcacgaggtctttacacggcaaactcgtgcctttggctgcgatgataccggtgttgaagacaacattaaagatctactagtagaattagctagaaaaaaaactaaacgaaattaggtcacaatcacgagtgtgactgtcctgtctaggaactttttgcccaaaggtgggaggaaacgcatcgaacaagttatgcaacaggttccatgaaagaaacctcgacatcaagaagtgcacatagatgttaccttgccatattttacagaacgacaaatgattcataaatgtctctccaaataagatcgagtaatatatatgactcgtgggaacttttgtcataggttgatgaatttcaagtagtggatagaaaatgttgtaaggaacaaagtactgacaaatgattaatcaatatagtgacttaatcaaatctatattgcacgtatattagtatacaccgaataagtggtatggtttctcaaatcccatgggaagagaaaacccaagaaaacttcaaaaaaagttgtttgcatgtacacataagccacagaaaattaatagacaaatgacggtctttatttaatgaaattggcaacgaacttgtaccggttcttcaaaaagaaagaaagaaattacctcagagaaattttttttccaaaatatctatagagttgctattccatatacattttaaaggaaaatgtaggattcgacaattaaacttgaagagtgaccaattaatcgagatagtggctgattaatccttcgagactacctaatgctcttcacatacactacacgtgaatcttgatggctttacctcaaaccgaaccctttttttgtacaacttcactaataaaagggtagataaatgaaaagagattaatatggaaataaacacaaagatatgatgcataatcccacacattcccacccttggcaggcccttaattagagaaaacattaaggtagttgtagtggagttattagttagtaataatccactgcatctatgtactccctccggtttcattttaattgatgctttggacaatgacacgctttataagatataactttgaccttatttttctattataatatatacaataaataaatgcatgtttacttttattatagtgttttgaaagacaaatttatatatgtttttctagtttctttaaactaaatatttttaaagttattgatggttaaggtaataaaagtttaccctcaaccttgttcaaaacgtcaattaatatagaaccagagggagtagcttggtgcgctcaataaatagcaactagcacctaccataatctcaagtggagcataaagctccatgtatcatgccacaggggaatggactgggctagtgctacttcacaccacgggatcctacatattttcctttttttttccgcagtgaataaaaacaccattgctatctttacaaaagtttgccttttgtttatgtctgtgatgggttttttgactacgaggtgctgtattgatgtgaacaagctctcatggaatgaattcattgcacctatgttcgggtctacattttcgtttcagttcgcagaacgaaagagagttgaattcaatattgatgctcatgttcttcatctcattgaagtcgaatttaatgtgggatggatatgtaggaaaaatcttacagtcaacacaaagaaagtatagaccgatatacatgtaaaggctaaataatgtggaaattaggatttttttttcctgattaagatatagattctacatcagtttttgttaacacgattttcaagcaactaaacagtatgttttgtgtaaaaacttcctacacagaagttaatctaaaatatcaaataaatatatttttaaaatttgtaataattaaaactgaattattactccatcctttccattttaagcgcagccataagtttatgtgtccaatattaatcattcgttttatttgaattttatttttgaaaaaaaataaaaaatataagtcacgcataaagtacaattcatgttttatcatctaataacaatagaaatactaatcataaaaaaatttcaaatataacggactatcaagattggacacgaaaactcataactgcgcttataattggacagagatagtagtacatattaacatgattttcaagctactaaatggtactttttatgtgaaaactttctacatttgatctaaaatataaaataaatctattttttaattttttataatgatctattttattattaaaacagctttgaaaagagtcatcacgttcgctgtgggggctagaaatttccatattaatcggataaaaaggaaaaaaagaaaagaagagtccaagtagaaatacaatttaaaaatagctgaaattcgaaattaaaaataagcaatattgaaagaagtttccatataaaaacccaatatgagattaatcaaaattcaaaataaaaataaaataaaatccaaaattagaaaagagaaggataatccaagtaggaatacaatttaaaaatagctgaaattagaaattaaaaataaagaatattaaaagaagagtccatataagaatccaatacgagattaattaaaattcggaataaaaataaaataaaatccaaaattagaaaaataaaataaaataaaagaagagagctcaagtaggaatacaatttaaaattagctaaaattcggaattaaaaataagcaatattgaaagaagagtccatataagaacccaatacgagattaattagaattcagaataaaaaataaaataatatctaaaattagaaaaattaaaagagagttcaaataggaatacaattttgaaacaattgtaattgaaaatgaaaaattgaagtattaacagaacacaatacgataataattgaaattcgaaaaaaataaaatttgaaattagaaaaagaaaaataatatttcaattagaaatgcaatttataaatgactaaaatttgtgataaaaataatgactattgaaagaaaagacgatctaaaacacatgacgagataaattaagtaacatgcctcggttgatatgataaataaaaactgttagtaaaacaccaaatagaatcctaatgacgattaaaaggagggacgacagtcatgccgtgaaggaaacaagcaaggcggttgccgggacttctagaaagtaaaaaaaataaaccccattgataatcatattcaatttttaaaatctcaatgacaataaaaaatagaagcagcgggtgggggtgtataggagtatagttgcggagccaccgaaggttgacggaacttctagaaaataaaaaatgaatcccaaaaacagttatgtttgatttttagaatcacaatgataataaagagtaggtggcggacgggccgtagaatagcatagtagcatcgtttgaaggtacttctaaaaattataaaaaataaaacccaacaagacaataaactctaaaaactacaaggtccaatttttaaaggttcggaactttaaaaaataaaaaaaaacaatgataatcatgttcgattttaaaatctcaatgacaataaagaagggaggcagcgggcgagccgtagaggagtacaatagcaaaaccgctgacggtttggccggtcttctagaaaataaaaatgaatccaaacgataattatgttcgatttttaaaattttaatgacaataaagagaagagacagtggatgggccatagaggagtataacggcaacgtttgacgggacatctagaaattataaaaagaaacccaatgtgacaataaactctaaaaactataaaatccaatttttaaaggttccaagaagaatgaatagaaatattggtagatcgagcaagcaaataaagaagtagatgacataaggggtagcaactggtgtgacttttaaaaactatataattagaaacacgaggatgataaggtttgatctttcaaaatcttaagacaatgagatagctatttaataaattttaagtaaaatcatacttaaaaaatatatgattttgtttgggtactagccgcgtaattgcgcgggccatccagctagttaaaacttaattaatcatgtgctaatgattttctcgttttgcatcccttaatcccatcttcctcatcggctgcgaacaccaaatgctttctgttaaaaaaaacacgaaacttatgttcttcaaaaacaggctagttcaatgagccatggtaccaaatatccctaagttaaaagaaaatccctaggatattttttaaacaactagcaacggtcagtaactgacgtatcataaaatttgtgttaaccgtatatctcgactactataaatacatataaaagaacagtttcgtttgtccatcctccttacacattgtttgttcgaggaaaagaaaagaagaacgaatgagcaatgggcaatggtcgtctattgcctagcacagtgaagttgtactaagaagagggtggcacttgccatatccatgttagcatgataaggatgggcttgggtatgttgaagtttggtggagtccctgggctgcctaagaaaaatacccactcgcaccaagtcttctttttgggcatggaataaattctttatctcatcaactcatgctactattgaatcccatccctcaaccgtaaaatcaggtataacccgtcccctaactttcaaaaccatagcaaatcgactccccatatggttccagaggtggtttcgtcctacacaccacttatgtggcaggttcacttggtgtttatctcacgtgacgttgacatgatgcttacgtagcactaaaataaaaacaaacctaaatgggatccacatgtcagtgagtaaaagaataaaaataaatttcgggcccacgtgtcgccaccctttctcctccctctttaccatttctctcgcaggtgatggcagagaccggtggtggatggcggcaacagcgagatggagcacgacggagggcgaggactatggcgtttggctgccgggccgctgagttcgacggctaggtcagcaagagcagtctgctcgccctcgctagtagatgagctctccgttgcaggcggtgcgcgagcgcggcagcgttgatctcggcgaaggggacgagctgtaggggcacacgacaaccatggcgcgcacaaccccagcggtgacggaggcaagggagaatccgggcgaggtttgcggtaggtggagcacacctggtcagggaggacgcggcggtggtggggctttagggcggcggggctcttggtgggagtgaggggacgaggcccatatgcgtctccctgtggaagttgatggccttttccaggctccggcactgctcctgtatggctacaaggtcatcgccgctggcgtccgtctacacctccattgctgttgtgcggcgaggaggtcacaagggcggtcgaggaaggagatgaggttggtacggggcgctagagcaaggcaacgaggcccatctgcatctcccgatggaaaccaatggcctcctccaagcctggcgctgctccctcatggcggcgacgttcgcctgcgcctccattgctgttgcggcggagagatcgggggacgtcaggggcggggcgcggagaggggcggcggcgttgctcccatgcgctgaaatccacctgagatgtcgtgagactgactgggagagatgagagagaggagaataactgacatctagggcccatttaggtttgttttttattttagtgcgatgtaagtgtcacgtcgatgtcacatggatgaagaccaagtcaaccgtgccacataggacgaaaccgtctggggagtcaatttgctacagttttggaaattgggggacgggttgtacccggttttacagttgagggatgcgattcaaccaaggggcatgagttgagggacgcgaaatagacttatccccttgcaatagccatccattttttccagcccaattcattcagcatcctctcgtgcataggccttctcttttttgttagggaaccgtccagtttcatccttatcgacacgacctaacgcttggtcaaccaacacgaaaatattggacgacaagccgacggcccacacggaatcctatctcgtggacggacattaatcctagcaggcagccttggtccgaggccggacacgtgaagccaaccatgacaaaccctcacgcgctcctgttaactccggtggacccttgccacgccaccagtccaaagcatttcgccgctggggaccccccgtcgcgacgcgccgtttcctggctggcacacgctcaccatttcggcgcaatatccagctgcatgcacgcatttcccccgggcgccccggcacacagccacacgccgcctacgagcagcacgagatcgatgcgtatgcgttttcctgcgggcatgcacaccgcggacacggcgaaaccggctcatcgatccgttgatgcgttcacgtcgagacagctggatcatcggcgtccggtccgtcgtcgcgtgtcgtgtggcaatgaaggtggccatgctttgtacgtagcgtggcccccgttgcacttgcacccaaggaccaagctggaaatttttccggaaaccgtggcttcagaatttgtagaaattgtgtctctccatttcagtcttgtacacggagttgcttgtagaaggtcggtcgggttacacgcagagagataataggtaatgtattgaacatactttcgtgccagtaagagttaaggacggtacgtagagagtagtgaactgttatgtttgagctacaaaaggaaatctagagcttttgctccagcaaaaaggagcccatacatacatgatcgtcaagagatgacttgtcttggttagcttgagcctgaaggttaattgcttcactgttcagcataccagttgcatgctaccagctagtgcccacaaagtagaatctagaaagcgctaagctttcggactctcaacaactaacaaagtcgcatcggcttacacccgtaccttgccttgtaagagaatccttatattgctaatcctcctgctccatctcgatccacataacgatccactgttaattcgtccttcgacatatggaagggtctgtgcgttgtccctgtcgcctttattagctgcgtgcaattcctttccagcacagtaagtgacctaatcaattgtagttaaatccagatgcttccagattatgcacttaactgagatcaatccgagaggccagtttgatgcgggttgatgagcgaggtgtcctgcaggtgctttggtgaagcacacctgctccatgactccatcccctcaaatgttaaactcacatgcatgtactatacagttttttaaaacagcgtttttcagaactcccaggtcatgtttaaaactgaaaaaaactatttctaaataaacatactacggagaataaaaataatctgaagataatctatcctagtacgagagtaacagtcgtatactaaagtaaagtaaactctgtacaaaacagtggttgataaacacagtgactgactacgaatattaaactctgtacaaaacagctgaaactaaagatccgcacggcacaactgaaactgcccttcctaaacccagacgaccaaagatcaaaacaaaaacaaacaaaaatccacatataagattgtctcgtaggcgtccatcgctatccccacccaacaccacactacaacggcaacagtagtagtagtacctgattatccatccctaacaaatcccacttccccacacacgccaaaagcctctcctctcctttcctcctcctccagtcctcctcactgtccgtcccaagaaccactcggtgcagccgccgccgccgccgcagccagtgccattgcaagaatcgcgagggggtattgaggttgggcggcgagatgagcatgtacgggagggacccgtggggcgggccgctggagatatgccacgactcggcgacggacgacgaccggagccggaacctggacctggacaggggggcgctgtcgcggacgctggacgagacgcagcagagctggctgctggccgggccgggggaccagggccggaagaagaagaagtacgtcgacctcggctgcctcgtcgtcagccgcaagctcttcgtgtggacggtcggggtgctcctcgccgccgccgtcttcgccgggctcgtcgccggcatcgccaaggccatccccaggcaccaccgcccgccgccgccgccggacgacttcaccgtcgcgctgcgcaaggcgctcatgttcttcaatgcccagaaatgtgagtgtgcttccctccctgccgcctcgcgcgtcggagtatcagatcatttttttcctttttttgtgagttctcagttgtgctggattagaaatggtgggttttttttggcgatctgggcgatttatgttcgggagcttttaggatttgattattgtgcgtttgagctttgccaagttctgaagattcgatttttttttcatgcttctcttggtagaataggaaagaccggattttcccgttgtttctcccggtgatcttgtggacaggaagtttcaagtctttagcttggtttccggtttcttccgagagttacgatggcttgagagttgagacgccggcttcagagatgggatttttattttattagcttggatttatttttccggtgcttgaaatgggaataactaggcaccaaaccggtctgtccatcagatccatccgtaaagattacaggagtttatctagaagaataatatgtccaacttaaagatcacattttgatggtacttcccatttgtgtatttgctgcagctggaaagcttccgaagaacaacaatgtgcattggcgtggtaactcgtgcatgaaggacggactctcggatccggcagtcgggcgcagcctcgtcggagggtactacgacgccggcgacgccgtcaagttcaactttccagctgccttctccatgaccctcctcagctggagcgtcatcgagtacagtgctaaatacgaggcagttggggaacttggccatatccgtgataccatcaagtggggggccgattacttcttgaagaccttcaactcaacggcggataccattgatcgtgtcgttatgcaggtaaaacaaagatgcaaacatggatatgtgcagagggattgtagttcttgccatcagagccattgctaattcgagattttatggtgggtgcaggtggggagcggtgcaacatcacccggttcgactcaaccgaacgatcactattgttggatgagaccagaggacattgactaccctcgcccagtagttgagtgccatgcttgttcagatcttgcggctgagatggctgcatcattggcagcagcatcaattgtgttcaaggacaataaggcgtactcgcagaagctggtacatggtgctaccaccctcttcaagtttgcaaggcaaaaccgtggaagatatagtgcaggtggttccgatgctgcaaaattctataactcaaccagctactgggatgagtttgtatggggtggttcatggatgtatctcgcaaccggcaattcatcgtacctgcagttggcaacacaccccaagcttgcaaagcatgctggtgcttactggggtggtccagactacggtgtattcagctgggacaataagcttactggtgcacaggtaattgcatttgttctcttctgtttaagtaatgatatagacattccccaggttgacccattggcatttaatttggtacttggttgatgcttgacatgaatattccgtatctaacatgctgatcattataatataggactatctgttgaatcaccaattttgtatataatatgtgaggtggtttagttgcagtagctatcttgtgtggagtcaacttgttatgtggtatatcaagacctgaaatgtagagcattagtaacaattatagagaaagaggtacacaacttgtatgatatattaaggtttggaacaccgtcagtgttgtcctgtctcccttttttgttctttggaatttcctaaaaatgtgacccatgataacaattgttttcagcatgcaacctgcatttgggctcatcttttaaataaccagttctggtaggtttcaactatgtgtgtcaaaagaattggtcacacttctctctagtttaacccgttgaatcatagaacctggtaacttttgtgtatatgctatttcttaaccttcaagagctaaaattctttgctactccctccttccctaaatgtttgacgccgttgatttttttaaacatgtttgaccattcgtcttatttaaaaacttttgtgaaatatgtaaaactatatgtatacacaaaaatatatttaacaatgaatcaaatgatataaaaagaattaataattacttaatttttttaaataagacgaacggtcaaatatgtttaaaaaagtcaacgacatcaaacatttagggatggagggagtacatagcagtagctagtaaaaaaaatccagatgaacaaataaacggatttaacatatcaattggtacttattttatggtctgtcattacaggttcttttgagccggttaaggctcttcttaagtcctggttatccatatgaagagatcctcaggacattccacaatcaaacaagcattattatgtgctcttatcttccaattttcaagtctttcaacaggacaaaaggtttgaccttgaactcactgaatcacacagtcacacattggtttgtgaacagttagttacttaggccctgtttagttctccaaaaacttttcgcaaaaacatcacatcgaatctttagacacatgtatggagcattaaatatagataaaaagaaaaactaattgcacagtttgcatgtaaatcgcaagacgaatcgtttgaccctaattagttcatgattagccataagtgccacagtaacctacatgtgctaatgacggcttaattaggctcaaaagattcgtctcgtggtttccaggcgagttatgaaattatttttttcattcgtgtccgaaaagcacttccgacatccggtcaaacgtccgatgtgacacccaaaaattttcatttcaccaactaaacaggccctattattattgtatttcaggtggtttgatccagttgaatcacgggaggccacaacctcttcagtatgtggtgaacgctgcattccttgcttctttgtacggtgactatcttgaggctgcagatacccctggctggtattgtgggccccatttctacccaattgaaactctgcgcaattttgcaagaactcaagtaggtttgcagagtttaaaatgttggaatcttgtaattccagcagtttttaactcctgatactaattcactacttatttcagatcgaatacatcttaggaaaaaatcctttgaagatgagctatgtggttggttacggaaaccgttaccctaaacgtgttcatcatcggggtgcctcgatcccaaagaatggtgtccactacggttgcaaaggaggttggaagtggagagaaaccaagaaaccaaaccctaacatcatcgtcggagcgatggtagctggccctgatcgccacgacggcttcaaggatgttcgcaagaattacaactacacggaagcaactctagctggcaatgccggtctagttgcagcattagtagcattgtcaggtgaaggccatggcgtggataagaacactatgttttctgccgtgccgccgatgttcccttcgcccccaccgcctccggcaccatggaaaccatgattggctgccactatctgattctgattcattttgtatacggcttatttagattagtgtttttctcccttgttctggaaatgctgggggaaacctaacagaaaagaaggcgtcaggtttttatctttgtttctcccattgttgtatacttgtataatccccatgttatgtaacactattgctgttctggtatgaacctagtaattaatactatctttcctcgtggatttgtgggagttagatttttaagactctgctttcttgaatcagtctatgaaacggcaacgctcatattaacattcacgtcctaacccattcgatttgtactctactgagatgaaactgagtaccacacttgggccaaaggtcatgaataatgatgattcttgcaacccattttcattaggaaaaagtccaccttcactccctaaactaatgaccaaatttgattcgtatccttgaatcgcaataccagatatatcgaccccccaaagccccaactattaaaaccggtgtaatttgactcccttacgtttttagagggttgtttcgctggcgtggcgcatacgtggcggtattgacctggtcttcgtccaacgtggcattgatatggtatgctattataatacatggacccatttatcattcaaaaaaattatgggccactgacatgtgggcccacatgtcatcctctctccttcccttcttcctcttccctctctcccttgttcggctgtgtgcactgtgtgcagggagtgggtgctggagcggcagcagcgacgacgacgtcgtcacataggcgctccgtctcgaggcagcgcccgccctcccgccatcattattgcagaaatgcagagccaattttactactaattccacaatacgaattcaagcacaagtagaaatgcagagaccgcaatggttctactcctagatagcactcgtcgccgccggagctcagaccttggttgcctctaccgcccccgtcacccgaggggcaaggacagggggagcgggaggcgtcgtggcattggccttcaccacgcgccaccatacccagacgacaacgagaccggtgatgagcaagcgcggccaagacgatcacggcggcggcgatgaccattgcccaagcattcgtcgcgtgagtgacacccctacgccgacctctaatcttccaacacttataatccatcgtgatcgtggtgggggttgtcagaggctgtaaggccaatgaggttcactgccaccgctcgtcgccattgaggagacaaagaagaaagcctcacacagcggtaggagtacttagtagttcgtagtctctcatggagggtttgcaattttgcccttgggtttggttatccgtggatacccggtccgataggtatggctctacgtatgatttttttatgtaccatttaatttttaggaaaacatgagcgaaaaataaagaactagaagttgaaaatcgtactaccgaacacacccttaatatatttttgtttagcttctctctataatccataaaccaaaaccatatgagccatcaaaacacattactcttatccagtggcggatccagtataggggcggcggggtctcgagcccccactactggggtgaagactatgagagacgccacgaagaccccactaaattttttttaccatatgtagatgggaggggggactgtaactctatctagtttattcagacccactgctcttatcttctaaattcatatcgatttaatagcacgtacccttcctatactagcagtagcagtttaatttttttgtgacacgtgatacaagataagtcattagcatatcaattatcataaacttaaaataaatttatttaatttttcaagaaacatttcaggctcattcggaacacaggattttaaaaacgcaggaacataaaaaatgcactattgcagtgtcctaacacctcaaatcctatggattaggaaaaaacccccaaaaaatagccattttaataagcacatgaaaagtacgggaataagaaaagagatagacacaaaggacttttttccctaagaaattaaagctcatgttagaattcccctagaacttctaggttttgagccaatccaaaggaaatccgtaggatttttatagctattcctataacccaaatgtccatatagaaattattttcacatgattgaatttctctaaaattccttaaaaagaatcctttgttccaaaaaaacctttatataaaaaacttttacataaatgcatagtttagcaatttgaaaactatattattgaaaataagataattatagtttgaagttgatgtaaagaacgcacctaagtgtaatattttttatttgggaatggaatgagcacaaacaaaacaaaaggagtgcttgtctgatcgtatcaagcctgattattagaccggatacggttgccattgatttatttcctccgtcacaaaatatttttatgttccaagcaattattatatcaaagttgataaaatagaaacaaatatattgtgaccagataaagcgtgggataattacattagtattcgaaaagagtaaacggtattttagtgattttactttttattactccctccgtctcataatataagagattttgagtttttgcttgcactgtttgaccactcgttttattaaaaataattgtgcaaatataaaagacggaaagttgtgcttaaaggacttttgataataaaatatgtcacaaaaaataaataataatttcaaacatttttaaataaaacgagtgatcaaacagtgtaaacaaaaacacaaaatcccttgtattaggatccgtcccaaaaaaggcaaaccgtgggtttccgtgccaacgtttgactgtccatcttatatgaaaattttttataattagtattttcattgttgttagatgataaaatatgattaatattttatatatgacttatatttttaattttttttataatttttttaaataagacggatggtaaaagattgaacaactttttttttttttttacggagggagtacgtggggagagataagaaatgaacaacggatggagtatgcgcgaccggagcgcatcgatgcgcgcatgaacgcaagccttcctgcgcactacactgcgcatacgcaacgcgcagtcgcggagcagagaaaccgcgcggtctcccacgcgcgatttgaatcccgcatcgggacccgcggcctgcctacagaccaaaacaagctagcggccacacaaggcagaacaaatcgattgacagtagagggaagcagggttggtgacttgtgggtgtgcgcctgggcggattttaattgcaccgctccgatttcttttggatttgacgaccgatcggccccgccggtggcgccccagcatactactactactactaccactaccccgcgggcctaatccagcccaaccgagttcgctgctagtatacttttggataatggccattcgaacttggtcggcgccagcaaggggtgtcttctgttgtcgccgcatatgggtccggcaaaaaacttcgctttttctgtggcgagttcaaattgcgggtaaatggattgaactccgaatacggaagaaaataataccatagaacaaaatagtagtagtactactgcagactgtagattttgatttggaggaaaaacacagtaattttgaaggatttcaatcctataagaaaaaattcacatcaataccattgaatcaaagaattaaatcatatccaatcttttgaaatttctatggaattggacgatctcgtagagatttaggaggaaacttagcaagaacttaaagtcttggaaaatttcctttgagtctctctcttccaattcatgtgtattttcctacggctcagtcaaacaactatttcttgtttttcatgtgttttttaatcttctattttaccctacaatttatgttagaatcctgtgttttttctattcttttattttttttcattccagcgattcaaagagaccctgaaggcccaacccagaccatccaaaaatgtttgcagtgaattccctcggtggtcgttgcaagttctagagctgtcaaaaatgttcgaggctcgtaaactgcttgagctccaaacgagttgagcctgagcctctcctaaaactcgcgagctttgttaagtcgagctcgagcttccatcgagtttattatttgtttcctcttctattaatatgattaactagatattaattattttttaagatatcatcctcaaaatatatattcttttacttaaaaattaagcttgatagtcgaactcgagcttgatcgaactcgaaccaagctgtttgaaagatcaaatattttataagctcggttcgaggttgtatcgagcttatagcttaggcgagagctcgctcgagatcagctcgttcacagccctacttgcaactacttctcgcggctcgctcggcgcaagactgcgggccacgcagctgccaggttccagccttggctggcgactcgtcggggtgtggccgtgtgggctgtgtggcaagtgaccatatgtgtgtatccaccgcgcgcgcgcgaggcgcagccgtagacaacagcatgctcgtcgggcactcgggcggctgtgcacgcacgaccgtgtgcacgcagagaaggttcgccgcagttcgctcggcgcgacaaggccgaggaggcagatcggcggacgatccaatcctgatctttaacccacatgaaaactgggcgagccgccgtagcagtactgatccacactaggacaagatggtgtgcacatggcgcggcacatgcgacccgctgcgcacgcccagtcagcccagaggccacgggccaagttgggagtcttggggagagacagcaccatgataccgtatcacaccctgcttatcctcggccctaccacgctttgcccacacctgtgcgcagcagcagcagcagcagcagccgtggcccgtggccggcgtgcatatgcggcagcgctatctgcaatgcaagtttgcatcttggactgcactgccccggctaggaaacaaaacccagcagggctttgcccctgtgggcccaggttcgggaccgggagcgggttgacagactgatgtgtgggtccgacgggcttgtgccgggccccgtgtcctgtttgccccagactagcaaaggatcattaggatattaattagcttaggcacaacagcacaagctaatgcaaacgacgtaactagaggagtagtagtacgtgttagtgagatcctagtatatagattagcggcggagatgtgggccgtgggcctgggctccaagatctggtcttttgctttatttaggtttgactgcaacgctgtccaaaagaatactgccccactactgcattgagggagaaatttcatcgagccccttgagttttgcacttttgctactcctggtagagtacccagtacctttgcccgtgaccgagaggctctctgtttatttattccttctcggaattcgagctctgctttccaatgtcgtgtcttgccaattgtttgttcattgggtaaagatttgcctgtgcatgttcagggtccagcaaactttacaggcttttttgttgccagtctacagtgtaaagcattgaaaaaagacttgtggctggactctcgctttttaaaagtcctctttgcgaaaattttcggcgagtacaaaagtttcataagctgtttcccaatacgtcctggctccagattaggaacgatgtataggaagtaaataatattttgatatcaatatgtgtataaaagaaaggattataaaatataggaaaaatatatatataaagtttaaataggccataggtaaaacattgcaatctgatgagaatgataaactcaaagaaaaaatttcataaagattgaagctattgctaactttcatttgaaatatacatagtacattaaaaaccactccttacaaattctatagtaatagaaaaaatgctcgtgcgttgcaatgagtgaagattattttaatcttattattgttatatggtttagttaagctgaaattcactttgttaaatttgcttgcatatatatttgttagaaaatcatgagctgcaattaggagtccgaccgtctcaaattagcatgcgagtttttagaagaaatttcttatatgattcattctgtatttccaaaaacgaacgaatttaaaaaccgactcaaatacggatttatatttccaaaagcgcacgaatttaaaaaccgatccatacccagatgacatagtaaagtaccgacaaaaatatcttcaatatatatatatatatatataaagtagttaggagtcggtattttttatgtataagttttttctcttttttctccaccggagagtcggaattaagtcagacatattttttaacgatataagtttttatttttggttttttctctctctcttttttccacatgaggagtggtacttttttttcttttattttatggtagaagttgtttttctctttttttttctcgcctttttttccactagacgatggaaacgcctcttatttttaaagtagtagtagatttagaaaactccaatgcattatttcaaaggataaataagaacttttctacacattgtgtacactcataaactctagccaaatgtatcgagaaaaatcagaataattttactcgaacttggaaaaaaatgaaacaaacatgactggcaggatgaagagaattcctcctacgtaacatcccacctaacgtagtcaatgaatgtaaatgatcatatcctctgactttacattagaggatctcaatccacatatcctaactcatatctgaaagatatatgcactagagttgcccttgtaaggggggattggaagatctataatcctaagagtgtggtgattgttttggtgattaataataacccattgttggaactaactatttccatgagttggtgagattaggttaagttccggcatcgagtaagatgggcatcttaccttgatgaggagcaagtgaatacagtgatgatgcggggtatgaagtggctatctatggcaaaacggtgaagggaaaacaaggctcggctacaatggaccatgcgggggtgaagggcaagcaagaggctagcgccgacgaaccaaatccggtggtgaagggcgagtgaaagctttgtcattatggaccgtgcgaggccatttgaagctatgagtaatccgtatcaattataagaagaccgcaagatagaatgccgaaaatcaagaggaagctgttctccgatgaacatcaagtcaaaagccaaagtaggcattgatcaaggcaaaggtataattgatttgggactaatgtgcttaactagttgtagataagaatagtcccaatggagaaatggcgttgacgttggcacccctgaaggcgaagcaagaagatggcaagaaggcattccttgcatttgagtataggaataccatactattaagagggatgcaacattgatatgtttgtttatgtctcggtgataaaagtgacctatgcaagtgctaccttgagagaaaccaaagccttaacctaacatatgagtggttttagagcttgtttctagttgggttgggtagccctctcaaaaagctttccatagagcccaagtttaccgaaaactgactctggagcaaggagttatgaccgtttttgtgaagtgctgtcagggtagctcggaagttccgggccctgggccaggaagttccgacccgatatctctgttcgggcgaggagggtgccaggaagttctaggtctcggggcaggaagttccgggtcctgttatgtgagtaacggctagttttttgggggcttgggtttttaatccccttcaccctcttctttgttggctgctaattttgggcaagaatagacctatccaaaaccaaatagcccctccgaaacctcctaccttagtggtagatctttgtgagtgagatttggcaagagatttgagagattgagaggtggcaaggttgggattgcatctatattgctctctctagttctacttggacaaggggacatctatgtgtataaatataagacccccctagggagagggaacaacaacatatcaatatagatcaatacaaaccaacatgcgccaagacaagccgccgaatattgacatcagagataagcctagacaaacccaatatggttctgcggaagccagcaggagggatctagcgctatctttgatctcgccgagtgcggattcgaggaagaagactaccctgtcatcgactatgtattggttatccatgccgctaagtcgacgacagctagataggttatcccaattattgtactggtgtgattatagtgaataagagcaataccggcttcggccaataggagtagggctattacctgtcagataaggggcccgaacctatataaaaatccttgtctccatctcttttacctcaatctcgcatataccctggtaccaatgatccctataccatccaaatattgtagtcgtgatctcaagcgttgacaaaattcaatgcatccccccctctccctctacattatcttttccactagtaatttcctccaaacttcatgtatttctatctatagtgttcctctattttgaaatcatgtactgcatagcatgcaacaatctattattacatttttcttattcttgtatttaagcaacgtgtggtagagactcttgtaaaacaactctactctaaagaatatatggaaattttcaaaatgatttgaatcctccaatgtttgtatgaaaatcatctgttcaaaatttgtatgaaacagaagggggttttccaatcctacaaaaatctcagcagcaattctaccatccaaatgactaaaattccactttgaaacaatggattgagaatatggaatgaaatttcctttagagattttgaaggaaaataatcatgaggtttcacctcaagtttttcctataactttaaattcctatgtatcaaccaaacgatagttttaggaccttgtttttagaaaaaaatttaatgagaacgtcattctattttacaatcattcatttagggccccctttgattcaaagtaaagttagaggaattttggaggatttcattgctatggatttttttttcataaatggccctttgaatcaaaggaatggacaaaattgaatgctataaaattcctatggaatgcttcatgccatgcaattttcgaggaaatctaacatgaggtagaacctcatggaaacgttcctttgagtttttatctctcttataatttctgagtttttcttgagatccaatcaaacgattattccggtgttttttctgtgtttgacaatcctttgttttccacttacattcctgtcaaaatcatacgttttctcaatcctgcgattcaaagtggcctaaaattttcggagctcacaaaatgaggcaagggttgtgagcgtcctaggactaaggaatattttcctatagtacagtaaagttctttgccttgttcaaattcaggaactagggcctctttgaattggagaaaaaaatacagaagaagcaaaggaattggaatcctttagaaaaggttaatgttcattcctttggttcttaagaatgagcaaaagaaaaacacatgaaactcgcatttcctaatgattctgaaggcactactatagaaagtgtcataggtgtcagttaagaagcctctatacgtgtggattttctagccagcaccacagagacggcatagatgaccccgagtcattggtgtcatttccacaactaacacctttgaggcactcgctaagcgaaaaaagattggctcgatgcatcggctcgaatcgaggttctcccattgccccaaatccaaattcaaatccccgaatcaaaattagatcgctaccaagattgattgacatcacaaaatcatgaacatatatagaatcaacaaaagaaaaaacatccaaatcagcaaaacccgtcggtatgcacttgacgacattgagataaggccgacgccaccacggatatggtgtagggcaacgacgcccccggggggggggagcagatccggaggccctcaaggttgggcccgttggatctgtcatcggtgccaccaccctcgccgtcgctgatgaatccactggctggggagaggccggccgttacctgctagggaaaggtgccagcgaagagggagagctggaatgagaggaaacggtgctcgcaagagaaaagaaagagggaggcgtgggcgagagagagaacaggctaagggataaggacgggagagagagggtggctaaaaaaatttctcgtcctgatggtggctcggctcagtttttctaatagatgttggttgttttagaaccgactcctatactacatgtgttggtttttatctagaaccgacacctataatataagtatatatgctattttttttaaaaaaaccaacacctatactatgtgtgtcggtttttatctagatttttgcctgatagaagtgataaatggaaaataggtgttagttttaataaaccgtcacttagagccgtaacctataaggtattttgtagtagtgagggaaacatagggcatttaacatcgactataagctcatgtttttttttctagctcacgtaagatcgaggcaaatctagggcctgtttgggatagttttacattctgagaaacagccaggggcggatccaacgtgggtgcaggggggactcaaaacccatggatacctcaggagcacccccttcgattttttcaccataaatgataaactaaaggtctttaaatagctagaggttgaagaaactgtgtaattgagcctccccaattttttgttcctggatccgcccctggaaacagcgagaggggatttagcttgtgagagtatgaagaatttgggaaaattagcttttgggtgtgtttagttccacggccaaaattagaagtttgactaaaattgaaagtttgaagaaaaaagttggaagtttgtgtgtaggaaagttttgatgtgatggaaaagttggaagtttgaagaaaaagttgggaactaaacaaagactttgtcttctagtttatttgctgaattcaacaactacttgttctcaaaacctaaggccttgttcggttactagggatttaatccccaaggggaatcaatccagggagggattgagtgaatccctctcatgtcactcaatccctgttggggatgaatccctccctacccactaatccccctctcaaatccatgtgttcggtttggtcaagatcaacaatagcaggattggtgctttcctgcttcaacgctgctattgagttgatgttcagcttggcagtttatatgcatcaacttcagagcatcaaatggaggaagcatcaaacatagcaacggaatttgataatatcttatcgtacaaacaaaatatactcagtggagtaattactgtaatctccaatgaacatcaaatgtcacttttgcttttcgtcgaaacatagcattatctaatataagttagaatatcgatcagtcctagcttctacagtctatgcttgacggagcgtggggctcctcaccgggagaccgcgcaggcccccctttgccggttcggccggggaccctaggtgagactctaagctcccaatctgtatgtggaaggttcgcgagaccggaagcacagaagacgccggcgatgtatacaggttcgggccgcttagaagcgtaataccctactcctgtgttttggtggattcgtgtgtgaaggagctacaaagtatgagccagcctctcccttgttctgggttcctaatctggaaaagtccagtccaaaaaaaaaaacctcccttctctcagtgggcaaggtcctccttttatatcttaaggggataccacatgcaccatccccccctctctgtggggacttaccctaccttttcataaatggacggagatttgcatggttgccgttcgagtcaccttctgatgggacggcccgcacctacctccactttcgccgggagcaggcgcgacgcggaatcatggctgtctgctgacgacatgacctgtgtcagactggtcacaaatcggtcattcttgtccaccacgcgtcagcttagcaatctgcacgttggtccttcttcacacaacattttgcctgtaatggttaggatgaagcctggcatatatctgaccaggactaacgtgccatctctgggaggtaacacgctagctccagctggggacgagtgcctagaagccctcgtcctgacgggatggggcgaggcgtgcgtcagatcgcctgtcgccacctaacccgcgatctgaccggtctgtgactggtcacagaccggataaatgagtgcactgcaccgcgttacatgcggcgtgacacgctcagccaaaccgcaataaatgtggttaggtgagccccactgtgcccacctaacccatacacgcggagcgaaaacccacgaggggtcggggcgcctcggccctcggggccgaggcgggtgcggctcgaccccctcggggggactaagaggagggcgaacacatcaccctcgggcccgacgtcccccgagggtgccaggccacgtgggcgattgtgtctgcctcaaacctctagtcatgatactcccgatcccatgtcaccgacaatgcttaataaatattttagacatagtgaaagaagtgcagtgcagatgcataattaatccttcagcgcccctgcaacaaaaagatccttacagccttccagttccataatttacaccatcatcaacatcttctccaactgtcatcacaggagaattacgaaaaattatgtaagaccataatagagctgattgaggatatgtatatggtaatttaaaattccagcaattgacaactacttgtgggtaaccccaaagaaaggtagattataacaactaaaaattaagcattatctaatatagttttgtatggaagaccatacaaactacttgcaattttctgaagtttaaccatgttcagaacaatgatccagaaattaagcaacattctcctattcccccatgcatccatatggtgacattggtatacacaaataccattaactttaatctacagtacttcgaggaacttatgcaagcattgccttttgccatgccacacaaacaaaaaaatgattttttttcttctaaaaatagcatataagctagttgtaaatgatcatcttcatcatgcatgattaatattcataataacactttagacagaaacaaattgatagaggaattattatattcacatcacaaaaattaatatcttgtcaactttcagcattcttaaacatgttgcacatgacatgaagtataatcttatgaaaacatgttgaactgaactaatgcaacattccatttcttgttgtacatacataaaataaaaccagtgaacattataatgcacaaagtttcagactcaagtgtataacaaatatatggtgaatgtagaaaaggatgaccacctcaaccttcttctagtttctctctctagaaattagaacgtgtggaagtacaattcagccttgaaaacactaaacacttgcttgctagctactggtaatagagtgtgactctgaaatctgaacttactttgtagacagatccaaaaccaccttttccaagcaaactttcacttgagaaattattagttgcatcttttatgtcatagaaatcatacagtttaaagcccaagttgccctcttctaacctccagagagttattacattctgcattgccatggacagccttcgcagctccgatcttactcaccacgagtaagaactcatcgggaaatgcagcaatcaagaactcaccatgcccaaatcaagaactaatgatatggtttaggacgtgcggcagcggcggtggcgaatcaagaactcatccccacccaaccaagaaaaaaagctcattccccatctgatcaagaactcactaatcctcacccaaatcaagaactcactagatcgagcagaatacgaggaggaggacgacgaatcgcgatgacgacgggaaagggagaaaagaagaaaaccctaaccctagctttggaagaggaggggagaggggaaaatgctgcgtgctcaccggagagaagatggcggccggaggagagcgccgtgccgtcgccatcgccgtcgcctccgcgtcgcgccgcccccgccgttgcgccacctcgaatcgcctccgcgtcgtgctgccgctgcgcgtgttgcgcgtcgcctcccgctcccgtcatgaggaatttttccacgccacacgagaagctgattttttcccgggcctgggtgagggggaaaggccgggataggccggggtaaaacccagactgggcttaaccgaacacacaatttcagatgggccgggattgtttcctcgccggggtgatccacggggattgggccccgatcccagccggaaacggcccaaccgaacaaggcctaaatgaaaaactaagactatttgggggttttcgattctgaaagcagctacagctttcacaagcttcccagacagcaatagtagctcttggtcacttgtctattcaattagggtgggttatatggatataagtagataagtaacccaatttattcaataatcatttatcattacaaaatttatgtgtttttcaatcatctatgttgcacgtatgctcgtattttattcctttgttttttcctattttttaatatttttttcaatcaaacgttttaagaaggggcccatagtttaatttcggagaaaaatcctgtaaaatttgaccatctataagactataatataaacgaggcagcaaagcgaagcactgtgtgatagtactgcagttcctagtgctaccgctaccccattatctaattacccgtcattggtgattgacattcaatagcattgtgcgttttgttatcagaaaagaaaagataaagcaaatagtagtaaaagtaaaaaaaaaaaaaaaaaaagagtacagacaacagactgtacagtgccatgcatgtggtagtataagcaatcgctatggtttgctaggacgtaaagtcaccatgacatggtcactgacaggtgggcccgagagcggtggggcccacatatcagccaccatgctagctgtgtggtaatagtatagtacccatgtataaaatcttggggacgcactgcaaagggccacatgggcatggcgagccgtgagacccacacaggtactggctttttcaaaccggggaaagctacacgtacgctgtaccaacagccgtaaagccaagcagaagcttttgctgtgcgtgcgagaaacatgtatacggacgacggaaacaccggtcaactcctgtgcgcatatgcaaggcaaacgcagcatcacacagacagcttcacgctagtacctttcccagtacagagtggataagcaaaatggattaattgggtagaatggtttatgagtcaaggaggtgagaaagagaaattgctagtgcctagtggtagagcattgttgacccctagaagctagaaccggctcataaaatcggatactcccttttccctgttagatcctctattttcaaagataccatatctttatcattgatatataagtccaaggtttatcgggtccacatatcagtatatcagtgacaaagccaaatgcttttgaaggtggaggagcttgatccaaattgtatggtccggttttggatattcaaaggaaaactttatggtatgagaaacattttatctctttatttctttgccttttacatttccaaaccctaattaatattctaccttcgtctctatagcaattgaagacactctaggtgccctgccgattctagagcaagcctaggtgcacctaccctaacggggttcctcctgagcgggggttcgtaggtcttcaagacgattatgtgagaacaggtactctggtttccaaaacagggtaatccgtaatcggttttctcaagaagcgttacgagttgatctaattgcaatccacacgttgtagtgctttggtgttttgtctatctcaatgtcaacaagcatcacaatgcccatttaccttcttggttacaggcaaagaaaatatgattacatggcatgtactcgatcttctctgaagattcagacccgatatctcaatcttcataatttcggtcaataagatttcttgaaccgacaattggttaaccgatatgacggtgtatccagtcttagctaacttgaccgaacactcccgcgtaggcagactctagtgtaggggatggcaattttacccgtgggtgcgggcattcgctggtaccacacccgatgggtatgggcatgtgtacccaaatatttctattcatacatgatttttttttaaagtgtcaatactaactaaaacatactagctgtgtaagtgcaacaaagtcatatatcactctagcttagtcatttgtctttttttttcttggtgatgaaataatttgtaattgtagaatttatggattttggtccgtatttaatactttgtgattatacttattgagtaaacatagatgtctaattgtgatagtttagatatatatgtatcaattgatatatcacatcatgttgttgaaaaatccatggatacccgatacatgacgggtattgacatggattttattttacgatgaaagcattgggcatgggtgggcgagaactttgtcgtcttgggttgggtatattcttactccacccgaaccaaacttgatctattgccatccctacttagggcccctttcattcgcaggataggaaaaacataggaattgaagtagtatgattcttcaatcccgtgggaataaaaaacataggaaaaaatgaaatgtgccctttgatagtgctataggaaaaaacacaggatttcttttccaaagaggtcagacctctttctttttttcctgtgaaaatgaactaaagggatgcaatccttaggaatgttttctttcatttcctatgaatcaaaggcctccataagaaataatccataggattgtgaatcctaaaagatcctataccaatcctttgaataaaggagcccttaatgggaacttgagtctgctggactctcctgtgacctgtcgtagcgaaggtggacttaagtttggccgtaataatcggtttgctcaggtacctgaggaacacgaccgaaataacgaaaaatagatcggatactttggtctggctcctgtttttttttccttggttctttctgcacaccccaaaagacatgcctatctttgatccaagtcagcttgctttcaagatttcaccaaacctcagcatgatgaagaataactgtagttctctgcagctcagtaaagagtagggacttcagacaaaaaaaaaagaaaggtatagcgttcaattttgcagaaagaaactttcattgcctaaaattttgcacaaaaaaacatttattttcgaaaattatcaccaaactatatattcatcgtaaaatttattattcccccgtccacaacaaatataaatattcttagcactgctattcttgtactagtaacaaaaagctcttcttgagttctgagctcattccaacaaaatggatacaaataaagcataatattaagaaccaaagtactactccattgtagtaatactctctccatcccatctcattttaaatacagtcgtgagtcatgagtttccatgtttaacatttgatcgtctgtcttatttaaaaaaattttaaaaaattttaaaaataaatgtattattcatgttttatcatctaatatcaataaaaatactaattatataaaaatttaaataagacggacagtaaaatattgtacacagaatcccatgtctttacttaaaatgagaaggacactacagcagaaacaggatgtagagacggttttcttctcttgtagagacggttttgcccgtctctaggtgtactagagacggccctgtgtagagacggttttcttctcttgtagagacggttttgcccgtctctaggtgtactagagacggccctgtgaaccgtctctgaggcgttgccattgctcccgtctcaataaacaagagacggttttgctagccatgtctactaggtagagacggtccatagagacggaaaaaccgtctctacatatattttccatattttgtagaaatatcataataaatacactagacacggcttcggaccgtctctacatataaatttcttagatacagaaacaaacctcctcaattctggcatccacaattttatttggagaacatcagactgcatcacactttagcattataaataaaaaaacagggagggacttgtcgaaaaatcacacatttcactcactgaatggtaatttacatcttacatgaaaaggtgaacttctggaaaaaaaatgtacaatttcagttacaatatcataaacaaatacataacttggacttctccatctaattgaagtatactctctattgctccagattgattgaactgttatttcgttaatcatcatcttcatgcacccgttaatcatcatcttcacacaagaacctgctatacaatgtaactttacaatgtgaaaaaaaaataaatagtgaaagtggactagagtagagattgtgaaggaagctattgataaaatattctgtcaacaaaataatgacaagacttaccgcgcaaaacaacacgggatggactatgaatcatgtgaataatagatcaagttaactccatggtttatctgaacatctgaaactgaaagtagatcactcgatcagagtttgtgagagaatctatgaaaaaaaaattatgtcatacaagaagcaccatggatgcaaaggaatatgcctttcaatcatcaagtatatcacggagtttccaggttcagcttgtagtgaagtctacaaaagaaatcgtcttttgatctgctaaggaaaagcaaaagaatagtgaaacatgattaataatgtcctgcattggatatacagtgaaacaaaatatatattgacaacaagtgcagagttgatatcatttctcatgataaggcaacatgtaagttagcaatcatatatgcataatattttattgggaattaatcaacctcaccttgctagtagtaacatggaggtgcttcagcagtaactgaagttcctgagaattgataatcgcatatgtgtcaaatagcagcaaaagccatccctctagctagtctgctaacagaaaccctgcattaaggtaggaagcatatgaaagcaatcaaagtcaatatatatatgtgtatatctgttgtgccctttttgaacttaagaaattaagggattcagttcattttcccgaaactagatttacattgaatgcagtaatgttgacaaccttgaacaacatacctaacttttcaggaaagaaagatcattaagaacaatggcctctaaccacagtcccaatgaatgcaaattaaaactaccaaagcacaccaaaccagatgttcatcacgaatcgtcctaaaccaatgtatacctatgtggattctcaatagaaagggagaacaatgaaattaccttttctttgatgaagctgtgcaactcgatctgattcctcacggtaggtcaatccgtcgtgctagcactttcaatcagccaatcaggggatcatactctgaatcagccaaaaatcagagtctcatccctccacaaatctgctccccacgtgttcatctacctagcgactcgcaagatctgaaccgcgccgtggtggctgcaatggagtggcagcgcagtggcgataggcagcaacggccagaaaggagaagcgagagtgtaggaccggagcggcggtggtcagcggtggcgcgcgatggtggtggaggaggcacaccggcgatctggagcgggcgcgcggcggcgtgcgactccgtcgagggtttcgatagaccaacgattgtaccgagcagttccaaaaataaatagtgattatccgattaattaataattttaaaggatattatgatggtgggtgcagttaagtggggaggtagccacggtttatctctccgtctcttttatccgactctaggtgaggggggatttctcgcacgtacgttgggatagtttagtagcaacggtttgatgacccgtagtattttagtcgtctctagttgcctgttttgctgtagtgggaatagcatctattcacagtaatgtcgtaatgtcgtactataacaatcacaggttgagtttaacaaccacatgttgagtttaagcaaaacagtggggggtaagtgggagacactgatctgttatctcaccataatcacctgatgtaaccgcacggccaagtaggaccttgcggccagtaaaaagcttcagagaccactgcaatggccatgtgcccttcgtcagtttctgggctacccctgtcctgctgtccacatatgacactcttacagcttgcaggtagtactgttgctaaacatgtgaacgtgtggcaggcacttgcctccaggattaaccacagaatcagtataatatacgagtagttgttatacatggaagaactgggtaacaacatcaattgtctgatggcagtagtaaacaaaataactgctaactgccacatagtactatattctctagtataattaggcgcaccactaaattatttatatatatatagagtagtattatatatagtagtatatcacaatacttcatatgctgccactttttcttccataagggctaatggcatcttcttcttctcgtgttgtttaatggagctatccactaaaaggtgagagaagcttaaaaacgaaaagaaaggggagctaaacatcctaaaaactacgctgacactccactccttttttcccctatattccgataacactttctttgcttcatgtattcctgcacagaaataaacaccaaaagaaagaacgcaaaaatggcagcataattagatgggtagaagcctaataattgggaaacgtagtgggaataaagcagtgcttactatgatttctggagagggtttcagccacttccattgtggactactttacatcccgatcgccccgtgctcggacagcctgctcattgcatttgatcgaatcattccaatcgcaagtgatcacgaaatgaccagtacaatcaagtagtaatcaactgctcaaagtagtggcatggccaaacctgggcatggggaagaagcaggtccttggcgaaggtatgtccaatgtgggaggccggagagggttggcgctgccgaccgcactgccaccaatattgcagctactaccggtggtgaaatctccctcgctaccaatggcagtggcagcggttgcggtaaagaatgcggtcgacttggtagaggaagcaaacgggctgtctggcaagttgtgctcaccactgctcaaaatacatgcacaaacaatggtgaagcaaactttcagccacggaataattgcagatttgtaggcttgttgttcatgagttaatgacattagtctgagaatcatgagcaagcagaatgccaataatggtaaaaatctacctttggtcactatcggcattgcgggtaacctcaccggcagaatccgccttattaccaccattgacaactttcccctccgatggagagccgcagctcgccatcagttgcccagctgacaatgtacagtggatattggcaagttaagagaacttgattgattgacgtctaaagaacgagttcgatcaatgctatctatgcttactagagctaggcggtgactcgacgattgtggtggcaccgggttggccggaggtgaaggcattggtgatcggagtgggcagagacattgttgtcgtctccgccgcatggacagcggcagaagacttgaggtcgagcagctggaggccaatgaggcggcggctatggagatcaatagcctgctgcagctccgccgcctgttgctgctcctcgagcttccgccgcagcattagctcgttcgcgctgttggagtgctgcagcatccttgcacctgacgaacaccaaaccaacatccatcaaaacttacagctctagcaagcaacattgaacatcaggcaaacagggcgtccaaatggtaggagcaggtaaaggttgaatctttttataccgagctggtgaaaatcaaaggggtccctggcgtctaaccccgtgggcgacatgcagcagaaatcgccttgctgctgcttcctgaggagcgacgaacaacaaattcacatgcatgcaggttggtggctagcagtcgtgacaagcaacgtagtagtatactactactactaatttggagcgcttaacataatcgcgcatgcatttcttcattcaagccgcgtttcgaacgtacctgtacttgtcggggaccttgcccttctccttgtagggcttgacgagcacgcgggcgtcgcagatgaagtgcgggttgcccttggccaagatcagcttcaccgtctccgggtaaacgaaggtgacgaacccgaacatgcgcttctgctggtacgggatgcgcacgtcgtgcaccggcccgtagatgctgcagcgcggcgcgttgccaagaacagcaatgcaaaaatgccaatcagatcgcgtcctaccgagcccgccatgaaagaaggaagaagcatcattgcaacatcgcattatatacctgaagtagttggagacgtcctcctcgcggaacgtgctgtcggccgggaaggtgaggtaaatctggcgcgacccggggttcatcatgctggcgaaatcgacgcggtccaggcgcggccgccccatgaacttgtgcgcctcgtcgccgccggcgagcatcagcgcggccgcggcggctcttcacacgcgcaagcaagaaacgttttggaactttgaaatgccttctggcttggagaacgcatggaggttgcgaaggcggtagtacctttggttgtcgttgtgctgctgctgctgctgcaggaggaggctgaggcacttgctggtggcggatggcgaggcagggagagagcctgtgggggtgaacgggaaggcggcggggccgaggcgctggctcttggagcggaggaggaaatcctggcactgctgctgttcggcggtggttgcgtccatggcggcgtcgtcggagaggccgccatggacgaacctgcaggtgctgccgttcttgcagaacccgcgcgcgtagtacaggcaaggtttccacccgaagccgtcgccgccgaggcagagctcgttcaccgacgcgctgcggcggtgcccagggccgccgttggcccaggcgaggccgtaggggagcatcccgccgctctcgccggggccggggctccggcactccgctccgtcgaacgcctggagagcatgcccggggttcacgcccccggctccgtcgtgcaggaacgcgagctgctcctgcagctcgaagtcgtccaggagcgcgtccccaccccgaggaaagaagggcggggcgttcgccgcggcgcctcccccgccgttcaaggggctcattagctcctccccagcgccgaccatctcatccgcggcgccgccattgcccatgctgttactcctcgagaacggctgcgcctgcgcccacgacgacggcgacggcgcggggcagcggccggagttctgcctcgacagcaggaacggcgagtgggctgccggcacggtgggcgacgacgacgccgcctgaggcggcggcaggagggcgagctccttgcgcgcctgcgccatgacgctgtggagcagcgcctcggggccgaaggcgaggcgtatcatctccttgtcgccgtggtcctggatgagcaggaggcccatgatcttggcggcgtggtcagggtccagcgcctggatccgggagaacaccaccttggtcgcctcgtatgcatccatggcggcgcccaaagcttctcttctcctactcctaccttctcagtcacagcctcacaggcgcctttgcctcttggtcttcagttcacccttttaccacactactactagtatctgtgttggactattggtgctgtgtttacacttattacggccttaaatatacaggagctagcgaagcaagctcgatgctagtggtagatagagcaagatcgaggaggcagtacactagctagtgcttcttggcgtggtccggttgctctcggtagcctccgcttcccggagctgcggccactgagccactgagcagctccatttcccaaaggattgagagtgagtagtcgcgagctcgctgcgcgcccctttcttgagcacactggcctgagcatggctttcttgggccgggagtggactggtggagtgggcggtgcgcaaattttctgagggttttggggtgatgtgcacatacgaccagtttcgtttgagatggcccacttgtttcgaaacgtactccataattgtaaaaggaaatacaggaatattccctctgtactcataaaatcgttttgcacagcgacgtggtctccaaaacataattttgacttttggtttctataaaaatatttattgaaaaatgatatatgtatattaatataatttttacattttcaaattcaagaactcgagagttattcatgatatatatttctaaggtttgacttaaacattgttctaaacgacttctaatacgagtatggagggagtactcgtactaaaaagcatatattaaggtttttttaaaggaaggtcttcttcgatttatagaaaaatcggaggattttaattttattagaaaaattcctattaaggtcttcaaaataaatgactgaaacatgttgttccctttggaatgcgcatttttaaagaatttattgaaaagtgagcctaaccattctcttagaaaatttcttcaagtctatctcattttatttctatgtttttttttctacagtctaatcaaactatcatttctatgtgatttgtcaggttttgaaactcattgttttgctcttgtagtagcggttaaaatcctatatttttcctctttttttcaatagccctaaacgaacatcattctctttagaatacacaggattttaaaacataagaaaaattgaggtaatgtctttggacgattccaagcaaatcaaagcacatgactggaagttactcgaggaaaacaaaggaagtagagaggggatgaaagagtggattagacttctcaaaggggaaactcctatgttttaattattttccttttagaatccaggtgcataaataatactaccattttataggatctcaccaatcatgtcacatgctccttaaaaacttgagattgagaaaataaaggaatagaaatgcccatttgattatatcgcagtaaaaacacagaaatttaagagcgatgaaactcagaggaaattttcggttagtacatgattaattaagtatttgctataaaaacacaaaaaagattaatataaattttaaagcattttttctatggaaaattttggtataaaacacacaatttaacaacttgggaagtatgcacgtaaaaaatgtgagagtaaaagttgggaacctgtacttccgcgatggggctcctctaaagtacgttagagcatgtacaacaggtcaacagcatattttaagcagataaaagatgggagataagagcaacgagctacatatttgtagccagcttcagcacagactgcaagatacatgtgtgtatgacaggtgcgaccatacattaattttgtagtacatgtttataggtaactattatatgaattggctattaaattgattatagataattttgagctaataattggctatactattaaacttgctcttagatggatgtgcctctcttacttgtggatccataggagtggaccccacctgtcaaggattcacgttactttctctaacctcgcttcaaaggagctgcttcatgtatttatgggtgtgttccgacttgaaatgaggctcgtatttgtgactaattattatttcaatgataactgacaattatcgacaacgatgtgtccaaaatgacttcgttaattttaaaatatgccaactcgtcttttagaagtgcttttttttaagaaaatggattaaaatccagtctctatatccacaatgaatatacacaacccaattcagaagtgctattggaaataaaaagtgtgtatatgtgtttgaactgtgttttagaaaaattatcgtaacaaattaaatattaactatattatactaaatagtaacaaattaaatatcaagtatatatattatagtaaaagtataatcaaatatcgtttttgagggtttgttcggcatccccttttcccaacacatctctctcgtttttcacacgcacgcttttcaaactattaaacggtgcgtttttttcaaaaacttttgtatgtttctatacaaaagttgcttaaaaaatcaaattaatttattttttaaaagaaattagctaacacttaattaatcacgtgctaatagaccgctctgtttttttgcactctgttccggttgggaacatccgctagcgcgcacagcccgagtaaagcctggagcattcacaggtaagatgtactactcacgttgtactagcagttattttcagttgacttgttccacctacggaaagattgcgcattaatgaacaagcaagtgagcgctgctccggaagagaatgagaaagaagccaacagtcgcaaatattttagagtgcactacaaaatactcgaacgtagtacatatttttatatatatttcaaccattaatatgtccttacatttcaccatgtcatatttaaaccatttccatccaaagtttttattttcacttgcgcgaaggagaccgggagactccctctctttcaaaatgatcatcttataacatttttgaggttatttctaaataatcatcatatttattttatggtcattcattaaggctctgtttagttcctccaaaagagcaaaagttttgctgtttttgagcactttttgccaaaatggatcaaaacctagtagcaaaagttggcaatttagcatttatcatttaggagtctagagtagcaaattttgccaaaaagtacgttgggagccgtgctctctctatctttactagtaaaatggcaaaactttaccatgtatctaaacaccaactaacaaaacttcaatgccaaatcttttgccaccaaaacttttgccaaaaaaaattgccacaacaaattgatctaaacaggccctaagtctattcgttatttgtgcattaaatggacattgatgcatgtattcatgcacacaagtatttataaccaacatgcaataccttgatttactatttgctagaaaatggtggggatggtgcatgcatcaggtttgttgtgggagtaaatatactacgagaaagttattagagcaggtacaataatagactataagccagctataaacacatatcgagaagataaaagaagatagagataagcagtgggctatagatttgtagccagctacaacacaaactccaagacgcaacgttagtatgacaggtgggaccagatattaatagtttaatatatatttatagataactattgtacgaatttgctactaaattgactataaatgatttgaagctagtaattggctatactattaaacttgctcttagcttttcttaccaatacacccccacatgtctcttaaattgacatcaattaacatacaacaccgattgttgtctctcgcacatgcatcaagggcaatttacaccaacagtattgcttgcatgcaccaaaattgcatttggttgaatagtacaatattgaacaatgcatacaaatgataatttagtagtgcacagaaaaacgaaaaagtcacacataggaagtaccgaatatgccaatcatttctgaataacattgaaaaaattatatgattatcatttgtgaatggaaggagtagattctagcttggttttgttagcactcttttcaaaccgctaaacggtacattttgtgaaaaaaaattttatatagattttctctaaaatatcaaataaatttattttcaagtttataataattatttttatagaacttaattaatcatgtgctaatggtttctcattttacttgcttgtacttaatctttatccgccattacgtcgaacggggccttagggaacctttgtatcgtacgattaagaaaagagaggaataaaaattataggattttcaccagaatataagtgcgaaacacacgaatgattatttgaatagaccatagaaaaaatgcagggattgaatgagagagatagacccatagaaaattttcaaaaaggttggtgctaacttttctccaaaatctatatgcatgagtcaatccttaaagcaggtacaatagcaggctataagccagctataaacatattttaaagagataaaggaagagagagaagagcagcgggctacaggtctgtagccagctgcagcacggactccaagatgtaatgtgtgtatgacatgtgggaccaagtattaatagtatagtaagcaactattatatgaattagttattacattggctatagatgatttggagctagtagtgggctatactattaaacttgctcttaataatttcataggatttgaagaactgcaatcctttgtttcaaaagatcaaatatgaaaaattcctatataatttaaatcctagaaaattcctctaaggaactcctctataattcctttgcttcaaaggaaacctaattatattatggggacaaggaaacatgagtagaatttcttatattaaagagcagaggtagtaacaacgctcttgactatttgtcaaccactatttacggtttcgtagaaaaatggatgaggcattaaaactattgtatagataaaaaaacgtttatacttagtgcagtatattgttagcagtttcaaaactaaggctgaaaaatagaatataacaaaaagaactaaattaaagcatacgagagtgtttaaaagtaaggtttagtataattcgaattgtaaacaagcccgcgcgacgagagtgtttgcaagttagctggaaaaaaaaacatttgcactgcgattattatcggctgtgatatcgctggcgttcaatgaggtctccaatacagttctagcttcgatcataagcttagataattattcccctgtatgcactgtgattgtaagtgttgtgtcaagtgtgggtatgcatgtccttgaagatcaatcacgtaagacaagaagtgatctcgcttcaaggggccacgacgatttgagtaagcctacttcctatatatatatatctgccatcactatcagcagatagtgtcttcctgttttcttttggaggtggaggattcatcctgcaatgctgatataatatactcccatcgcctttaaaaaatgtatttttaactgtaaacctgtactccctcggtcctaaagtgtatgcagatttatatctagaattgaattctttttaggatggagaaagtacttccctccggttcgaacgattttggtagctagacgattttggcagctaggcatgaaaacggtcgaaaaacatctcaactattttcataaccataattttcttaaaaccagaatcaaaatggtgaagttgaaaataaaaagtatcgaaaattggagatggactatgcacggaaatatatcggtaacaatcgtaaaccgatcataaatatcaaaaagacattaaggctcatttggagtgaaggaatttcaaaggaagtttgaaggatttcaatctttaggattttttttcctattaaaccgaatggcattcatagaatttaatccttaggaatccaaatcctttaaattttcttcaaaacgaataggtccttagcctcattcagtttggaggaaataagaagggaaaatgtagcaacatgattcttgtaggaactatcactattcatccattcggttcgtacgatttgagcaaaggaaaatgataggaaaatttcctttgactatgattcctgaagaatttgctattagagctcttttatctatttccaagcgtaggatgaggcaaagcactcattggtctatgtttttgctctccagttgtatagattaaagcattcaaatcttggccatgttaatttaatactaagcattttgttttttttctatcatccatttaaaggatcaattctataccttttctattctctattttacacatacattcctatacaatttgtatgtttcgttttcctatttctatggttagaaatccgaaactcctgatgggcgattgatcgccaggggcgatcggatctggtctccccctctcctccacgtggttttcttttttggcaccgcattatttttctattttagtaaatttattcaagtaaagtttgtacacctcaagtttacacatctaaagtttagagacccaaagtttacaagtcaaaagtttatatatccgattcaaatttgaatttgaattcaaatatttttttatatatagtatttatatacatctaaagtttatacacttaaagtttatagacccaaagtttataagtcaaaagtttatatacccgattcaaatttgaatttgaattcaaatattttttatatatagcatttctatacatctaaagtttatacacctaaagtttatagaccgaaagtttataaatcaaaagtttacatacccgattcaaatttgaatttgaatttaaatattagtttatagacctaaagtttataagtcaaaagtttacatacccatttcaaatttgaatttgaattcaaatattttttatatatagtatttctatacataaatttttccaactttgtttttttgttttttttaagtttatagtgtagtatgaagagaaaaagaggaggaagaagggaggagaaggtgtgtacaggcccgcccattagccacacccttagaaatcatgtaaaccgaacaatctcttagctcctttgctcctttggaataaaggaatatgattgaaaatatggatttgctttctatgcccctatcccaaatgaaaacaaacatgacctcctacatcatgttttcattttcctttgagaagtcctacgaacttctccctttctctctagtttctctcttccacaaaattatttccatcatgtttcctacaaagccattcagatgagtaaagtctaaaattcctatattttgaaaccatgcgggaatatgaagtgtgtgatattctattcctgcattttcgaaatcctgtgttccaaggagccctgaaatgtaaaagtcaaacatttagctttacataactatatgattatataacgaaataagttcaggttgtactatataaattacaaattgtatccctagctttcaactaagcactcaacttaggatttggttgattagttgaagggcttctaaactatggtcaaataaagaaatggataggtttagaaataccataaatccataatgtaaaaaggtaattttagtaagaatacggtataaattcagaaacgatgagtataactatgaaatagtttatgtttccatttccttttttttaccgttccattttcattttcattttcttgttggtaaccattttgatatgttcggtaaaaataaaaaacgagcatcagacactcggaaattcccgtgactgttttcaccccattgacggctatcttggaatacatttcaactttatttaacttttgccggtttagataaacgtggtatacaagaaaaatcttactcctacaaacaatcgagaaaattgtttcgttcgtttagttccaactttaatcaaccaatttgatgcgagaaatggagcaaagtgagttaagatttagtaatgactagcactgctcacagtaaattttaaatattaaacttaatctagaaccaatttaggggtataattctcattgcatcagtcacacatcttcggcataatgcttgtggcaatcagattattctcacgagacgttaaacgcaagagttaagccagccaaatttaaatttcagaattaatttagatgattttccatcattttggtcactcgcccttggtttttagactgtgaagagtaagcctcgtaatcagatttttagactgtgcacagacagaattttaattttaaaacttaaattttgaattgattttgagaatttatttaccgtaatatattttcaacattggcggttaaataaaaaataataatatttactcatgaattattttttgtcacttcatttttcatggcttattagggtataagtagaaggcctcctttaattccttcgtataggaatttttcataaatatccattccaaacaagtaattggaaatgaatcttatgtaatctccgaaattcaatagaaagtttctttgagtctttccctctcatcaaattatgtgtttttctgtggtctaaataaatggttattcttttttttcaattttctattttacacgtccatcccaatcaaaatcatgtgtttcttctattattaagttttttaacctactttccaaggagcctaggtgagttcgtttgagcaacttcaaacgacaacttcatcatgttccattagtacacttcccaaaatgcaaagggatatgttctatggaaaaaattatacatgaaagtttattaaaaaaatcatattaatatattttaaagtttataataattaacacttgattaattatatactaatggtttatcttattttacatgccgccaatttaccgagattcctaatgggcgatcgatcgccccgagcaatcagccctcctccacgtggttttctttttttgcaccgcattactttcctattttagtaaatttatgcatctaattttgtacacctcaagtttacacatctaaagtttagagacccaaagtttataagtcaaaagtttatatatccgattcaaatttgaatttgaattcaaatattttttatatatagtattttctatacatctaaagtttatacacctcaagtttataagtcaaaagtttatatacccaattcagatttgaatttgaattcaaatattttttatatatagtattttctatacattaaagtttatacacctcaaatttatagacccaaagtttataagtcaaaaaattatatacccgattcaaatttgaatttgaattcaaactatttttatatatagtatttctatacataaacttttttctaactttgtttttttattttttttaaaatttatggtgttgtaggaagagaagaaggggaggaggaagggggg

SEQ ID NO: 7353 - DNA, 74255 bp, Oryza sativa
aagcattccaagaagactttgaagaaggttgtgtcagacaaggaggagtgcaggatagtcaagctcttgagcgaggctagagagaacactacatctctattcgagtcaacaatgcacctcttgtcgaagcaaatcgagatgccaaaattgtccctcatctccagggcattccagaagaaaaacacaatgatttgcaatgatgagcagttgcaggtgttagagtgctgcatcggggaccttgaggctggagcaggacttctgttcaggagattggtccagagcagggttactctcctgaacattcttagcttatagatattcctcaagatctgaaactcttaagaccttgtgattggcatccgtcttttaaaggatttgctgatccttaccatttgtatatgttataggcttactgtacagaaaagaaaacatacatgaaagagagttttgatctaattctttccatcccctgagtcctcacgtatctctgaggtacatcatgtgattatgcaagcgatattattaatgtctttgtgatgaatataaatcgcacaacatggcaaatgaattataaaatatatgtgccacataaacgaaaatcttttcattttttttgctggcaaattgatctgtgatgtgccatagggctatcaaatggccatgtgggtcatgccactctgataccatttgttgcctcattagcaagcaaaggatctttatgcagtagatcttgctgccacagctacaacaggccagctcccatacacgaggatgagcgtgcaaactgcattaattgcacataatataacagtagttggaattaacaaaagcataaaaagatagatagtgcacgtatcagcaataccacggtggtagcaataaattaaaataatcctggagagcatgcaattatgtcaagatccacaagtagagtgaactaacctgctggttcttgctgccgatagttgagacatgacaatgtgatatctcccttggaagaaagatggcagtgcattaaaaattagaacaacacacaagagattccatatgctgtttaatgttgctgccagatctcaaacaatgatagacagcgtcagggagctgaactggaaggattctttttgtctaccatccaaatgatgctgtgtatagcacatccactgaataaataggtctcagcacaaagctagacacatcaaaccataagtttcctttccttctcatctattggattcaacacaaagaggcaacatttttagcaacagacatggctttccaccaaagatcaattagcttgccttccaggcctatctccaaagttgaagaggagctgcacagcattgaggcatggatctcttcaccctccctgaccatcgagacaatctctgatggtttcaggaggcttggggacatctacagctccattgaggagatcatgtgcctgcctagcaaccaagtttgctcatccgagcagaggaggttgttggatggagagatggaatgctcccttgagctgctggatctctgcaacgctatgaacgaggtcttcaccgagttgaaggccatcatccaagatctgcaagtgtctctcaggaaaggagatggtgcagttcttcaagccaagatccagtcatacatccgcttggtgaagaaggcaaagaaacactccaagaagactctgacgaaggttgtctcagacaaggaggactgcaggatagtcaagctgttgagcgaggctagggagatcactacctctctatttgagtcaacaacgcacctcttgtcgaagcaaattgctacgccaaaattgtctctcatttctaaggcattccagaagaaaaacccagtgatttgcaatgaggaccagttgcaggtgttagagtgctccatcagagatcttgaggctggagcaggacttctgttcaggagattggtccagagcagggttactctcctcaacattcttagctcatagatgctcctcaagatctgtcactcctaaaacctgcgattggcgtccaccttttaaaggatttgctgatccttaccttgtatatgtcatagatttatagtgtacagaaaaaaagttatacatgaaagaaacagaaattttgatctaattgtgcgctcaatcctcatgatgtgattatgcaacaagatgccaaaagccgttgtgatgaatataatttgcgcaagccggcacatgaattatcaaatatatgtgccgcgttagcaattctactttcatttcttttatattttatagtcaaattgataatgatgtgccatagggctgtgaaatgcccatgtgggccatgtaactctgatgctgtttgttgcctcactagcaagcaaaggatgcatgtactgtggatcttgctgctgcagccgaaacagaccagctccaatacacgaggttaagcgtgtaagcagcatggattgcacttattagaacacaagttgaaactaacaagagcattaataattagataacacgcatgtcaactataatactctggtatcacgctattaaaataatcccttgagagcatgcaattattccaagaaccaccggtagagtgaactaacctgctgattcttgctgccgataattgggacatgacaatgcgatagctcacttggaagatagacggcaatgcattaaaacattgaacaacaaagagacttgcaacagccagatctcaaaaccatgacagacagcatcagggagttgaactgccagtattctatttgtctaccatccaattgatgtagtgtcttgcacatcctctgtataaataggtctaaccacaaagctagacacatcaaaccaagactttcctctccttctcagctctcagactcaacagagagacagagcttagcaacacacatggctttccaccaaagatcagttagcttgcgttccaggcctctctccaaagttgaagaggagctgcacagcgtagaggcatgcatctcttcaccctccctgaccatcgaggcaatctccgatggtctgagggggctcggggacatctactgctcaattgaggagatcatgtgcctgcctagcaaccaagtttgctcaccacagcaaaggaagttgttggatggagagatggaatgctcccttgagctactggatatgtgcaacactatgagcgaggtcttcaccgagttgaaggccatcatccaagatctgcaagtgtctctcagaaaaggagatgatgcagttcttcaagccaagatccagtcatacatccgcttggtgaagaaggcaaagaaacattccaagaagactctgaagaaggttgtctcgaacaaggaggactgcaggatagtcaagctattgagagaggctagagagattactacctctctattcgagtcaactacacacctcttgtcgaagcaaattgctatgcctaaattgtctctcatctccaaggcattccagaagaaaatcccagtgatttgcaatgaggagcagttgcaggtgttagagtgctgcatcagagatcttgaggctggagcagggcttctgttcaggagattggtccaaagcagggttactctcctgaacattcttagctcatagatactcaagatctgtcactcttaataccctgtgattggcatccgccttttaaaggatttgctgatccttccatctgtatatgccatagaatagaattactgtacaggaaaataaaatatacatgaaagagatacaaagttttgatctaattcttgccgtgtgctcaggcttcacatattgctgagatacaagatgtgattacgcaatgtgctgtcagtattattgcctttgggattaatatacaacggacaatccaacaaatgagttatgaaatatatgtgccatgctagtgatattattttcatttcttttgtatttttacagtcaaattaatccatagggatatacatgctatacctctagacatgaggattgcagacaaatacccatagtgtcctagttgtttatatattctattgaagacttttttttttatattcatgtggccatgttacctcacacctgtttaagtccattaattagtgcccaatcagtgtttggtgcattttgcattacattcatgaaacctgccaggcccaacctacatggattaaagcttgcaattagcacagtgactacctgccaatgtccgttgcattatcgcacgacctagcatggtatgcatcctttttattttatttatattttttggacacatatatatgcatcaagttcagaagtattttttttcccctaaaaaaatgtttaaacatagatgagttatggttcaaaataaaatatgtcagacgagtgagaaaactgcacgcagattggagaaatccaaactgccgcaaaatgatttgcaaaaccatgtcgcagatgcttccatggaagcctgaatcacatccactcatgaactcagccatcaacaatagagaagaataaaaatgattcacaaggcattgcggcacacagattacggagaaataaagtggtagatgcatgcatacctcggctggaccccctgggttctggagggtaaacagcggccgcggatttctcccatcgtcctgggggaatccatgggggcggacatcgccgccgccgccgccggtggcgccggagcggactctctctcccctccgccctttctcgccggagccttctccggtggtgggagtctgggagacgagacgagacgagtaggcagtagtaatttcttctgggccgtgggcttacttgtatttgggcctggtgggtttttccggtatctcatattaggcccactacaaaattgggcccaacacaatcaaaatcaaaatgaacatcgctgaataaaaagtgattcaaaattaagggcactggaggatgccccgtgcgttgctgcgggacttggttaacattaatttgttagataggaggtacaatctcaagaagaaacggaagaaacaaatggctttcttggagaaattctttttagcaaccctatccaaattttgtaaataatttaggtagcacattcaaagcataagctacgaagaagcagaatgggcattcggccataaagctcttttatacggattgatgagccggatacatgtagatgtgtgtggagatgggccaatatgtttacgtgggctacatttggtactgagtaggcggagagactcacccgatgcttgatggattgggctctatgctgcgttccatccaacggctgagaagcaatctaacgcattcatccaacggtttacaattgatgatgacgtggaagtatgaggtttgagcttttggtattgactttatagaaagaagggattactaccaaaatcaacttttcctaaattggcaataccaaaactatggtagaataagataaatgtattgttgctaaaattacctatttgataataaactaaatgcaactatatatttgtcaattttattaaacaatccatagactaaatgcaactatatatttatcaattttattaaataatctatagtttaaaatggcatcaatctgaatacactctaatagccaaatttgcctcgctaatactactgcgtatattagctgcttggaattgttcatgacagcttcgaatgcaagctctcaactagagatcgatgaacacacgcgatgcaggatttttgcatccgttgcatcgcggcacagcattgtacgcatcgtccaactagaagatccttgctgccggctggtaattcagccattttttgccgggtcggcgcaagtacaccgaccaaattttattaagacagaaagaatttatagattttacatgatattatactgtcgagtcgggaataacccccaaaaaggataattcagccatagaaaacaccttttattcatctccatcatctctccttatttttttaaaaaaataagtaattattatttatgacgtgacttggcttatcactagattacttaatgtatgacttatattttcatatgtttgtattaaattttaaacaagacgaatgattaagtatatgtttaagagttagcagtttcatccattaaaaacacgtgaaaagcacgaggaagtaactctgaacagtgaacttaactgtatcaggaactttatcctggatgtaagttgtaacagccctgaccgccctatgggcttccctgacaacactcttgcccatgggataacaccttctagaattttcagaacacctaacaccgttttttttttcttttttagataagggtattttttttacccggcatctacatccaaccggatatatacggccattgaaatagggaacttagccccggaaacaacccaatctaaaattcgctccatagaagatttgaactcagaaccttggggtactactcaggtcactgtaaccactaggctacatgccctttcataaagggtgtccaatgtaaggcactcgagtgacaccgcgttcttgaggatataacatgttagctcaatcaagttcttcgcggagctgaaccctgtcatcttcacactcttgaggtagcaatggcggtgttccggcatctgcctcaaaggcgaggaatctccaagaaccgattcatgcttcatatgctcttgtgatacctgataatgataaaagataagtcaaataaagtatacatatccaagagatcagtgatcagatagaggagtatatctttgcaggatggaatgagcgaagagtgccttacattcaagatcaatgtctccaaggaaggagacgcgtcaaggaaagaaacaagagaaaaataatcatacgacgtgttaaaggaggctgctgagctaacggaaatggtgaggtgcttaaggtagaggaattttgtaggcagcattggtgtattgaccacctgcacaatgtatgtcatgtctcaaattaattagaattaataatcctataatatacaactactcttaatatgcataataaaacgcctaatgttttagagatcgatacctcatcattggagtaaatggcaagagtctcaagatttggcataacggatggcagctcggcacgagcataacagacaacctttggatggatcatgcttaatctcttcacttgcaatgggtctccaagtgagagttttacatttccgctgaagcttaaactggaaagatttggagcattgctctctatcactcgcagcctacagcatccagcaaccaccaggcagctcaatttttgcagcacgcaaggtatcttcaggcaaattatctcctcacagttgctgaggttcaactgctccaaagcaatagtagaattggaaagaaagcactccaactcatcctcggtaacatgtacaaaatgcagactcagacttgttagttgttaggtttctcaaggtgccaagttcagctgtggggcgaaaggcacaatagccaagtttaagataccgaattgagcttcgaatcccactggataaaactgagcatgggaaattgtactctgctgtaatactagtacatagcataacaatgagctcttcagtcatcggtgtaacagcaagtttaagccaacggtcgaggcagagaagggaaatgccctctaattgaagcttcaatatcttcacaccagagcctgagcggtttcttagaatgccatcaattatgtcgctggcattcactatatgtgaatgtagtgaatgtacttccgggagaaacacttccctagtcaaggtgagattgggacgacatctccaggaatgaagaaaggcacgagataggcaagcagcacgagcagcatcacgcagtggcattagggaatgtacatggcaccagatgtcctgcatacgagcatatgcgagtagagttcaatgccgaaagagccaaatggttacttggacagtagaaagaaaaacagaagtaccacatggagtaggagggttatattctacccaggtataccttttggcatgattaattgcaagtgatatgcagatttacaagagttgataattaattgatagtgcagtggaatgtatcagaaaggtcagaatttcatgccgccctacgtacctcaggaaggtctggaattgttgctttgacagcttgagaatcatcaccatcttgttgactagagggcaagcccgagcccttttctagtattcattgaagcaatggatccaactgcaacgcaaccaagcacagagacttactcaatatatatatattgataatagttacaataatagtccatatatatcccagaccattatctaaaaatatatatcccagatattgatatggattggaacaaggggaaaaattaagaaggaactcaaggaaacagcaaccgattgagcaaaacgaaagtatcaatcagagggaacccaccgaggggcaaagatactttttttttttttgagaacagatcaactaacccatggttaaaaacgataggcaccagaggggcgaacctatagccccaagttatttttttctgcaaacaaattgcatatgctatcagcataaataatactcaaggttaaggcagagagaaaagctcccagatcaacaagtagagaatgtaatgttatgggaaagagagaaaaatgaggcgctcaccggccggcggcgaggacgccggcgccgctggtcgcgagattggaggtcggcgcaggcggcgggccgaggagtcgaggccgagggagcagcgagtcggaggccaatacaacgtcttgtttgggctttcatggtttgagtccaggacggtgaaaggctcaaacacaaattttgcaggagtttgctctgcgtgtatctgtatttcaattcaagttatgtatatccctttcactaaacaaatataactaacaagtttctgtctttcttattcgcaacatgttttgctgataaattcattcaacgaatgctggtatgtcgtatcaacatgctgattgttcgcctgacaactcgagcctttattttccaagcaccgggaggaggcatgaaattaatgataaaaaaatagctatacaaatttttggtctcttctcttgataacaaacaatatcagcaattcagcacatagttgcgtttagcaatcttgtcaagcccccttgcattccaaattaaaatgaacgtaggattcattggggacattgacagggaggatcacactacaggatacacattcaaattaacacaggcaggtcaggtcagaagatagtccagaatccacaagataagagttgcctgcgacaaggaattgtaggtgttagaactgaacattgttaatctagacaatggaattaagaacctgttcaggaaattgattcaaagtagagtttcactttccgactcctacttcagcttgaaggtagatttgcgagctctaatcccctgtgcttggcacccgcgttttagagaattcgccgatcgttgaaatagtctcccaatgtttatataaacatgagaaaaatgtgtagaaatatactcactgaaaaataaaaacaggattcagtccatcttctattgttgattacactgtctatgcacatgctttagtaccaaaaggtaaaaaacttaatttccttagaagattgatgctcatcaatattgactgtcacaaaaaaaaaaaacagatgacattaaagttcaccttcgaaatgctttaatgtgaaatgggcaaatcgcccatgtcactcagatgacaaatgctgcctcagcagcaagcaacgatcttgctccaccaataaaaataacagggcagctccaacacaagatgttgagcgtgtaagcggcacggattgcacataatacaacacatgttgtaatcaacgagagcacaagaactagaaaaacgcatgtcaacagtaatacttgttagcactctaataagataatcccttgagagcatgcaaatgtgtcaagatcaaccggtagggtgaactaacctgctggttgttgctgccaatagttgggacatgacaatgcgatagcacattgagaagatagatgtcagttcactaaaaaatcgaacagcatacgagtgattccatatgctgctgccagatctcaaaccattgatagacagcatttgggaggtgaactggcaggattctgcttgtctgccatgcaaatgaagctgtgtcttgcacatgatctgtataagtactcctcagcacaaggctagacacaccaaacgaaactttcatttccttctcatcttcttggcctcaacacagaaatacagacctttagcaacaggcatggctttccaccaaagatcaattagcttgccttctaggcctctctccaaagttgaagaggagctgcacagcctagaagcatgcgtctcatcaccgtccatgaccatcgagatgatttctgatgttttgaggaggcttgatgacatctacaactccattgagcagatcatgtgcctgcctagcaaccaaatttgctcatcccagcagaggaagttgttggatggagagatggaatgctccctcgagctactggatatctgcaatgctatgagtgaggtcttcactgagttgaaggccatcatccaagatctgcaagtgtctctcagaaaaggagataatgcagttgccaagatccattcatacatccgcttggtgaagaaggcaaagaaacatttcaagaagactgtgaaggtagcctcagacaaggaagactgcaagattgtaaagcggttgagcaaggctagagagatcactacctctctcctcgagtcaacaatgcacctcttgtcgaagcaaatccagatgccaaaattgtctctcatctccaaggcattccagaagaaaaacccagtgatttgcaatgaggaacagttgcaggtgttaagagtgctgcatcggagatcttgaggctggggctggacttgtgttcaggagattggtccagagcagggttactctcctgaacattcttagctcatagacgctcctcaaaatctgacactctttaagaccgggcgattggcatccaccttttaaaggatttgctaatccttcccatttgtatatatcatagacttactggccagaaaagaaaagatacatgaaagagacagttttgatctagttctttccatgtgctttgtcctcacatatctctgatatacatgatgtgattatgcaagtgatattagtattaatgcctttgggtgatgaatatacatacaaccaagcacatgaattatgaaatatatataccatgttagctttcctattctttcctcaatcaaaccaacccttctcttctccacaggcactcaatccctatttgagacagcaagaaattactttcaaattgatctgtgatgtgccatagggctatgaaaatggccatgtgagtcatgacactctgattccatttgctgcctcggtagcaagcaaaggattcttgtgcagtggatcttgctaccacagctgcaacaggccagctcccatacacaaggttgagagtgcaagcggcattgattgcaaatgatagaacacatattgaaattaacaagagaacaaaaaattaaaaaaaaatacatgtatcatgtatcgacaataccattctggtagcactcaattaaaataatcccttgagagcatgcaattatgtcaagatccacaagtagagtgaactaacctgctggtttatgctgccaatagttgagacatgacaatgtgatgactctcttggaataaagaggcagtgcattaaaaataagaataacatatgagatatttcatatgctgtttattgctgctgccagatctcagaccatgatagacagcatcagggagctgaactggcaggattctgtttgtttaccatccaaatgatgctgtgtctagcacatccactgaataaataggcctcagcacaaagctagacacatcaaagacataagttttcctttccttctcatctgtcgatccaacacagagaggcaacatttttagcaatagacatggctttccaccaaagatcaactagtttaccttctagacctctctccagagttgaagaggagctgcacagcattgaggcatggatctcttcaccctccctgaccatcgagatgatctctcatggtttgaggagccttgtggacatctacagcactattgagaagatcatgtgcctacctagcaaccaagtttgctcatcacagcaaaggaagttgttggatagagagatggaatgctcccttgagctactggatctctgcaatggtatgaatgaggtcttcaccgagttgaaggccatcatccaagatctgcaagtgtctctcagaaaaggagataatgcagctgttcaaaccaagatccagtcatacatccgactggtgaagaaggcgaaaaagcattccaagaagactgtcaagaaggttgtgtcagacaaggaggagtgcaagatagtgaagctgttgagcgaggctagagagatcacaacctctctattcgagtcaacaattcacctcttgtcgaagcaaattgcgatgccaaaattgtctctcatctccaaggcattccagaagaaaaactcagttatctgcaatgaggagcaattgcaggtgttagagtgctgcatcagagatcttgaggctggagctgcgcttctgttcaggagattggtccagagcagggttactctcctgaacaatcttagctcatagatactcctcaagatctgacacacttaagagtttgtgattggcatccaccttttaaaggatttgctgatcctttccaattgtatatgttatacaattactgtacagaaaaaaaatatgcatgaaagagaacagttttgatctaattcttgaattcttgtcgtgcacccaatcctcacatattgctgagatacatgatgtgattatgcaaatcaatgtcaatattactgactctgtgattaatatacattgcacaacccatcacctaaattatgaaatataagtgccacgttagtgatattagtattactcttatttcttttcttttttacagtcaaattgatctatgatgtgcaataaggctatgaaatgtccatgtgggttactgactctgatgccgtttgttgcctcactagcaagcaaaggatccatgtacagtggatcttgcagctgcaggtaaaacaggccagctccaatacacaaggttaagcgtgtatgcagcatggattgcacataatagaacgctagttgaaattaacaagagaattaaaaattagataacactattaaataatcacttgagagcgtgcaattatgccaagagccaccggtagagtgaactaacctgctggttcttgctgccaatagttgagacatgacaatgtgacacctcacttggaagatagatggcagtgcattaaaacaataaataacaaagaggccatatgctacagccagatctcagctgaactgccaggattccgtttgtctaccatccaattgattctatgttttgcacatcctttgtataaataggtctcagcacaaagctagacacatcaaaccaaactttcctctcaactctcagactcaccagagacagagtttagcaatagacatggctttccaccaaagatcaattagcttgccttctaggcctctctccaaagttgaagaggagctgcacagcatagaggcatgcatctcctcaccctccctgaccatcgagacgatctctgatggtttgaggaggcttggggacatctacagctccattgaggagatcatgtgcctgcctagcaaccaagtttgctcatccgagcagaggaggttgttggatggagagatggaatgctcccttgagctactggatctctgcaacgctatgaacgaggtcttcaccgagttgaaggccatcatccaagatctgcaagtgtctctcagaaaaggagatgatgcagttcttcaagccaagatccagtcgtacatccgcttggtgaagaaggcaaagaaacatttcaagactgtgaagaaggttgcctcaaacaaggaggactgcaagatagtcaaactgttgagtgaggctagagagatcactacctctctattccagtcaacagtgcatctcttgtcaaagcaaatcgagatgccaaaattgtccctcatctccagggcattccagaagaaaaacctggtggtttgcaatgaggagcagttgcaggtgttagagtgctgcatcggagatcttgaggctggagcagggcttctgttcaggagattggtccaaagcagggttactctcctgaacattcttagcccatagatacccctcaagatctgtcactcttaagaccctgcgattggcgtccaccttttaaaggatttgctgatccttccatctgtatatgccatagacttactgtacagaaaaaaaatacatgaaagagatacaaagttttgatctaattcttgccatgtgtgctgtcctcacatattactgagaatctgagatacatgatgtgattacccaatgttctgtcagtattactgcctttgttatgaatatacatcgaacaatccgcaaatgaatatgtgccatgttagtgatattgttttcatttcttttctattttacagtcaaattgatctgtgatgggccgtagggatatacatgctctacctctaaacatgaacattacacgaaaatacccacaacatcctagtttgcatattctattgaggccatgtggttatgttacctcacaccggtctaagtccattaattagtcctcattcctcaatcagtgtttggtgcatcttgcactacacacatgaaacatgccaggcccaaactacagagattaaagcttgcaattagcacaatgtattagctgccaaagttcgctgcatgatcgcacgacctagcttggtaagctcttgtgtgtacatccattttatttattcattttggaggactcatatgcatcacattcagaagttttcttaaaaaacaaaaatgtttaaatactataattgtagcgtagacagcataatctgcaattctgcagcaaatatgccggacgagtgggaaaactgcaagcagatttgagaaattcaaagctgcacgaagcgatttcgaaaccatgcgtacgcttatcgctgtggattgctgattcactcatgaactcaggcatcaacagtagaaccaagatgactcacggggcattgcattgcagcacacaggttacaggaaaataaagtggtagatgcatgaatacctcagctgccccccctgggtgctggagactatacagcatgcggccgctccctggggctgccgtcgccgtcgccgtcgccgactcgccagagcgggctctacccctccactctttcttgccttctccggtggtggtgagttgtgggaggcgacgagtaggcagtatctcctgggccccatcagatcaaaagcaaaattaacaaccaattttgcctcaccctcacatacaccacacaacttgcatatgcttacagtagattagatgttttggatgattggatgccccatttcctcgcaggctcgacgatgatttcacaatccaatctgacagtacttgtgcgtgtgttcgtgcaacggttgctgcctgcagcagctgctacatgacagcctcgcatgccaactctcaactagagatcgatgaacacactacacaagcgtgcaggatttatacatctgctcgctggagaggagacagggcagtcatccagtcgtacgccgagcggccaagaaggcacagagacacatcaggaggatcaccggcggtggcagcagcaagcctgcagcttctgaagccagagagatcgccgtcgcagcgctcgaaacagcagcagcaaagctcttgccgaagcagatcgccaccatgtcgagttcaagcaggtggtcccagctcgtctccaagaagaagagagatgcctcctgcgaggagagcagttgcaggtgttggagttggacattgctggtcttaacaacggtgttgaggttctcttcaggagactcatccagagcagggtctcccttctcaacacactgacactggtagatgatgagatagatcatagatcatgcaaacactagctcctttgtgatctgcgtccgccttttagaggatctgctgatcatgaaacaattttgccatgagtacaatgagacaaaatgatgaattgtacagtcattttgagaaaagaattcttgttggtccatgttctcttgtcgattcactgtatgtactttgatgagaactttattccatgcctatgacatcaggcctagtacaagattatgttcacttggcaaagtattttcttttccaagaagtgccactatgaaaacaggatagacgaagatccctttttttagataataatgggataaacgtagattcatgctgacatacacaaacttgatttaccaatagcgtgctgtagaccagcttgtaattagcataaccagtgcccaataaaacaatacttaacaaccattaacacgaatggaaccactaactagtcagcctgcttactccattaaacaagtgttagagcatgcgtgcacacctgtgattgtgaggacccagcaatgaactgccaagctgattctttgtcccaacaactggaacatcacaatgtgataagcctagttaggagcacctaatgcatcggaagaaaattgcacagcatgtggatcatcttgaggttgcaacaaccagatgctaaatgccctggtagagacatgccagcaatgatgcacgggtggtcagaacaagataagcatggcgtgttgcattggaacctggatgggaagtcaaccatagttttttcttccagaaagaatcatcaggcagcagccagcttcatttctctcatcatttaactgcgtgctcacctcgcatcttgatctgaatctgacattaaactaaccactcgtgcagatgagtttgccgctgataattcagacatgacaggcttgttatgctcaaatgtgagagttagaaatgcctcttatattgaggagacataaaaaagcatcagtttgtcttggagatgggtggctttgttgcagcagcacaaccatcaatattgatgagattctttctgttgcttctgtttcttccgttataaatagagacagactatgctgggctttcaccattgagcagtttcttctcttctcttccgtttccagagaaaaaaaaaaggaaacaccacacaccatctatagaaaccatggcatttagatctgcaagcgctccttccagccctcgttctaacaaaaccaatgttgaggaacagcttcagagcttgaaggcaaccatcacttcacccgctgaaaccattgaaacaatgcttgatggtttcagcaggattggagctgtgtacaacaacattgaggagatcatatgcttgccaagcagccaagctcaactttgtcagaatcagcagaggaaagcagtagagcaagagctcgagcattcccttgtgctgctcgacctctgcaactctatccaagagagtgtttccaagctcaagacaagcattcaggagatgcagttggttcacaagagaagggatgctacagttgttcaggccaacatccagtatttcattcgtctgaccaagaaggtgcaaaagcagtccaagaagatcagcaagaagtctgcttcagctgagcaggagggctccagggtgatcaagctgttggccgaagctagagaggtcgccatctcaatgcttgagtcctcttcacatctcttgtcaaagaagatcacaacatcaaattctagcaagtggtcacttgtctccaaggcatttcagaagacaaggcttgcatgccaggaggagcaattacaggcgttggagttcgccatcgttgatctcgagagcggagttgagactttgttcaggagattgatccagatcagagtttctcttctgaatgctctaagcttgtagatagacgatgaaccaactctggctccctctgatctgcatccgccttttataggatctgctgatcatcaaaacaattttccaatgtgtatatgagaggaaatgacaaatgtcaaaatgtacagtacatcagttagtcaaaaggaaaaaaaatattttggcccatgctcagttgtcaatttttactgattttgaagcttgtatgtatgaccatttttcctttccaggaacttatttaacctcacactgaggacggccaaacaatcacctgaattttggggtacttaagctaaagtttattgatagaaaaaaaacttaaattatcaataagatgctcacttttcctggatgttatagaaacaatagtacagaaagtttgaaaaattcctttgaagccagcattctttactagagatgatgagatggccatgctttcctcattcacaggaatattattatacaatatatcttgacatcatgccagctggtaattagcataacctatgcctaataaaccaaccaattaacaattaatagcacacatagagaacccatacgactcgccaagcgtgctccattaaacaagtgttagagcatgcatttttgtcaagggccagcactagagtaagctgccatgctgattcttgatcccaagaactggaacatcacaatgtgatagagctagtcaggagcacctaacgcatcgtataaaaatacgcaccatgtggatcatattgagattgcaacagccagatgctaaatgcactagtaaacatgccagctatgatgcacgggtggtcagagaagataagcacagcatcatgtgttggaacctggaagtgaagccaattagttgtccctcccaccaagaatcatcaaattaaccagctcctttctctcataagatcactggcatgttcaccgatctcactacactgatccggatttgacattaaactactcactcgtgcagatgagtttgccattgatacagcaggcatgacagactgatcatgaactcaaatattagagatagaaatgcatcttataccaaggagacaaaaaaaagcatctgtttgtcatggagatgggtggccttgttgcagcagcacggctttcaatatcaatgagattcttgctgttgcttccactactttcgttataaatacatacaaaccatagcagggtcaacaacattgaaacacggtttctcctgttctcttccatttcttcagaaaaaaaggaagcactgcactatccatagaggccatggcatccatgcttagatctgcaagtgtgccttccagcccttgctccaatgaagccaatgttgaagaacagcttcagagcttgagagcaaccatctcttcaccctctgcaactgtcgaaacaatgcttgatggtttcagcaggattggaggtgtatacaggaacattgaggagatcatgtgctttcccagcagccaagttctcctttgccaaccacagcagaggaaagcagcagagcaagagcttgagcgctctcttatcttgcttgacctctgcaatgccatgcaagagagtttctgtgaactcaaggcaagcatccaggacatgcagttggctatcaagagagccgatgatgccgctgttcaagccaaggtccagtccttcatccgtctgaccaagaaggcacaaaagcagtcgaagaagattagcaagaagtctgcttcagatgatcaggagggatgcagggtgctcaagctgtcagctgaagctagagaggttgcaatttcaatggttgagtcctcgttgcatctcttgttgaagcagattgtgatgccgaattctagcaggtggtctcttgtatccaaggctttccagaaggcaaggattgcatgccaggaggagcaattgcaggcgctggagttggacatcagtgatctcgagagcggagttgagactttattcaggagattgatccagagcagagtttctcttctgaatgctctgagcttgtagatgatacaccaactcttgttctttgtgatccgcgtccatcttttagaggatttgctgatcatcaaaacaattttgagaagtgtatatacacaataggtactgacaaaatgtacaagaatactgaaaagaaaaaaaattatctatgttcagttgtcaactttactgtcttagctttctgcatgaccataaatcccttccagaaaatcttatttatcctcacttagaatggccaaactatcacttgtattttggagttcttatgttaaagttcacttagaggtaaaaacataacttataaacaagatgctcaccattactggttgttgtagaaataatagtacagaaagtttgaaatttccttctgaagctgcaccctttcctataaaataatgagatggttgtgcttttctcatccacaggaagtttatagtacagtccatcttgctgtcatgactaatagcacactagcagataattagcataattgtccaataaaccaactatctaacagttaatataacacatcgaacccataccactttcccagcattctccattaaacaaatggtagctcatgcatttatgtgaatgcgcagcactagagtaagctgacatgctgattcttgatcccatgaactgaaacatcacaatgtgatcggcctagttaggagcacctaatgcataacagaaaattgcacagcatgtggatcatcttgagattgcaacagccagatgttaaatgcactagaagaaacatgccagcgatgatacacgggtgatcagcacaaggtgaagtcaactagttcttccttacaccaagaatcatcaatcagctccttatctcatcatttcactgcatactcacagatctcaatacatcaatctggatttgacattaaactactcactcgtgcagaagagcttgtcattgacaatgcagacatgacaggctgatcatgaactcaaatattaagagtgcaccgaagggacataaaaaaacatctctttgtcatggagatgggtagctttgtaccagctgcatagctttcattatggatgagattcttgctgttgcttctatttcttcacttataaatagagagaaaccatagctgagtttacaccattgagcaaggtttcttctcttctcttccgtttccagaaaaaaagggaggtgctacaacatccatagaagccatggcatccatgctcagatctgcaagtgtgccttccagcccttgctccaattaaagcaatgttgaagaacagcttcagagcttgaaggcaaccatctcttcaccctctgcaactgtcgaaacaatgcttgatggtttcagcagaattggaggagagtacaacaacattgaagagatcatgtgctttcccagcagccaagttttcctttggcagccacagcagaggaaagcagcagagcaagagcttgagcgctctcttgtcttgcttgacctctgcaatgccatgcaagagagtatttctgaactcaaggcaagcatccaggacatgcagttggctatcaagagagctgatgatgccactgttcaagccaaggtccagtctttaatccgtctgagcaagaaggcacaaaagcagtcgaagaagattagcaagaagtctgcttcagatgatcaggagggatgcagggtgctcaagctgtcagctgaagctagagaggttgcaatctcaatgcttgagtcctcattgcatctcttgttgaagcagattgtgatgccgaattctagcaggtggtctcttgtatccaaggctttccagaaggcaaggattgcatgccaggaggagcaattgctggcgctggagttggacatcagtgatattgagagcagagttgagactttgttcaggagattgatccagaacagagtttctcttctgaatgctctgagcttgtagatgatacaccaactcctgttccctttgatccgcgtccgccttttagaggatctgctgatcatcaaaacaattttgtgtatatagagtatatatgatagaaaatgacaaaatgtacaggaaatcatcaatcgaaaagaaaagtttttagtccatgctcagttgtctattttactgttatttgaaccttaaatgcatgctcacgactcctttccagaaactgctctgtttcacctcactgaggacagccaagcaaaaccatgaatttttagagttctgaaatttaatattatttataaaatacataattttctatcagatgctcactgttgatcgatgttatagaaaacaacgatacataaagtccaaagtttttcttttaagtctgcactcttcactatgaaacaatgggatgataatttatttcttctttttccaataacaagcgaatttttgtgtttgctaagaaatgaaatacatacaatggttagtacaggattgagatccgagttgtgcaaaaataagcatatcaaagggactgcaggcaaagttggaggaaatcacagcagcagatatcaagtgaccaagacataaaagcaacaatagtaggttgttatatcaggattgtttatgtggtggtttttgttgtcctgatgtcaaactggagattccagtcttttgcttttacctgtatgctgtaagacttatgttcgctttctaagttaagctgggttgatctgttgatatatggtctaaaaaatatcagaaagtttctcggcgacctactcctgccattctccattggcatgcttttctcatgcacatcaaggtttttttatacagtagatcttgctgtcatgactaatagcatgccagccggtaattagcacaacctgtgcctgaaaaaccaactacttaaaaaattaataacaagcatagaaccatactactagctagcattctcagttaaacaaatattagaatacacatggatgtgaaatcctgcactagaataagctgccatgataattcttgataccaaaaaatgaaacatgaaaaggtgatatggctagttaggagtgcttaatgcatcaatagaaaatcgaacagcatgtggaccaacatgagaaacataccagcgtccagaacagataagcatgtgtgtcacgttggaggcttggagcttggagatgaagtcaattagctgttccttccaccagaaaacatcaccagctcctttctcgccatttcagtgcatgcttgtcaatctcaccacatgtccacattgatctggatctggcattaaactaatcactcatgcagatgagattgctgctgacggttcctacatcacaggttaatcacaagaaaaaacatcaacttgtcgaggagatgggtgccattgttgcagaagaacaaccttcattattgacaagatcctttctgttgcaatgcttatttcgttatagataagagataaaccgtaggcaggtctacaccattgcaaaacagtttctctactctttctctcccattatcagcaaaaggagagcattgtggcttcagctaaaaccatggcattccacctcagatctgcaagcatgtcttcaagtcctcgctccggagaaaccaacattgaaaaatagatgcagagctcgatggtgatcatctcttcaccctctgcaactgtcgaaacaatcttcagtgacctcaagatgattgaatgagtgtacaaaaaatattgaggtaatcgtgcataccaagcaaccaattcatctttcatcagaatcagaaaaggaaagccatggagcaagagctcgaggattcccttgtgctcctcgatcttttgcaaagccatccaagagatttttttctgagctcaagacaagcattaagaagatgcaaaaaaatccaatcgttcatccatttgaccaagaaggcgcgaaagaaatacaagaagttcaggaagaagtatgcttcagctggctaggggagctgcagggtgaagctagagaggtttatatctcaatgattgagtccttattgcatctcccatcaaagcaaattgagataccaacttctagcaagtagtttttgtctccaagacattgcaaaagaaaagagttttatgcaacgaggaaccactatagacataggagttgaacattattgatcaggaggttgttccagagcaaagtttcacttttcaatgctctaagcttgtagatagattataccaattcttatcccagatgattagttcccagcttttataggatttgctgataatcatgtgtaaatgaaaaggaattgtacagaaatttactcaatgagaaacaaaaaaaaaaatcatttaatttcctgctatttatttaactgtttaagcatgctttgatgcatagcaacgtatgggaccagatcattcagataaaattcaaaagtaatataataatttactcagatggtgatattattattgactgttatagaagtaattagcagtttagcacacgtgtgcagtggatctagttatccatagctaacaagtcagctccaagcctccaatgcacgaggttgagggcgcaagcagcatgtaatttgcagtataaagtacctctgataatatcagttatacaacaactaaatagcaagcatgatgccaataatacgctgtttaaactccattaaaaaaaacgttttgtgcatgcaatcatgtcaagatccactaacagagtgagctaacctgccgattcttgctgctaatagtagggacatcacaatgtgatagctcatttggaagataaatggcagtgtattaaacaattgaacagcacaccaaagattccatatgttgttgccagatctcaaacaatgatagacagcatctgggagctcaactggcaggattctgtttgtctaccatacaaaggatgctgtgtcttgcacaccaactgaataaataggcctcaccacaaagctagacacatcaaaccagaacttccctttccttctcatctcttggatccaacacaaagagttaagagttctagcaacagacatggctttccaccaaagatcaattagcttgccttcaaggcctctctccaaggttgaagatgagttgcacagcatagaggcatacgtctcatcaccctccaagaccaccaagatgatctctgatggtttgaggaggcttggtgacacatatagctccattgaggagaccatgtgcctgcctagcaaccaagtttgctcatcacagcaaaggaagttgtttgacagagagatggaatactcccttgagctactggatctctgcaacactatgaacgaggtcttcaccgagttgaagtccatcatccaagatctgcaagtgtctctcagaaaaggagatgatgcagttgttcaagccaagatccagtcatacatccggctggtgaagaaggcaaagaagcattccaagaagactgtgaagaaggttgcctcagacaaggaggactccaagatggtcaagctgttgagcaatgctagagagatcactacctctctattcgagtcaacattggacctcttgtctaagcaaattgcgatgccaaaattctctctcatctccaaggcattccagaagaaaaatgcggtgatctgcaatgaggagcagttgcaggtgttagagtgctgcatcgcagatcttgaggcaggagcaggactgctgttcaggagattggtccagaccagggttactctcctcaacattcttggctcatagatactcctcaatatgtgacactcttaagaccctgcgattggcatccgtattttaaaggatttgctgatccttcccatttgtatttattataggcttactgtacagaaaagaaaacatacatgaaagagacaaagttttgatctaactcttgttgtgcactcggttcagacatatctctgagatacatgatgtgattatgcaagcgatattagtattattgccttgttatcgaatacacatagcaacggctcatgaattatgaaacatatgttccacacaagcaaaattattttcttttcttttttgcagtcaaattgatctgtgatgtgccatagggccatgaaatggccatatgggctgtgtcactctgataccatttgtagcctcactagcaagcaaaggatccatgtatagtggatcttgctgctgcagttagaataggccagctccaatacacgaggttaagcatgtgagcagcaggtattgtacataatagagcacttgtagcaagcaaaggatccgtgtgcagtggatcttgctgccacagctaaaacagtccagctaccatacatgaggttgagcgtgcaagtaccactgattgcacaaaatagaacacatgttgaaattaacaagagcataaaaaaagataaaacacatataaaaaataccactctggaagcaatcaattaaaataatgccttgagtgcatgcaattatgtagagtgaactaacctgctgtttcttcctgccaacagttgagacatgacaatgtgataagtccttggaaggtagatggcagtatattaaagtattgaacatacgagagatcccatatgctgtttattgctgctgccagacctccacccattgtggacagcatcaggaagctgaactggcaggattctgtttgtctaccaaccagatgatgctttttcttgcacatcaactgaataaataggcctcagcacaaagctagactcatcaaaccataagttacatttcctcctcatctcttggtttcaacacaaagaggtagagttctagcaacagacatggctttccaccaaagatcaattagcttgccttcaaggcctctctccaaggttgaagatgagttgcacagcatagaggcatgtgtctcatcaccctccaagaccatcgagatgatctctgatggtttgaggaggcttggtgatatatatagctccattgaggagatcatgtgcctacctagcaaccaagtttgctcatcacagcaaaggaagttgtttgacagagagatggaatgctcccttgagctactagatctctgcaacgctatgaacgaggtcttcaccgagttgaagtccatcatccaagatctgcaagtgtctctcagaaaaggagatgatgcagttgttcaagccaagatcctgtcatacatccggctggtgaagaaggcaaagaagcattccaagaagactgtgaagaaggttgcctcagacatggaggactccaagaaggtcaagctgttgagcaacgctagacagatcactacctctctatttgaatcaacactggacctcttgtcaaagcaaattgtgttgccaaaattgtctctcatctccaaggcgttccagaagaagaactcggtgatctgcaatgaggagcagttgcaggcattagagtgctgcatcggagatcttgaggctggagcagtacttctgttcaggagattggtccagagcagggttactctcctcaacattcttagctcatagatgagtcaagatctgacactcttaagaccctgcgatcggcatctgtcttttaaaggatttgctgatccttcccatttgtatatgttataggctcactgtacagaaaagaaaacacacatgaaagagacaaaattttgatctaattcttgccctgcactcagtcctgacatatctctgagatacatgatgtgattatgcaagcgatatcaatattattgcctttgtgattaatatactttgcatgacaagggcatggcacatgaattatgaaatatatgtaacgatattactttgatttcttttctttttacagtcaaattgatctatggtataccatggggcaatgaaatggccaagtgggtcatgtcactacgatgacatttgttgcctcactagcaagcaaaggatccatgtaaagtggatcttgctgctgcagctaaaacaagccaactacaatacatgagattaagcgtgcaggcagcatggatctagctgcagcagctaaaacacgccagctaccaaacacgggactaagcgtgcaagagcctctgattgcacataatagaacaatcagttgttaacaagagcataaaaaatagataacacatgtaataacaataacactgttgtagcaatcaattaaaataatcccttgagagcatgcaattatgccaaaaaccacaggtagagctaactaacctgttggttcttgctgctgatagttgagacatgacaatgtgataactctcttggaagatagatgccagtacattaaaaatgagaacagaacacgagagattccatatgctgtttattgctgctgccagatctcataccatgatagacagcatcagggagctgaactggaatgattctgtttgtctaccaaccaaatggtgctgtgtctagcacatcccctgaataaataggcctcagcacaaagctagacacatcataccatcagtttcctttccttctcatctcttggattcagcacaaagaggcagagctagcaacagacatggctttccaccaaagatcaattagcttgccttctaggcctctctccaaagttgaagatgagttgcacagcatagaggcatgcatctcatcaccctccacgaccatcgaggtggtctctgatggtttgaggcggcttggggacatctacagctccattgtggagatcatgtgcctgcctagcaaccaaatttgctcatcccaacagaggaggttgttggatggagaaatggaatgctcccttcagctactggatctctgcaactctatgagtgaggtcttcaccgagttgaaggtcatcatccaagatctgcaagtacatctcagaaaaggagatggtgcagttgttcaagccaagatccagtcattcatccgcttgatgaagaacgcgaagaagcattccaagaagactgtgaagaaggttgtctcagacaacgactgcaggatagtgaagctgatgagcgaggctagagagatcactacctcactattcgagtcaatattgtacctcttgtcaaagcaaattacaatgccaaaatcatctctcatccccaaggcattccagaagaaaaacctggtgatttgcaatgaggagcagttgcaggcattagagtgctgcatcggagatcttgaggctggagcaggacttctgttcaggagattgatccagaccagggttactctcctcaacattcttagctcatagatactcctcaagatctgacactcttaagaccctgcgattggcatccgtcttttaaaggatttgctgatccttcccatttgtatatgttataggcttactgtacagcaaagaaaatacatgaaaagagacaaagttttgatccaattcttgtcgtgcacttgatcctcgcgtgttgcagagttacatgatgggttatgcaattcaatgtcaatataattgccatggcatatgacttatgaaatatatgggcaagttagcgatattactttcatttcttttatttcttacaggcaaattgatatatgatgcgccatagggctatgaaaaatggccatgtgggtcatgccagtctgatgccgtttgttgcctcactagcaagcaactgatccatgtaaagtggatcttgctgctgcaggtaaaacaggccagctccaatacacaaggttaagcgtgtaagcggcatggattgtacacaatagaacacttgttgaaattaacaaaagcattaaaaaatagataacacacttggcaataataatactctggtaacactttattaaaataatcccttgataacatgcaataatgccaaaatccaccggtagactgaacaaacctgctggcttttgctgccaatagttgggacatgacaatgtgatagctgacttggaagatagacgcagtgcattaaaatattgagcatacaagactatatgctgcagccagatctcaaaccatgatagatagcatcgggaggtgaactggcaggattctgtttgtctaccatccaattgatgctgtgtgttgcacatctctgtataaataggcctcagcacaaagctagaaacatcaaaccaaaacttccctctctttctcatctctcagactcaatagggagacagagttctagcgacagaaatggctttccgccagagatcaattagtttgccttctaggcctcactctaaggttgaagaggagctgtgcatcctagatgcatgcatctcttcaccctccacgacccttgatacaatgtgtgagggtttgaggaggcttgccaacatctatagctctattgaggagatcatgtgccttcctagcaaccaagctttctcctcccaacgaagaaaattgttggatggagaaatggaatgctcccttgagctattggatctatgcaacgtgatgcatgaggacttcacagagttgaaggccatcattcaagatatgcaagtggccctgagaaaaggagatgatgcagctgttcaatccaagacccaatcatactaccgcttgttgaagaaggcaaagaaacatttcaagactgcaaagaaggttacttatgaaaaggaggattgcaggatggccaggctattgagggaggctagagatatatcaacctctatgctggagtccacactgcatctcctgtcaaagcaaatcgaaatgcccaaacaatcacttgtttccaaggcattcaacaagaagaaagtagttatttgcgaggaggagcaattgcaggtgttagagtgcagcatcagagatcttgagagcggagcaggacatctgttcaggaaattggtccagagcagagtttctctcctcaacattcttagctcatagatactccagaatcttcactcgacacccagcgattggcatccgccttttaaaggatctgctgatctttcacattgtatatatataagtagaaatgtacagaaaactccatacataatagtgaacaaaagttttggccaaactcagtgtcatgaaaatccttgcatgcttctgatttcaacctctatgcgattatccatgtcagtactgttgcccttgtgcagttgtgctttgctccgaacatagtctgcaaaagaaaagacagcatgtgatctgtgaaatacgtgcggaattatttgatgacgccaacaaaaaaaaaatgttcgatgaatgcagaatcacaaggaattatccattggccctgaacattcgcttgtctactcaggtctcaacaggatggccgcgaaggattcggctgggaacgcaaggcattgcgaagataccgcagataccgtgtgctattgagttagggttagtgggatacctccgccagaactgatggagacctccgcgatcttgtcgggggctgccttccagggcgggggtagcggcgggaagggtggtcgcggcctcaccggcagccggcggcgagcggcgcatctcctcgctcctcttcttcttctccggtggggggtggtggcgagtggtgagacgaagacacgtggattggggaacgagtggggtactgagtggattcatgggcttcctgtgggccggatggtctcgctatccttcagtttggcccatgaaactacattgccaacaacaattctttttctgtaaaaatttgaacaactctgcatagttagaaaactatttatatcttgtagtatactcttatatagggtctgtttagattggtgtcgaaataaactttaccaaaattttagcaaattgtcaacattgccaaagttttggtagaattggcttattaatgttgccaaaattatatacacattgtcaatatttggtaacaaactaaacgtagctacataattgtcaattttaccaaataatgctatggttggaaatgtcatcaatctgaacatgcccatagatatggttgaaggggtggagtcatttgcagccccattgtttctcttattcatatgcttatccgaatcgcttatttttaaggaaaattgttatatacgtgtccttagcgatttaaaaacaaatgttgtgaaataaactacgatgaaaaaaacaaacaaatcaaattcaaaatttagttctaaaattcaaattttataatcataagtcaaacaatactccctccgtttcacaatgtaagttattctagcatttctcacattcatattgatgttaatgaatctagatagatatatgtctagattcattagtatcaatatgaatgtaggaaatgctagaatgacttacattgtgaaacggaggaagtaagacatttgaagtcggcgcggctataaatatagatttttctttctttttgcattgtaaagcgcttctttttttcatgttcagaattaagggtttacttaagtacatcattaatcaagtcttaaaagcaaatgcaggaaacaattaataattttgttcctatcatttgatttattattaaatatacttttatgtatacatatagttttacacatttcacaaaagtttttaaataagacgaacggtcaaacatgtttaaaaaagtcaacggtatcaaacatttaggggaaaaaacatttagggaaaaggagggagtagatcaaaatagcgtactaatgttcctgaacgaacgcgaggacaagcgagttggtttgcaacttcgcattatcgcatattagacgcccttgtggattatttgcggacgattaataaaaaaaaagttagcaaacatgacagcccgataagcttagttattgttcaacacacggatcatctcgagattgaggtgaaacaaaccagccatgcgcacgaaggcaattatggatggaatcatcgtgtagtaatacagaaagcgtaagccaaccaaatacactgcgatatctgcttccaacggacagatagatgggagcgtatcctatgcacacagaccctcgcatgtacacaccgtgtacagcaactaaaaattatcacaaaaaattaatacatgtactttcaatagtattacatctacgtgcaaagtcacatcttcaaattcattctacatagagaataacaaaaaagataaaattctgacaaaattgcaaccttaaaacaatcagattttttgtttttttgttacggctaaaatataatgaatttaacgttaagattttaaccctaggtgtaatacaattgaaagtatgtgtatgattttttctaaattttttattgacattttttagttggtgtgcacgtgtgtacacgtgagggcctgtgtgtataggatatgtttccaagatagatatgcacacgaggcaaagtcaaactctttgcacggttgcaacagcaaccacagctcatctcttctcactgcattgcattggcattgcttgctcatcacagatctcacacgatctggacctggcattaaactgaagtttcacgcgctcgtgcagatgagtgtttgtctccagtttcaggtgagacatgacagctagtcatctactagtattatctcacaagttcattcaatcagtagagatgctgcctcttgcatcgagcaaagcatataatgatagagattaaagaaacagaaacctgttgcttctgtagttctgttgcagcacaagtgatcgtcaattatcaatgagattctttctgtctgctggtccagcaatgagacctgcttctccttccttggttatatatacagagaagccatggtttggtgtcgacaacattgcgaagcagtcttgagttatctcctcttctcttccaattccagagagaaacaagtcatcagcttccatcccagccatggcattccacctcagatccgcgagtgcgccttccagccctcgctctgccaaaaccgacgtcgaagaacagctgcagagcctcgaggagatcgtctcctcaccctctgcaacaattgaaacaatgtgcaatggtttcaggagacttacagatgtgtacagctgcatggatgagatgatgtgcttgcccagcttcaggcttcagcagaggagagctgtggagcaagagctggagcggtctctcgccttgcttgacctctgcaacgccatgcaagagagcttctctgagctcaaggcgagcacccaggagatgcagttggccatcaagaggggtgatgatgcagcagttcagtccaaggttcaggcttacacccgcctgaccaagaaggcgcagaaacagttcaagaagatcaacaagaagtctgcttcagaagaccaggagggttgcagggtggtcaagctgctggctgatgccagagagatcgctctctcggtgcttgaatcaactttgcacctcctgtcaaagcagattgcgatgccaagtcaaagcaagtggtctcttgtctccaaggcattccagaagacaagggttacatgccaggaggagcaattacaggcgttggagttggacatcgttgatcttgagagcggagttgagactttgttcaggagattgatccagagcagagtttctcttttgaatgctcttagcttgtagatagatcatacaccaactctgatcccctgtgattggcgtccgccttttagaggatttgctgatcattgaaacaatttttggatgtatagtagtgtacataaatgagaggaaatgtacagaattcactcgaatgaaaaacaaaggatttttccttctgtcttatttcactgtcttacttcccttttcccctcaatcgacatggatggcaggtgaacaatcatctatcattttgaatacttcagctgaagcttgttcaagagggcacatagcaatttaatcagaattttcttcatctatcttggttgttataataaagaaattagtataattgcactgttcaaatattttattcgcaaagcttttaccgtgagatggacacgtcattgctattcacatgagatgtgcctcaagaacaggcgcaagacccttcttcaatggatattgccatgcatataattgatagcagcatgacagattgccagttagccggctgatatagttcttgataaattgttccgcaagaagatggtggatattgccatgcatataattgatagcagcatgacagattgccagttagccggctgatatagttcttgataaattgttccgcaagaagatggagtagcacagatggcaagttggaaacaacacaactcgattagcattctccattaaagaagtgctgcagcatgcatgtatgacaaggctctgcactatgactacgagttagctgccatgctgattcctgctggcaataacacactatgatatctgcgaccagcaacagatgacacatgatgtcaagtcaactcctcctttgcacggttgcaacagcaaaaacagctcatctcctctcactgcactgcattgctttactcaccaatctcacgatatggatctgatattaaactaaactgacacgctcgtgcagatgagtttgtctccagtttctggccagcgaggcatgatagccacctcaatgcaagctcaattagagaagagatgctttgtgcattgagcaaagcatacaaatattaaagaaacagaaacctgtcgtgcagatggtggcttctgttgcagcacaaggcttcgccaattattagagagattctttctgtctgctggtccagtaatgagactgcttctccctccttcgttatatatagagaagccatggtttgctgttgacaacattgcaaagcagtctgttctcttccatttctagagagaaacgagtcatcagcttccatcccaaccatggtattccacctcagatccgcgagcgtgccttccagcccttgctccaatgaaaccaacatcgaagaacagctggcgagcctcagggagatcatctgttcaccctctgcaaccatggaaacaatgtgcaatggtttcaggaggcttacagatgtgtacagctgcatggatgagatcatgtgcttgcccagcagccaagctagcctttgcaagcatcagcagaggagagaagtggagaaagagctggagcggtctctcaccttgcttgacctctgcaacgccatgcaagagagcttctctgagctcaaggcaaccacccaggagatgcagttggccatcaagagaggagaagatgcagcagttcagaccaatgttcagtcttacacccgcctgaccaagaaggcacataaacagtgcaagaagatcaacaagaagcctgctagttcagctgatcaggagagctgcagggtggtcaagctgatggctgatgccagagagatcactttctcagtgcttgaatcaactttgcatctcctgtcaaagcagattgcggtgccgagttccagcaagtggtctcttaaggcattccagaagacaagggttacatgccaggaggagcaattacaggtgttggagttggacatcgttgatcttcagagcggagttgagactttgttcaggagattgatccagagcagagtttctcttttgaatgctcttagcttgtagatagatcatacaccaactctaatcccctgtgattggcatccgccttttcgaggatttgctgatcattgaatcaattttgtcatgtgtacataaatgagaggaaatgtacagaaatttatgcgattgaaaaacaaaggatttattccttttgtttaatttcactgtcttccttttccccctcattccacatggatgtcaactgaacaatcacctgacattttgagttcttcagatgaaacttgttcacgaaaggaaatagtaacttaataagaattttcttcatcgatcttggctgttataatatagagatcagtagtaatgcagagttcaaatattagatttacaaagctttaccgtgagatgcccatgtaattactattcacatgtgacgtgcctcaagtacaggcacaagatccttctgcagtggatcttgccttgcatatagcaccatgacagattgccagctcgtacggttgttgataaattattctgcaatcagatgggcagcacagatggcaagttgcaataacactactcgattagcaatctccattggataaatgctggagcttgcacgtatgacaaaggctcaacgctagagtaagctgccatgctgattcctgctgccaataactggaacatgacattgtgattcagttaggcggcctaattgaccagaaatttggacagcacgtggaatcatcttgagattgcaacagatgctaaatgctgtgagcacagcaggcaagccagtgatgcaatgctgcaagatcagtgagcagattctaccagataagaaacacggtttggagcctggagagagaagtcaactgctgctcctgtgagcaaggctcatccttctcatgatctggatctgaatattacattagactatacacttgtgcaggtgaacttgccgccaataatcaggacatgacagcattgtaagctgagctagagatgcctctacacttggttgggaaacataaaaaaacatcagcctgtcgaggagatgggtggcgtctgttgcagcagcaaagcacttcattattattgagatttcattgttgtctacacggtgagggatgccattgcttctgcctctttgtctatatagaggaaagctatagccgggtcgacaccattgcagcacagcattcttctcatcttcacttccacagagaagagaaaaaggataagcttccactgcagccatggcattccacctcagatctgcgagtgtgccatccagcccttgctccaatgaaaccaacgctgaagaactgctgcagagtctaaaggtgaccatttcctcacccagttcaaccatcgagacgatgagcagtggctggaagaagcttgggagtatctacaactgcatcgatgagatcatgtgtctgcccagcagccaagctctcctttgccaaccactgcagaggaaagcagtggagcaagagttagaaggctctctcgtcgtgctagacctctgcaacgccattcacgagagcttttccgggctcaaggcatgcatccaggacatgcagctggctgtcaagagaggagatgatgcagctgtccaagccaagatacagtcttacatccgcctcgccaagaaggggcgaaaacagttcaagcatatcagcaagaagtcttcttcagcagatcaggagagctgcagggtgatcaagctgttggctgaagctagagagatagctctgtcaatgctcgagtcgtcatcacatctcctgtcgaagcagattgctttgccatgctctagcaaatggtctcttgtctccaagacattccagaaaagaaggcttgtctgcgaggaggagcaattgcaggtgttggagttagacattgttgatctagagactggagtcgagaatctgttcagaaaatcaatccagagcagagtttctcttctcaacattctcagcttgtagatagatcatacaccaactctgattccatgcgattagtatccgccttttagaggatttgctgatcactggaacaaaattttgatgtgtacatatatgaaaggaattgtacagaaactcagttgagaaacaaaaacaaagtatttgtccacttcctattgttgattacactgtttatgaatgtttgatataaatacctaattttctaacaatatgctcatcattattgactgttagagaagcagttagcagaattttcaagttcagcttcgaaatgatttactatgatacggcctcgctattcagatgctatgtgctaactcaacaagaagcaaaggatccttgagcagtggatcttgctaccagagctaagacaagccagctccaatgcacgaggttgaatgtgtgagcggcatggattgcacataataaaacaatatttaaattagcaagcacactaaaaactagaagacacacctatcaccaacaatactcagtaccactcccttaaagtaacatcttgaaaacgcaataatgtcaagatccaccaatagagtgaactaaccttctgattcttgcttccaatagttggaacatgacaatgtgatagttcattgggaggatatgtagtgcactaatatatgcagctacacatgagtgacagaatagattctatatgctgctaccagatctcagaccttgatagacagcatctgggagatgaactggagggattctacttgtctgtaaaccaaacgatgctgtcccgtgcagttcctctgtataaataggccttggcagaaggccaaacacatcaaaccaaagcttggactctccttcccatctcctcagccacaacacaacaagaattacatcaacagatatggcttgccaccaaagatcaattagcttgccttctaggactcactccaaagttgaagaagagcttcacatcgtagaggcatccatctcttcaacctcgatgaccattgagatcctctccgatggtttaaagaggcttgaggatatctacagctctgttgagggcatcatgtgcctgcctagcaaccaaatttgctcatcccagcaaaggaagttgttggatggagaaatggaatgctcccttgagctactggatctctgcaatgctatgcatgaggtgtttgctgagttgaaggccatcatccaagatatgcaagtatctcttagaaaaggagatgatgcagttgttcaagctaagatccagtcatacattcgcttgatgaagaaggcaaaaaagcatttcaagaagactgtgaagaaggttacctcagacaaggaggatgacaagatggtcaagctcttgagcaaggctagagagatcacaacctctgtacttgagtcatcaatggacctcttatcgaagcaaatcgcaacaccaaaaatgtctatcatctccaaggcattcctgaagaaaaactcagttgtttgcagtgaggaacagttgcaggtgttagagtgctgcatcggagatcttgaggctggggctggacttgtgttcaggagattggtccagagcagggttactctccttaacattcttagctcatagatactcctctgtcattcttgatagcatgtgatcggtatccgccttttaaaggatttgccgatccttcccatttgtatatgtagtgtacagaaatgttcatacatgaagagacaaaagttttgatctaatttgtgttgtgcattcaatgttcacatactactgaggttcacaatgtcattattccatgagatgtctgcactattgcctttctagtgaaaaaaacaaaatgttggcatagttcatgttgccaatttactatgacagaaccaccaatctcactaatatcaaaatggtatcatatatatacgtgaagtcaacaaatatgcaggacatttgaacagatgaaaatacatcaatagaaaaagtatatccgtgcttcagtaacaaaagtatattttttgtcttatgagaaaatacattttggtgcatctatctgggatggtagtgcagattttttttttcagggatagagattaagcttagttatctgatttacaaatagtagtgttgtttcaacaactcataatgattgtgatttgtacactgatacactccttatgaggtggatctggcctatataggaaatatgccagctccagccgcaaggtctaaaatagaagtaaacaccagagttggtctgatatgtgccaatcataaaggggaaaagaaatcaaactttaacccccacccccacccccacccccaggtaataagcaaaacattcatttggaatataaaatgtgcggtacactatttgaggctagaaagctttgctgcttatggctcctttgaggatttgaaattgatctgttgcaacacaaatctaggacattaacacacaaaatttatggtattaagtagcaagattgtatttatcactggatgtcatggcctcatttgtttcctcttcataggtaagccaggtaggccttctccaaaggtccaaggaaatttcatgtgcatctctttctttaattgttatgcaatttttattgtttgtcatagtacagattaaaaacaataattcatctttagtctatcccaagataatacaatacattctggttcactagtcatgctaaaacgcgtgattatagaaaagcagaagctgactgtgaattcatgaatttaggtctgatctacacaaactccaggtctttgatagttgaatagttgagatcctatatacatgacctgatagttcaatagttgggattctgtagacataacctaatagcatgcacttcttgcacataccacaacaacagatatacaagaaaatttgtattcactcatctgtgttttgaagcacagatctgcatcagaaaatatatccataggtttgtagatatccttcttgtcaaaagaatatgtcagtttgcttggactgtgccttgagatccttcaatttttttaaaatgttagtgaagtaatcttgcaaatacttctctaaggtgagaatatcctttgaatctaccccaagaagctggtatgtatcattcattggaactgagaaaattgtgtcactggagaggacctgaattataacaattaaatactagttattaattttcataagccttgacaattttataattactgaaaaatcaagtgcactatttagataagtctagagtgtaacctctgagaatgccagtctgtcagccacatcatttgtccactggaagaaccgtgtcaactgacgagtaaatctcaacactgcaacagggacagtagtaacgttggcatcttggccagccaaccgctcacacagtgtaatcacctgagtaaaaaaacaatacaatagttgagtaaatgatagtattccaactctcagaagccatcatttggtacattctgacattgaaaacgaaattaagagcaggaaatacaagattagtactcccatctcttgaagaattcatgacattttggacaacaatatagtctccacatgcaactttgacctttacatttatatgaatatgcttgtgaacataaattagtatattgcaattttttccattgaacacgcagaagagctctgtgctatttcattaagaataaataatatagtactacaaggggagggttaggggttaaaagcccttcctatccccaaaatataccacataaacacacacacacactggaaaactaaaacagatgcgccacagaaaattccagcaaaaattttcatgacaggctttcatggaagccaaatatgtacatatgacaagcctaataccatttgatatgttggtggacaaagataaggaagttcagctgcacattttgcaaaacgacatatatttctgacagagggagtatatttccagtcaagaataaacatgctgtgcaatttattcatggaaaccaaatatgtatttacatccttaaaaaaagaattgacgtcattagaacagtgtacagtatactacctcttgagttgtccaggcacgtggtccggcaaaagttaagagcttcttgctagccttctcattccgcatggcaataaacgtcagtcgagcaacgtcctacaatcacacgagggatgttgtatcaaaggaagggactttgaagagataatgttacaaataggtcacatattcatctttcaatggagaaggagaaagataaacctgggtatccatgtaagcaatccgggtaggagcatcagttccccatactgacttctcttctagtatgggcacagcatattgcccaattaggccctactcagaccaacatttgacagaattcgtttcaggaaacaattaactacccttgtttatattcgaaaacaaatcaatttcctggccaaatatatagaaccccacagaaggaacacatttacctgcatgaaaccacacaaacggatgatgagataatccagaccggcatcctgaataaacttctctgtacaatgcttgatttccatcaagggaacctccgggtgcttgtcacagttatgaatagagtagaacacatacttttgaattcccatggccttagcacattgtattagagcaacctttccttcccaatctacctaaatagaacaactattagcaaaacggaaaccaaattcactcaacgactctacagcatatatgtcacaggactcacagtataaggactacatcacaattacgtgatatattaaaagcaatgtgattagctttagtcacgactcaacaatagtgcaaatacacttcagcaagaatcaacttcaggacaggaatacagaagtatcacattatgcttaaagaaatgctaacaacataccgtccgaatgggctcttcgggacgccctgtagcacaatcgatgacggtatgaataccaacaagcgtcgcgggaatggtctctggcttgctgagatcggcctaaatcagcaaacagaaatgggcatgaggcggataaacattgaacagtgaggttgatatagcagcaaggaaaacagtggaaacctacattgaccacagtggcgccccagtcgcggaggaaatcggccggcgccgggcggggcctgacgaggcagcgcacgtcgtagccctcgtccagcgcccgcctgaccacctgccgtcccagcgtcccggtggcgccgaccaccaggatgctggtcggcctgacgggcgtgccctgcgcaatgctggtcgggaccgccgtctgcgcgttgcaggtcaccaccagcctgcagcctggagaaccccccaaacttcgtttacctcacacgatcatccgcaactgcaggcgaggggaaggcggaaacgggataggtattgtacctttgggcggtgcgcggaggagggggtggtggtggtggcgcggccgcgcggtagcggaccgggagagggcggcgcggcgggcgggggaggcgagctgcgagggcagcgcggcgaggctggtcgacgacgccatttgcgcgcgcgagagagagagcgtggagaagtggcggcgtgggtcgtcggggttgggtttttggttggggggagaggcgggcgaggagtggcggagaggggatgcggagtagccgatggccgtcgcgccacgtctaccgccatcccgtcatccgttctgtccacgtcaccctcctgtttcctctgtctctcttttttttttcttcaccgcagacgtggactctgtgcaggaatgctaattggcgcgcacgcgccggcccacacggcccaatagacggcaagacacggttattttttttttccgaatttttccatatatgtgtaaactttcaacccagatttgaatacttttaactctaacttgaaaactttcaacttcaacttgaaatctttcaacttcgacttgaaaactttcaactcatatttgaaaactttcaactcagatttaaaaaattttaacttgagattcaaaaacttttaactcagattcgaaaactttcaactcgagatttaaaaactttcaattacagatttgaaaatttttaagttaagatttgaaaaaatatgaaaactttcgactcagatttaaaaactttcaactcaaaattcgaaaacttttgactccgattcgaaaactttcaactcaaatttgaaaacttacaactcagattcaaaaactttcaactcgagatttgaatactttcaaatcaaatttaaaaattttcaagttaagatttaaaaactttcaactcaaaacattttataaaaaaataagtgtgctaaagattaaaaaaagtaataagaaagaaaacgaaaaaaaccgaaaacaatcgcaaaagaaaaagaaaaaacaaatcgcgaaaaaaaagggctgatgggccttaggccgggagcagctggtgcgcgcgccaactagcaacccccgactctgggctggtttggtttgtggcctaaattaggcttaccaatttttggcaatttcaatagtgtttagtgtctatttggtttgaagccaaattttggcatgcctaagaaaataggccatttcaatagtgaacttaggctattttggcttcaatccaaacacaactttgccttaccaaaattagtcatgccaaaacttgccaaattttggtactaataaaatttggtaaggcctatttagaccacaaaccaaaccaaccctctgcttccttttttttaaccgtttttatacggaatacgtggacaaacagtttacagttagacggagtcattagagcacccgcgatggtaaagtaaagtgttctctataaaacatgtacatctcagcaatatactagattaatagtaaaccacctcaatagtatgtctacatgggtatctatagctctctcatgcattgcctcgtttttctctatagactatctctatgttagtagatagcttcgctctctctctcttcatttaatatcttccaagtagaaaaatatgctgacatggatctcttgtagagagcttatagataatcattgcgggtgccttagtatccaagtaatatacaggtggctatattacatttgcgatgacaaaattaatgagttagagaagaaatgggtgaagggagagtgagtaggtcacttaaataatcatcggtttctacagcactcaaagacacttaaaggctagataaaacgcatcaggtcagcttttattgacccatgtgatgtagagatactgagatagtggtgacatcattgcacaaacaacaatattgcctcctttgggacaacaaacatgagagtgtatgcatcacgccaagagttacccaatgttgtacattgtttgttctgtttttcatggttgtcatcaacaatgttctcatttgtagcgggtccatgtcagtaaccgtgcataggcgcgcgcgcttgaattggcaatagaatagtcgctcgcttctctctctctagtccttctcttcttacataagcaggctattatcttgcttactctaaagtgacggtgcttgatatagagtagtggtggtactctgtttttagactttgcaataatactctctgtcaataatgatcagcggcggagctagggcccggcgaccctgggcacttgcccgggcttcggcgccgcaagcatcatttgattagtgctaatttatggtgcttagccacggcatgaagcagtataagcacactatttggttgggacacttaataacgtgtataagtattagagaacatacttagccacagcatacaataactagcatgctgcatgcagtagtataagtacgttttaataatctgttagacataatcatctagggtataacctgaagcaccagaattatttactagctagattgttgtacccattacttgagtgtaagctattagacatctgcaacctgaaagcaaagtaaattttctagcaccattataatttttctcttttcgggataataaattactaagtcccatagcctgcaaaaacacaaccatgttttcctctaaattagaatagataaaaaagttgttgtatggtacacaatctatgaagttatgtgtgatttgttatatatccgttggcgtaacaggctcacacaaatttctagatccgcattggcactgataatgattctggacgtcgtccactcgttctaaccttgagaaagcccggactcctctcacctgctgctttcttctcataaagaacaagtgctgaaattttgagaaggaaatgtgtgacacctcgaaaatcgaaataattgatggaaaaaagttttgaaaagctagagctagcaagctgttggccgatatatctttgatggtcgatggctgttgggtttgtgggcttgtgctaggcgtcccagctactcaggctgtaaggggtttccggcctatgtgcggcccatattgcatgggccgcaagtccggaacggactgtaacttccttgcgggcccacactaggcgatcgtagatgggccgggccgtattggggagccgaatcctatttgaacggcctacctacctttcccaacgctcacgtctaaccaaatcttttccgcttcgcatacgtagaaaacgtaaaccattgaccatatcggacacggtctcaagaagttcgtttccatgtgtacgaaacgtattctttttctcgataagaagtgtagaaggcgccaggtcgccgtagtctcgctcgtctccgtgcattccgcgatctccgtgcccgtcgaccaccgtggtgctcgccggcgacggacggagcgagaatgcagggcggatctagcggcatcgtctacggcggcctcaagtaccaggcaagccttctcgaaccttctagaacagtctcccgtaggggggcgcccctcacccttgcaccccactcttgcaggcgcggtgcatcgccgacgtgcgcgcggccgccgggtcgaccaccttcctcgccggaaccctcagtctcaaggaggagaacgaggtgcgtctcctggaggagggggggagggctctccgccccaactcgtcttcttccatcgactctggctctgccctgtgtgttgcagcaattcgagcaattgtagaagagaacgttgtgattggatctctaactcgttgttgctgccaagtaggtgcacctgatccggttttcaccggcggagagcgagctggtgtgcgacgggctgttctaccatccaaacgagatctgggaccttaagtcttgccccttcgatcatagggtcttctccacagtctacacgtctggtaaagaaagaattcccctctttgttactctctttctgccggtgcattgggcatttcatctagttgtaaatttctaaaaatttctttatgttatgatatggatggaaggcgagggctatggtgcatctgtttggaagatcccggagctgcacgggcagtcgaattcgccgccacttgagcagcttttcacgcttgatgagcacacgggcaaaataagatggtgcgcgctcttgtttctgttgatgttctgtgctcgcttgttctggtgccgtttagtcttattgctgtagagtattttgccgcttgttgattttatacatactggtaagtagtaaccagagtctagttgaagaatgcaactgtatgctgatgatttgcaaagcccaaaaagggtctcttattttggggattagtcgactcacaaaaacgatgactgtgattttaccaatgctactttatgaagcacattgtcatgagaaggttatacaccatatagggttcagcggatatttcaagttttcctagcataccttacttgtttacaacacatagctacaattcgaaggccaaagcaacataagaattaattttggctcgtccgaggttctctatagggagcacacaatagatgaaattttaatatttttatttaccaataccattttttgatctaaagttttagataagttatgacctttcttcacagtcttataacaatgtataagctcctttaatacattgttatttctggtggataccatgctcagactgtatctgtaagctggcttatctttgcagtgttctctggtggccactagggaagcacgacaagttaattagtattgatgacagaaatattttcctctggaatatagatgcatcaaataagtcagccaaggtgtgcccagcatccttctgttttaccaatagtacatcgacataattacgtgatattacattgtttctaagcattatcttcgcacttcagtgtcaactttatggaaacttacagttctgtatctctgttagcagaagttctgaacttaatcttgtcctaacttgaattcctaagttacaggtgatgcaaaaggggtctgctgacatgcttcccaatttacgtggtggatcttgggatccacacgatcacaattcaattgctgcaattactgattcctcacttcactgctgggatctccgttctatgaagttaataccttcacaatcttgacatattagatttgttgatctagtgtctgtggtttagatgctgaaatgttccacttatatctttatctgtgaacttgttcttttcaggaaatcaaatgcaattgagcatgcgcattttcgggatgtggattataaccccaagaaacagcacttaattgtgagtggtgatacttgccgtacttcatttcaagtgtttcagatcaagccatagttcgtttgcttaagtcatggttatgaattagtactgaagagaaaaacactgttgtattacttccgttttctttgttacctgtcaacttcgtttcgtctttgttttgattaaggatcctgcagagattatttttcttacattagtaggtactgtgtggtatcagctgtgccgctacttgctagccgttacttcttttattgttcaatgaaactaaacactcggatttgattgtgttatctagctgaatcattgaaccctatttcagaggttgttgaatcagacaattgtgcaattaacggttatagtgataggtactgtttatttttattcagtttaatttatttatggttccaataaaagatcctttatgcattgtagacaacagcagaagatgaatttggtatccgtttgtgggatctcagaatgcttaagtatcctctgaagaatctccctgggcattcgcattggtatatttctatatcctgttttactcagattagaatcctttcgattcaatgtttagttagtcgacccttgtgaattttgcaggacatgggctgttcggcacaatcctgagcatgaccagttgattctggtctctccctctctctctatttcttcaagtggtttgcatattgtgatgtactgttttattgtgtactgactacattgtaactcctgtagagtgctggaacagattcaactgtcaatttgtggtttgctaaagttggcactgatgactcaggacctgaaaggtttctattccttgtgtattttcttgtttggttactttgtttgttataatcttgatgcccacattcttgcttatcagtcctcctggttcacccacaagagaagaagaaccattactaaattcatacactgattatgaagatagcatatacggtaccctcaggaattcctacctgtgtttataattctacgttataattttgacaaggaatcacacagcgtattaaaaaattgtaggtattgcatggagctcccatgatccgtcattatttgcttctttatcttatgacggaagggtaagtacctgcagcatttgtatgcttatttgaaatatttgtcttgtgattttttaaagccagtttatctgatatctgaatcttgactctaatgatctgtgataatttcctctaatggtcaggttgttttagaatcagtcaagccctacttgcagagaaaatgaagctgcatgttctctccgttgtaagggcacataactccacttctttgctcggtatgttgttgatgcgattaccaatagtaccttctcttgttctaacagaccttcccttttctgctcaagcagacttgtttgttgtgcatattattggtgttgtagattttctccttgccatcctatatactgtactctggtacatggagttgatgcgatggcctgattcgacagcttgtgaccccagaacaatagcaagccaataatgtttcagtaaccatcttggcagaaatccagtgtctcatatgatctgccactcttgtgattcaggccagctgtaattgcaaaattcagcctggtacaattgccaaatactgctcctcgagtgattcttgaatgtcatatatctgagaaaggttggtgtcaattgttgcgttatgtggtgaagtacaaccgatctgaattttgtagaactgttgagattgacaagatctgagcttctgtttttcattcgatttttcactgtatgagtggttcccttactttagcaaagattaatatttcgtctgtatgttacaaaatcattcagggaatgagcaaattaacttcaaattgttttgggcatgagccacctacgaacttgtcatgcgttcaggacggcaggctcacatgctttcagcatttctttttcgcgaagattttgtcgacagtttctttttaaatcatatgtgttcgctgataccccctccgtttcaaaatatttgactccgttgatttttttagcacatgtttgaccgttcgtcttattaaaaaaatttgtgaaatatgtaaaactatatgtatatatgaaagtatatttaacaataaatcaaatgatatgaaaataataaataattacttaatttttttaataagacgaatggtcaaacacgtactaaaaaatcattttgaaacgaagggataaatttgttttagaaaatgatcaaccttttttaatgaaaaaaaacaaatcaacattttgcttgttttttttagtctggtcccatctgtcgccaaaatcctgaacggattgggattcggtgacatcaaatgagaatgtcacgggagaatgtcaccgaatccctcggtgtcacgggagaatgtcaccaaatcccaatccaacccgaacacacgcagacattcacgtttcctccatgtgtcatcaatgatggtagagaaattcgtgcttcaattactccattaaagggcaagttttaaccggaggattacagaaaaatttcgaccaatttgtactagctaatgtgaatacatctcctttacaaatgtacacaaaagtctcaattcctacagaaatcgacaataaatacctgtatccttttttagatgaaatatcttgtattcaaattgcatcgtttaatcgttacagttatatgtgctatgaaaaaaggaaaagaatttgaaaattagtacaaaatttgcaatacggaaatccagtttaatttaatactgcactgccgtacactggaacagtatcaccttctcgaaagttcaaacccactcatcgaaattccacaagtctcccatgtcgccgccgtctcggcgaccaccccaccaccaccgccgccgctgccgtcgcggcactacctccctagcctagcctgagatctccgggctccggaggatggcccagcctcgacggcgcggcggcggaggccacaacaagtgcccgcgcccggccctgctgccggcggcggcgctcctgctcttcctcctcgccgccgtcgcgctgctctacgtctccccgccgccgctcatcgatcacccggccctcgcttcctctcgccgccgctcccctcatgcccccctggtggtgttgcactagtaccccttcctacctgctccccacgcttatcccgatctaatttgtcttgctctgtgcattccgagtgcagctgaacagctccggcggcggaagcacggtggtgtccgagcacagcgagatttcgcgcgttccgataagcgtaagcttctttggttagattaagcgaactaattcctcgattaattgtcagaggttgcgtggttgtgctgttcagaaattagtagatacagtgcacttattccagttctagtgcctaactaattgtttctgggaaatggttgttttaattggtagataatgattcaggttccattccctgtgccatttttgaagcaaattagatgatggcaagctattaaattgagctcttttctattatatttacggagttagattaggatgttctagagtattttctaacttgttatcatgggtttatttatttcctttgaaacacaacttgttctcatgggttttctagatgtgatcctctgagatttgagttaaactgattttatttaatgcgctcaagagtcaagacactccctattttgaaatatagacccatgaaatatgtactcattttgctccatttttgtctaaagtagcatgaaaacttcattgcaatttctcatactgcagaaagaggcagatggcctttggggttctaagtttgcgagcagattctatgggtgcagcaactcaagcagcaggttccttggtgcgcattatttttccactgacggttaaaatttgctcgaactgagtagtgttttagatttgtagtgtgcatgtttctgaggcattctacatataggaggttttagtggcagtggtactattctttgttgtatggattacctgaaatagtcaatgttttaaattgtgcaggttcaagtgttatcacgcaaccagaccgttatttgatgatcgttacaagtggaggcctcaatcaacagagaacaggggtaatatatgtgccacactgttccgtatcaaatactgtgatgcgtgtggatggataggaaaaagaataaaagaaatcagtttgcaaatgtacatgaagaatcaacttgtacacatagattttatgtgatccattatgacaccatgttccatgtaactccgtggtagttatgtgtattctgttgttccatatgcataactatgaccatcttctgcttttcagataattgatgctgttgttgctgcacgtatcttaaatgccacacttgttgttcccaaattggatcaaacatctttctggaaagatgcaaggttaatttgagtattgagcgcttcctaccctaatattctaaggctgcccatgtttctatgaacacttacatttgtatgtgtactgtttctctgcagcaatttctctgaaatttttgacgtcgactggttcatctcgaatctatcaaaggatgtaaagattgtgaaagagcttccagagataggaggcaaactgcggactcctcatagaatgcgtgtgccccgaaaatgtactcagagatgttatgtgaaccgtgtgttgcctgcacttcttaagaaacatgtaagtcattgctagcagcatataatcccaagatacttttaaattatgtgctaattcaccgtcttgatgatatgaatttttgagatcaggaatagaaatttcatattcttggtaggtcaattgactgtactttcgttccactgactgaccattgaccaccttgtgtgacttcaaataaatttacttcttctgttcagagacactcataataccaataccaggataccttatatcattactttcacgtagtgcaggttgttcggctgacgaaatttgattatagactagcaaacaggttggacacagatctgcagaagctgagatgcagagtaaactatcatgggttgagatttactggcctaatagaagaaatgggtgaaaaattaatacaaagaatgagagagagaagcaaacattttattgctcttcatttaaggtacacgcatctcaagttctggtgcttgagctctcatattttggttttcctttaatacaaaactagagagtcttatattcttagtgctgtatttgtgaagaacatagtttctttttctcaggggattacttgaaacccattttaggtcataaggggggcaattttcatctctagcttggattagcaaatgttgggctccttagcatgtttcttttatcatgaataccccagttgagcatagcctggatttgagagggaggatgcacaaaataggatgcatgcacaaaatagtgaagggtgatatctaaaagttgtcaaccaatactgtccaaagtagcctttgtgcgggcacatactcatactagtagaacatatatatggagttccgaatggcatgtcaaaagagggtcctcctgtgctccatctatgtattgagaagattggtctcagatcttatcgataatatcagtcaatcacttgttggtcatgctagtaaagagagaaggccatcatatagcatgctcttgtcaggagaagttcagtttagtggattggctgtgacctttgcttcagaatagaccaccatcttggtctgaagttgtactggtttctgattttcttgtatgagtaatataagtatgttgtctatttagtttgtagtggtttccttttttttccttttccctaaacagtctttctcttgggttgccagatttgaacctgatatgcttgcattttcggggtgctattatggtggtggagaaaaagaaagaaaagagcttggtgcaatacggaagagatggaaaaccttgcatgtacgtatggcatatcattatagtgtattagtacgtacttaaaatggcatatatccttgaccgaactacctactgcaacctcttctttgtttaggctatcaaccctgagaaaggaagaaggcaaggtagatgcccattgactcctgaagaggtggggctgatgttgagggcactgggctacagaaatgatgttcacatttatgttgcatctggagagatatatggcggggcaaggacattagcacccctcaaagcgttcttcccaaatctccacacgaaagaaacaatatcaagcaaagaggagctggctccattctctaaatactcatctcgcatggctgcacttgattttattgtatgtgatggaagtgatgcttttgtgactaacaacaatggtaacatggctaaaattttggctgggcgaaggtatacttctcttctgctactggaagctccctgctgtcatcatgtacttcgttattagttctgaccatctatactgcttttgataggagatattttgggcataagagaacgatccggccaaatgctaaaaggctctattccttaatttcgaacagaagaaacatgtcatgggattcattctcctcaagagtgcgcatggttcagaaaggatttatgggagagcccaaggaactcaggccaggaaggggagaatttcatgagaacccttctacctgtatatgtgaaaaaaccgttagcaaaacagtagccaaatctaactcccaatctgagcaagtcttaagtaatgatactgagagaggaatagccattcaaactgagcaagtctcgagtaatgatactgagatgggaatagccactagtgagcccacagttcctgatcatactgatgaagaggcaggtgaatccgaggcagatgaagatgctcctggagagaaagaggagataattgatcctgaagcggatgatgatgtgcagttcagactagaggatccagagttagaagggattctttcagattagttgagttgtcgatgcttcaccaaccaatttttttggtgagcaattgaggaattttgcccctctaacgcctaaactgtacataacttggtttgctctgtcaatgtacatctctaggctagttcatagtgacatttttctgtagttcactcactcacagtgtcacgccggcggttgatctcttagaagctttgagtttgtagtacttgtggtttgcattgatatagcctgtagcatatgctcttgtacctgttattcaactcctttttgtggtgtctaaaatggatgttctattttgacctgtttgcagcaaatgcaactgagcagctttgtttgaaaccagtgaggtcttcttttaactgtatcaaatttatctgtgttgatttcaacctttcatgctatcaactgaattacaatgatacccgcctacctggatcaagtaaaggagtaaagctttgcaaaaagttaccagtttgcaaggaacataactcctgtccgacactaattctcaacattataccactaagtgctgtatttgtgacaaatttgtgctcttgaacattccctggagagagatcggatctgttggtgggtcgtcatcaatgaaaaagaagagtgacaacacctccaaatctaactgaatggaactgccatattactcttgctattgatgaatttgcaggcgttcttcgggatatcgtatggttttgttgttactgaactaacttttctggagtctgtaacctccatggacgtaaataaccggccaaacaaacagaggttagttcaacagttctcttccctctccctgttttaactcattttcttactgccctgtttgatttctgcaattgcagataactgtgcttctcacttgtgatcttttcccctaggtgattcttgctcacttttgctcttgcctattgttgcatcaagccctccacgagcatctcatctttctactttcaaggatcagtttttttttttacctcccctctgcaattctctgaatctgacgacggagaacgcaattttcttgcaagcagcacatggcaggatagggaacccaaaacttttcatagctggagtacagttcttgattcactatgcaactatccctttctaggaattaggcaattaggtccccgtgaatatctcactagccttgatgcttggtacagtagagagtacagtaggaatcctagctgaagagatgtatcagctgagctcccatcacatgatcactgtgctgaactacctcccctgttccccatacaatctctgatgctttggatttcgctgctcgtgccggtgttcttccgttccaaggacaagaggccaaacgctttcccccaatgcctgccaatatctctatgcttgctccaatgaaagtcttctcttcctgtcgttttctcttttctgaacttgtgttttctcttcctctctgcctcacgggactactagatggtgacacttgggatgctgtggctatcggcatgttccacgtgtcaatgccacagagttcggacatacaccaactagttcatcatctagtagactagtactagtgtcagattctaatgttggcgtactaatctgtgttaaaactcaccttttctcattgatttgaatttttcataagtataggaatacataggacacgattttatgcttttgttttgagctgaaagcctctaaataataagccctttgcatcaaacacccctttttatttgaaggtttgcagcgaacagcttccactgaagaagttgccagatggtggcaaggcacatacttcactcaaaagctccaacaagctgttagttaattaggtcaaatcagttgctgaccccactaaatataagcaaagaaatcaattcttgaagcagtagttatctttgacaccttccttttgctgcaggtctcacctctcaacaagtcaagcctctgaagcttttgatcccttcacctcgcactcgcagcagcagcaggctgtactgaccaaccaccaagaagtatcggcgccattgctgtcctcctccttggcttgaactcaactcaactccagtgcaggcacatgcttgctttccaaaccaagggataaccactcatctaatcaagccaactccacaagcagctggccatccactgattgatcaatccatccatccatcagcttgctcatggggaaacttaggtactactgctgcttctgcattcttctttcttctgttgctactgctgcatctgcactgcatggccatgtccactccacacacttggccggcattgccagtcattgctatactatatatgctgctggtttcctggtttggtggtctcatgctcatgcatgcacacgtccatctgtgttgaattctgaagctgcaagaacctattgccgtgctgcatgggccatccaccggcgacctcaccggccggcgccaccgccggcgtcagcgttaaggtcagcgaccgatatgtaagtgtgctgctgctggtcagctctgcctgcgcatgttcgatcgattcattgttgacatgattgattgaatgattgattggttggcccgcgttgcaccattgcatgcgcatgcaggttgagattaaaaatggcatatttgagcttacgctgtccaaccccgacgggatcgtgaccggcgtccggtataatggtgtggacaacttgatggagattcttaacaaagaagacaacagagggtgcctactgacaattttgcttacgctttttatcctctctttgatatgtttaattagcaagtacaatagtttggtactacttggatcttgccacatcctacaagtgtacatttgttaattgttattcagctactttgccaatttaaaactaaagaagaaaccttttagtcctcattcaagtacaggctgcaactgaggttatggtcaatgtactcatatggtgttgcatgttgtcaggtactgggaccttgtttggagtaaactgggagaaagaactggcatatttgatgtgtaagggctctcaattcactcggatttcaggaatcgcctccatatgattacactttttgtgctagagagagcccaggtgtatctgacattgaacgttgttacgcagaataaaagggacagagttccgaatcatatatcaggatgaaaaccatgcagaggtctcgttcgttagaacatgggatccttctctggaaggcaaagctgttcccttgaacattgataagaggtgatccaatagcacaggcataacaatggaattgttctcagcaattcatttggaaaaaaggcaatcatgtttaacagagcaagtaatttttgaaatattttgacagcgcaagtatgtttgtacaggttcattgtactccggggctgctcaggattctatacctatggaatctatgagcatcaggaagggtggcctggttttagcctgggagagaccagggtggccttcaagcttcggaaagacaagttgttctagttcctgaatttaagttttcttttttttttttgcagtttgctgaattatgctacatcttacactgaatgtctgaatccattactttggtgcaaattcaggtttcattacatggcattagctgacgacaggcagagaataatgccgatgcctgaagaccgagtgccgccccggggacagcaattagcataccctgaagctgtccttcttgtggacccaataaatcctgacctaagaggagaggtaagttgacaaatataggattttttttatctatgataaacgtattatatcatgaagaatctaaacactgttactggtaaattgtcaaggttgatgataaataccaatactcctgtgaagaccagtataacaatgtccatggatggatatcattcgatcctccaattggcttctggcagatcactccgagtgacgagttccgaacaggaggtcccgtcaagcagaacttgacctctcatgttgggccaactatgctggctgtaagttcagacattgtattatattgaaataaaaagttcagattattaagttcagacattcttctgaaaccctttttttaaaatatgtttttcagatgtttcttagcggtcattatgctggggatgaccttacacccaagttcttgactggtgaatactggaaaaaggtccatgggcctgtcttcatgtaccttaactccagttgggatggaagtgacccaactctactctgggaggatgcaaaagttcaggtgaaaaattggatgcatatttcgtctctaatttgatatctttcttttattcacaaaagttcaggtgataacattcaggttgattcttattgacagtacaagtgttatgaacacggcacaagtaacttgtaatttaactctctctttctccttttgaaatcagatgatgattgagaaagagagctggccgtactgttttgcactgtcagatgattttcagaagactgagcaaagaggttgtatctctggtagattactcgtccgagacaggtagtaattaatgacatctttttccagttttatacaacagtagtaactaaaagaagtttgattcagtccagatgtaatttagttcgcgatacatctattactaatgaattcatcatgtgttatttaggtatttagatgatgcagatctttatgctacatcagcttatgtaggcttagctctaccaggagatgttggatcctggcaaagagagtgcaaggtgatgcatgctatatacacacttattcttttagaacaagcttgaatacatgttagactatgaagtatattatcaatcacatattccaacaccgtgacccggcaaaaaaaaatatatattccaacactgtagggataccaattctggtgtagggcagaagatgatggaagcttttgcataagaaacattgtagctggagactacaacctttatgcatgggttccaggatttataggggactacaaactggatgctaagctaaccatatcttcaggtcagtatctacctgacatttattcctcttgcagcttccaatgagatatcctgatatgttcagcactcctgttcaggggatgacatttatctgggtgaccttgtgtatgaaccaccaagagacggtcccacgatgtgggagatcggaatacctgatcgatccgcctctgaattctttgttccagaccctaatcccaactatgtgaataggttgtatatcaaccatcctgacaggtgatgcagactggctaccaacagacttctcaaacatgtagtaaccaagtgatcatcatttcttatcatatagtgttcttatcgttcgttacagatttaggcagtatggactttgggaaagatatgcagagctgtatccagacggtgatctggtatacacaattggccagagcgactataccaccgattggttctttgctcaagtaaacaggtgatgttttcatctcatttgaatacaactgattgcgcagagttacatgatctgcttctaacatctgtgtccactgcagaagaactgatcagagcacctaccagccaaccacatggcaaataaagttcaatcttgacagtgtcagtcctaacagcacatacaaattcagagtggctcttgcatcatccgcaaatgccgagttgcaggttatttcagaaaaaaaaaacacaaaaatacttagattggccaatgtccattcctatttcattatttgttatcatcattcaagaagttgatcctaaatacacaaaatgcttgtattttcaggttcgtttcaacgatcaggacagaactgctcctcacttcacaactgggttgattgggaaagacaacacgattgcgaggcacgggatccatgggctgtactggctgttcaacatcgatgtgagtggagcttggcttgttcaagggatgaacaccatctacctgaagcagcccaggaaccagagtccatttcagggactgatgtatgactacctgagaatggaaggtccttctggcagctaaggccagtctttagctagtttaaccagcctcacctgtatggctagtatagctgtactatgcctaggtatgcagtacgattatgacccagatattcccatccactaatattctatttagtgtgctttaaagtttaatcttattttaccaaaaaaaatcctgggttttgtctaaccccggatttagcttatctgatttaggttagctggtaaagatgtaagctgccgaaatttcgcagagcatcagaattcagaaaacgattagatatactctaaatcggtgatatgtattggaaaaagaaataacatttccctgctgttttaactctagtgtaacaatttgaaataatctaaattggtgccatgctcttgtttctcagaattaaggtttgcagcaaacagctttcactggagaagttgccagatggtggcaagacacattcttcactcaaaagtcaaaagctccaacaagctgttagttaattaggtcaaatcggttgccaaccccactaactattagcaaagaaatcaattcttgaagcagtagctatctttggcaccttccttttgctgcaggtctcccctctcaacaagtcaagcccctgaagcttttgatcccttcacctcgtactcgcagcagcagcaggctgtactgactactgaccaaccaccagtttcggcgccattgctgtcctcctccttggcttgaactcaactcatcgatcaactccagtgcaggcacatgccaattgctttccaaaccaagggataaccagtcatctaagcaaagctgatgatggattgatcaatcagtggattgccagctgcttgcggagttggaggatgtggtggtgcttgattagggcatggaaaaccaagggataaccactcatctaatcaaagctgatggatggattgatcaatcagtgcattgtcagctgcttgtggagttttggaggatgtggtggtgcttgattagggggagtggattttgatctctcgagagggatgtcccctcgttgtttgtatgtcactcaaatggttatgaaaaagctctaaaaaaattgagaagatgtattaacatgtgatattactccatgaacatgctagttcaaattcaacttctacatctcgcaacgaaaaacaaatttgactgtgaatatacgttaactagctgtagtttaattatttttttttgttgcgagatgtagaagttgaatttgaacttgcatgtttgtggagtgatatatcacatgttgcattttttttaattttttttcataactatttgaatgatatgcaaacaacgaggggatatccccttgaatgatcaaaatagtttccccaggattagggcatggaaaaccaagggataaccactcatctaagcaaagctgatggatggattgatcaatcagtggattgccacttgccagctgcttgtggagttggaggatgtggtacggtggtcactcctacggaacacatttttgcatactggcaaaactgattttcgcatgcggttgctctagccgcatgtgtgaaaaggtttgcgaaaatcggtatttttgcatgtggccagcgcaatctcatgcgaaaatacgattttcgcacgggcacttaagccgaccacatgcaaaaaaaaataatcgccccgccgccgcctgagatcgtcgcagccgccgccaccgctcctgtcgtcgccgtcgccgtcaccagccgccggtagaaccgtcccgcccggatccgccgcctgagaccgccgccgccaccaccgccatcatctgtgccggatcctccggtcgagaccgccgtcgcgatctccgccacgctccagatccgccgcccaccgtcgtcatcgccgtcacatccaccgcccccaccgcacgaggtaggatcctgtagctggatctgccttcgtcgtccggatctgccgctcgccgtcattgtcgttgagggtgccgtcggatccgccacccgccatcgttgtcgtcatcggcactgttggatccgccccccacctccctccgtcgtcgccggtgccagatccatgtggggagggcctgctcccggtcgccgccgtcgttgccggtgctagatccacgcgagcccgctcctcctccggccatcaagcccgccgccgccacccaccccactccacaccgctctcggagtctcggttgctcttgccgtcgaggtgacaaggagagagagagagaggattgagaggagaggaggagaagataagtatcgacgtttgaggtctcgactacggtatttgcatggtgtggagatcgtcggtgtaccagggtatatgcgagactgaagtgaaagaaatggagacaaggatttttatacaggtaataaccctactcctattgaccaaagccggtgttgctctttattcatctggatcacacaagtacaatatttgggataacctatctagctgtcatcgacttggcggcatagataaccaacatgtagtcgacgacaagatagtcttcctcctcgagtacgaactcatcgagatcagagatggcgctagatcccttttgtcggcctccgcaggcaccatattgggtctgtctaggcttatctctgatgtcgatgtctgccggcgtgttggtttgtgtgtcgatctatcgtgtcctctctcccctagtgtcagggttatggataccacatacataatagtagtcgactaaatctcggcaggacccaccacataccatgtcttatacgggaacaatcttcggatataggaggagttctacataaggaaggatgaatagagttctacatgaaaatgacaaggactactcggattgtatccatattggtttccctagttctacttggacaaggggacacctatgggtataaatacaaggccccctaggaggaaaggggacacgaacaacatagacgccacaaagccacatgccaatataagcctacatacgccaagacaagctggcagatatcgatatcagagataagcctaggcaaatcccatatggtacctacgggaaccaaagagaggaatctagcgctatctctgatctcatcgggcacggattcgaggaggaagactaccctgttgtcgactacgtgatgatacttcagtccgccaagtcgacaacagttagataggctaccccaaatattgtactggtgtgattatggtgaataagagcaacgaccggcttcggctaataggagtagggttattacctgacaattcaggggcccgaacctgtataaaaatcatcgtctccatctcttttacctcaatctcgcatatatcctagtactaacgatccccataccatgcaaataccggaatcgcggcatcaaacgtcgacacctagggtgtcttgtatttatacccatagatgtcccattgtccacgtaggaatagagagaccaatatggatacaatccgcgtaatccttatcgtttccatatagaactctactcgtccttccttatccggaactccttctatatatgaggcatgattctgtataggacttggtatatggtgggccccgccgagcttagtcgatttctattgggtatgtggtatccagaaccatgacaataaggttgggtgaaaaattttaaaccggtggacagagaaggagaaggctaattagacttcaagtccaatccttaagaggctcgcatgcaaaaatcgattttcgcatgcgggtctcttaagtggcctgcatgtaaaaatgaggaacttaagcatctgcaaaaatcaatttttgcatgcggctctttaaacttcgagtcaaattttatcatacattcgtactaaatgaactcatataaaaaagttgtcaaaaacaaagttgtataacttattgagatctaccaattttttttggttatttctccatcgagtttgattaaactatataaattttaaattttaaaatataagaaatttaaataattttttcggtagtaaatgatttcaaatggaaaaattgttaataacaaagttgtatatatatatatattgtactggttatatatatatatatatgtatacatacatacatacatggcaacatatcatatgcacacagaccctcacgtgtacacacgtgcacaccaactaaaaaatgtcactaaaaaatctagaaaaaattatacacatactttcaattgtagtacacctagggttaaaattttaacgtcaaattcattatattttagccgtaacaaaaaaaaaaacaaaaaatctgacagttttaaggttgtaattttgtcagaattttatcttttttgttattctctatgtagaatgaatttgaagatgcgactttgtacgtagatgtaatactattgaaagtacatgtatgaattttcctagaattttttgtgataatttttacttggtgtacacggtgtgtacacgcgaaggcctgtgtgcataggatacgctccctacatacatacatacatacatacatacatacatacatacatacatacatacatacatacatacatacatatgtatatgtatatgtatatatatatatgtatacatatatatacatatacatatatatatacatgtatatatatatatatatacgtatatatatagatatacgtatatatatagatatacgtatatatatacgtatatatatacgtatatatacgtatatatatagatatacgtatatatatatacgtatatatacgtatatatatgtatacgtatatatacgtatatatatgtatacgtatatatatatatacgtatatgtatacgtatatatatatacgtatatatatatatatacgtatacatatacatatacgtatatatacgtatatgtatatattatacgtatacgtatatgtatacgtatacgtatatgtatatgtatacgtatacgtatatgtatatgtatacgtatacgtatatgtatatgtatacatacatatatacatatatgtatacgtatatgtatacatacatatatatatatgtatgtatacatatatatatatacatacatatatatatatatatgtatatatatatgtatatatatatatacatgtatatatatgtatacatatatatacatgtatatatatgtatacatatatatacgtatatgtatatatatatacatatatatatgtacatatatatatatgtatatatatgtatatatgtatatatatatatatgtatatatatatgtatacatatgtatatatatatatatatctgtgtgtaaactataagagaaatgtaaattttgtgaagaatattactatcactttgtcagatgaagaagtgaccaaaataaaagttgtatgtcttggtgagttctaaaacttttatgttcatgactttttcagctgaaattatttactacttcaaaatattatttgaagttttgaaattcaaatttttaattgataaaacaaagtcacaagagaaaatagccaaaataatagcagtaagaacacaataacatgatagaggatgattttaaaaacatttaggaaaaaaatcatccaatttggagttcatatgagtgagataaactagtttcaaattttattttcgcttacggctgcttaagacgactgtatggaaaaatcgattttctcataggggctcttaagtgatccacatgcaaaaatgagctcattttttacatgcggacatcttaagaggcttgcatgaataggaaaatcgatttttccagaagccgtatgcgaaaaagctgcttgatttttcatgcggtaagttatggtccgtttgcaaaaattatgagggtctcgtacacaaaaatcgtttatgtagcagtgggtgattgattagtactactgctgcatctgcactgcatggccatgcccacacacttggcctgcattgctagccattgctatactatgggcctgtttggggagctttagattctaagaagcagctatttggtagccagcttttgagaatctggaaaagctctaaaacctagcttctccagcttctgacttattagttcatttttcagaatatgtaactccatattctcagaagctgtggactgtttaggatagcttctagcaaaagcagctttttccaaaagctgccgctgagacaagcttcccaaaacagggcctatatatgctgctggtttcctggtttggtggtctcatgctcatgcatgcacacgtccatctgtgtgaattctgaagctgcaagaacctctcgccgtgctgcatgggccatccaccggcgacctcctcaccggccggcgccaccgccggcgtcagcgttatggtcagcgaccgatatgtaagtgtgctgctgctggtcagctctgcctgcatatgttcgatcgatcgattcattgctgacatgattgattgaatgattgcatgcgcatgcaggttgagattaaaaatggcatctttgaggttacactgtccaaccccgacgggatcgtgaccggcgtccggtataatggtgtggacaacttgatggagattcttaacaaagaagacaagagagggtacctacctgacaattttgcttacgctttttatcctctctttgatatgtttaactagcatagtggctcacgcagattgcgtggctagcatcgttacatttttttttctcatttaatagcttaaatattttcacattttattattaaaatatattaaaatgacaacgtaattttaaactcttggttgaactaacaaatgtgtgatatttttattgtatggtatacgtgatagttatttataaattatatttatatatggactcaagaataatcttttaatattccttagtttttaaatttcgaatttcctttgttcataaattctattcctatatggattctagactactcttccaatattcatttttctaaactctgaattttagttatttataaattgtatttctatgtggactttaaactcttctttcaatatttattttttttaattttgaattccaattattggtaaattgtattactatattgactctagacttctttttccaatagtttttattttttaaaattcagctatttctaaattgtattcatatatggacgctagacttttttttcccaatattccttatttgttaattttaaatttcagttatttataaattgtattcctatagacgctagtctcttctcccaatcttgtttattttaattttgattttttgtaattctaaattgtatttctatatggactctaaactctacttttatttttttttatttttaagttctaactttcatttagttctaaattcctatgtgtggaccgtagactcctcttccaatatttctacttttttaattctcaacctgttatttctaattgtatttctatatggattctaaattcatttttcaatatcttgttttttaattttttaatttaaattatttataaattgtatgcctatatagactctagactcttttttttaatatttcttattttttatttcaaatttcagttatttataaattgtattcatgtatggactctagactcttctcctaatcttgcttttttttaaaaaaaataatttgaattttagttaattctaaattgtatttctatatggactctaacttctacttttagttttcctattttttatttccgaattttaattaattctaaattgtatacttgtatagactccagtcaactctttcaatattccttatttttaattctgaatttcatctatttttaaattgtattcctatatgaactctactttttttttctttttctccgattaatatgggaatttctaagccgtgagagtaaacgtggtggaccgtagactcttcttacaatatttctacttttctaattcccaatatgttatttctaattgtatttctatctggactctaaattcattttttaatattttgtttttttaattgtgaattcaaattatttataaattgtattcctatatagattctagactttctttctaaatatttcttgttttttattttgaatttcagttgtttataaattatatttatatatggactcttgactcttctcccaatcttgcttttttattttgaattttagttatttctaaattttatttctactagaaaaaatgcccgtgcattgcaacgggtgaaatctattttaatcttattattgttatactgtttagttaaggtgagattcaccgtgggaatttgcttgaatttatatattttcaaaaatcatgagctgcaattaggattcttgtgcacataatataattaactttaatttttaaattaaaaactggttcattataagattttataatcaacaaaaatttgttgaagaaagaggtactatagttttgatttttcatcaaccggatgtgtatggtccgtgctagtggtcgagaaaaaaaaatttgcgcgcaaatatgatttgacaggagggagggacagtagacttattctaggagaggcccataaaaagtagatttattccaagagaggcccattgacacagtgcaagtaatataggtgtaaaaaggagagagaggtgattatatggaagatacgtatactatatcaaccgcggttttgacccgacaattaaacggatcccccgaaatccttacgtatttttttaattaggtacagaggtatagattagaattagaattaaataacatgttattattaaaataaaatacaatatacattttttattaaattcttcatgaatgaaccacactatctagaattgttttgaatttttcaaagctcatttgctaattttaataatacaaatataattttaataattaatttaaagtaaaaacaaactaaaagccctctcctaagtctgggccaaatctggcccattcttcttctcctccctcttaggctgccatccctccctattgggccgtcatccctatctccacttgggcccagcagccacctctcttcctttcctccttcttgggccaccatcctcgggcccaacagccatgccaacccatgaaaagaagcggatgggaataaaaccgaaaaagacgacggaaaaaaaaggaaaacggcgaaaaaaaacgcacggacgaaaaaaaattgtcggaaaccttatgtattttctaattattaggtgtgtgtgtgtgtgtatatatatatgaactctaacttctacttttgattctcctattttttaattccgaattttaattaattccaaattgtatacttgtatggactctagtctactcttttaatattccttatttttaattccgaatttcatctatttttaaattgtattcctatatggactctacctttcttttttttctgattaatgtgagaatttctaggccggaagagcaaacgtggtggcttcttttttattactttaataatataatagataattagcaagtacaatagtttggtactacttggatcttgccacatcctaccagtgtacatttgttaattgttattgagctactttgcctatttaaaactaaagaagaaatattttagtcctcattcaagtacaggctgcaactgaggttatagtcaattggtcatatggtgttgtatgttgtcaggtactgggaccttgtttggagtaaactgggagaaagaactggcatatttgatgtgtaagggttctcaattcactcctcagatttcaggcatcagttctgtgcctccatatgaatacactttttgtgctagagagagcccagatgtagctgacattgaacgttgttacgcagaataaaagggacagagttccgaatcatatatcaggatgaaacccaggcagaggtctcgttcgtcagaacatgggatccttctctagaaggcaaagctgttcccttgaacattgataagaggtgatccaatagcacaggcatacaatggagttgttctcagcaattcatttggaaaaggcaatcatgtttaacagagcaagtaattgatatattttgacagcgcaagtatgtttgtataggttcatcgtactccggggctgctcaggattctatacttacggaatctatgagcatcaggaagggtggcctggttttagcatggtagagaccagggtggccttcaagcttcggaaagacaagttgttctagttcctgaatttaagtttttttttcgattttgctatatctcactcgaaagttttttttcttatctctcactcgattttctcactcaaatttatagtgcattttcttgtaagttacaatgtaatttatgaaacttacgctgtaacttttacaatgtaattttgaatcttaagttttgaaatttatattggatttggtctttttcttgcagatatggtaattagtgtctattatggtgtttcttagttgtttcttgtcttttactgtgtctattggattttaatccaaaaattaaaaatctgtgtgatatgatcataaaaatatttcaaaaaatgcatagatactcccttttttttttagtttgctgaattatgctacatcttacactgaatccattactttggtgcaaattcaggtttcattacatggcattggccgacgacaggaagagaataatgccgatgcctgaagaccgagtgtcgccccggggacagcaattagcataccctgaagctgtccttcttgtggacccaataaatcctgacctaagaggagaggtaagctgaaaaaataaggattttttttagagaacgatggcaggagatctgccggaattttaattatcaattaaacactattcctggtaaatttacaatatcatgaagaatctaaacactgttactggtaaattgtcaaggttgatgataaataccaatactcgtgtgaaaaccagtataacaatgtccatggatggatatcattcgatcctccaattggcttctggcagatcactccgagtgatgagttccgaacaggaggtcccgtcaagcagaacctgacctctcatgttgggccaactatgctggctgtaagttcagacattatattatattgaaataaaaagttcagattattaagttcagacattcttctgaaaccctttttctttaatatgattttcagatgtttcttagcggtcattatgctggggatgaccttacacccaagttcatgactggtgaatactggaaaaaggtccatgggcctgtcttcatgtaccttaactccagttgggatggaagtgacccaactctactctgggaggatgcaaaagttcaggtgaaaaattggatgcatatttcgtctctaatttgatatctttcttttattcacaaaagttcaggtgataacattcaggttgattcttattgacagtacaagtgttatgaacacggcacaagtaacttgtaatttaactctctctttctccttttgaaatcagatgatgattgagaaagagagctggccgtactgttttgcactgtcagatgattttcagaagactgagcaaagaggttgtatctctggtagattactcgtccgagacaggtagtaattaatgacatctttttccagttttatacaacagtagtaactaaaagaagtttgattcagtccagatgtaatttagttcgcgatacatctattactaatgaattcatcatgtgttatttaggtatttagatgatgcagatctttatgctacatcagcttatgtaggcttagctctaccaggagatgttggatcctggcaaagagagtgcaaggtgatgcatgctatatacacacttattcttttagaacaagcttgaatacatgttagactatgaagtatattatcaatcacatattccaacaccgtgacccggcaaaaaaaaatatatattccaacactgtagggataccaattctggtgtagggcagaagatgatggaagcttttgcataagaaacattgtagctggagactacaacctttatgcatgggttccaggatttataggggactacaaactggatgctaagctaaccatatcttcaggtcagtatctacctgacatttattcctcttgcagcttccaatgagatatcctgatatgttcagcactcctgttcaggggatgacatttatctgggtgaccttgtgtatgaaccaccaagagacgggcccacgatgtgggagatcggaatacctgatcgatccccctctgaattttttgttcca

SEQ ID NO: 7354 - DNA, 5445 bp, Oryza sativa
tcctaatatatagagatcagccaaagtacctgaccaagtaggatcaacgcttttctcttgagtaaacacagtgctaaatgaagtcggatcttggggtttgtatagcggatccatgtgatttgaaggaatcaaagagactgcaccatcctaacgcggaggaggaaacttttcactcttgctttcgcagttgcatgtgttattaatcttcttttaacgatatttacttggaagcattggaacggctgtattttaaacaatgtcatgcctagtgtcaatgttgttttggaagcagtggtaggggagagtgttttgtggtccgtggctagagctagggctctccatgaactcctgtgtctgtctatcctgttgactggttatttgttgcctgaaagtgtgttttgtgttttggtgacgcatcgcctgttgtgatgttttctttctcaagagggttccttcgtgaaattctcttttcaacatattttgagtattcttaatgaaatgaagcacatggcttttgcgttttcatgaaaaaagaagtccaaaaatcaatttgactttttagtgaatcctgtaatccaaaaccacttctaattttccttgtatggcatataacttacccctcccattgtttagtaccatcagaacgtctacatcttctcacaatacaagccaagccctagtaggcagtcaaccaccgaaaaatcttctagctagaagctctcacaaaaaccaatccccttttatgtagtgcggcacagctccatccgtcgtccaagtttgttgggtgcttgtcatagccaagcgccatggtacacatcaatccttgtatcgtggaggacatggcagaggccatgtacaccgctatcaatatggatgtccaagagacacacgaatggaaagtcaagcactacgcatttgccacgttgcatggcatcatcatatgggcgatgtcattcaccgctgatctatcctcctagccttctcttgttagggattacatgttgcgaagactaacattctcactggatgtcaaggtgctcctgtttcagtcaacgacacacatgcgtgcacgtgaccataaacactccaaaacacacacacacacacacacacaaactccgcgtggaccccatggcctcacctgatttccctacctccctaccatcactgctccatctccaagcccaaatcccaaaaccatagcccatggtcgcatctcccactggctcctcctcctcggccactgccgtggcgacgatggcagcggcagccgagcccactgacgggccaacccttagcgtcgtctcgaagtggctccacgcgctgcggaagaagcacaacaagattatccaaatggaggagccgctcgctgacgggcggaagctgaacaaggagcagggggaggtgccctaatccaagcccgtcatcgtcgtgctcatcgacgagctcgagcggatgcgtgccccgctcgccaccgcactcgctgaggagctctcctcccgtcccgcccgttccccatccgtcgtcgtgtcctcctcctccagtgtcgatttgtctatcaaggatctcctcgcgctcatctactttggctccctcttcgacgtcaagccacagaccgagttcatcgccaccatgctcgtgcgtcccaaggagtgggactgctgcatcacctttgactatgtccgcccttgtcgcctcacgcgctgtcgctcactggtcccaccgccactcgcagctcgtcagtgcgggaagaagacaggagaaagaagaaaaaaagggaaaaaagaagagatggatggaaaacatgacggcgatggcacagttccaattttgtaaaattttagtggcacggctatgaatagacgaattatagtggcatttttctgaactgacatatttgtaattgtatggatccaattaaccctagtatttattgtgtggtgagcaaaatcgataaaaatcaagtccaaaagtcattgtctgtaaatatcactcttcagttccttaccgagcacgggcaatgcctggttgctttgatgagcggcaaaatttgtgcttccacttttgtttcccacctatagagagatcagccaaaggacctgaccaagtaggaacagagcttttctcttgagtaaacatagtgctaaatgaagtcggatcttggggttcgcatagtgggtccatgtgatttgaaggaaccaagagaccacaccatcctgatgtggaggaggaaacttttcactcttgctttttgcagttgcatgtgttattaatcttcttttatcgatatttatttgaaagcatcagaacaattgcatttcaacaatgccattcctagtgtcaatgttattttgaaacagtggcaggggagtgttttgtagtccatgtctagagctagggctatccatgaactcctttgtcggtctctcctgttggacggttgttgtctgagagtgtgttttgtgttttggtgacacatcgcttgttgtgatgtttttttttcaagatggttcctctgtgaacttctcttttgagcttattttccctcttcttaatgaaatgaaacacaaggctcttgtgtttcatgaaaaaaggtccaaaaatcaattaacttttagcgaattctgaaatccaaaacaacttctaatattccttgtatggcatatgactcacccctccaattgtttagtaccagcagaatgtctaaatcttctcacaatacaagccaagcacttgtaggtagttagccacagaaaaatcttctagctagaagctctcacaaaaaccaatccccttctacgtagtgcggcacagctccatccgtcatccgagtttgtcgggtggttatcatcgccaagcatcacgatagacatcaatccttggatcgtggaggccatggtggaggccatgtacaccgctatcaatatggacgtccaagagtcacacacgtcaagcactgcacctttcccacgatgcatggcatcttcatatgggcgacgtcgttcaccgctaatatatcctcctgcccttctcttgttaggaattccatgctgcgaagcctgacattctcattttatatcagcgtgctcctgttcgtgtgaccacacacacacacacacacacacacacacaattatagaatttactgtacagtgagcaaaatcgataaacataaaggccaaaaatcattgtttgtaaacatcactcttttgttccttatcgagcacgggcagtggctggttgttttgatgagcggccaaatttgtgcttctacttttgtttcccaactctagagagatcagccaaaggacccgaccatgtagggacagagcttttctcttgagtaaacacggtgctaaatgaagaaagatcttggggttcgaatagtgggtccatgtgatatgaaggaaccaaagagaccgcaccatcctggtgcgaaggagaaagcttttcactcttgcttttcgcatttgcatgtgttattaatcttcttttttcatatttatttggaagcgtcagaacgattgtattaccaacaatgccatgcataatgtcaatgttgttttgaaaccattggcggaggagagtgttttgtggtgcatggctagagctagggctctccatgaactcctttgtcggtctctccatgaacaccactatcactggacgtccaggagaagcacggggcagtcaagcgctacaccttcccatgctgcatggcatcatcatatgggcaaggttttcaccgctaatctatcctcctgcccttctcttgttaggaattacatgccgcgaagcctgacattctcactggatgtcaacgttctcctgttctgattatgaatagacacgcgggcgcgtgaccacaaacactccacacacacacacacacacacaatcatagaatttactgtgaggtgagcaaaatcgataaaaatcaagggaaaaaataattgtttgtaaatatcactcttccgttccttatcaagcacgggcagcggttggttgtttttatgaggcggccaaatttgtgcttccacttttgtttcccaactctagagagatcagctaaaggacccccatgtaggaactaatattttctcttgattaaacaacttttatcttgagtaaacacggtgctaaatgaagaaagatcttggggttcgtatagtgggtccttgtgatatgaaggaaccgaagagacagcaccatcctgatgcggaggaggaaacctttcactcttgctttccgcatttgcatgtgttattagtcttcttttttttatatttatttggaagcatcggaacggtcgcattttcaacaacgccatgcataatgtcaattttgttttgaaagcattggcgagggagagtgttttgtggtgcttggctagagctagggctctccatgaactcctttgtcggtctctcgatgaacatcgctatcactggacgtctaggagaagcacgggacagtcaagcgctacacctttcccacgccgcatggcatcatcatatgggcgaggttgttcaccactaatctaccctcccacccttctcttgttaggaattccatcccgcgaagccagacattctcactggatgtcagcgtgcttctgttccgattatcaatagacacacgggcatgtgaccacaaacactccacacacacacacacacacacacacacaaaatcatagaatttactgtgcagtgagcaaaatcgataaaaaccaaggcaaaaaatcattgttcgtaaacatcactcttctgttccttatcaagcatgggcagtggttggttgttttgatgagcggccaaatttgtgcttccactttactaacaaccaaatttggtaacattggcatcggaaaagaagattagatcgaagtggagttgaaggcggagatcgattcaggaacaaagcaggaatcggctagagtccagatcgactacgattaggatcggctgagtctgagtcggactaggtgggctgatgcagccgattccgacaatacaacttggtgtatgacatcgggttgaattgaggtgcttcgagatgattaccgcacatggatagagtcctgagaaggcaattgtatctattaattaggatattttatgtaatttccttagagatatgcttgggcaaaagtctgccgcaaagacttatggtattttagagtttgttagagataatagtcgtgtccggtatggacatatcttgtaattctcgggtataaataagaccccgagccctatgtaatttctaacacacacgttcaatacaatttcggcgcatcgccacctttttgcttttgttttatttcgacgagttattgctttcgggttgagctgcatcggtttcgatcttcaacaagaggtaaaacttgttatgacaatttgcgctctcgggattagaggttccatctttatgacactctaa

SEQ ID NO: 7355 - DNA, 4457 bp, Oryza sativa
ggaggaagctgaacaaggagcaggaagaggtgccctgatccaagctcgtcgtcgtcatgctcatcaatgagctcaagcggatgtgtgccccgctcgccaccgcacttgctgaggagctctcctcccgtcccgctcgttccccatccaccgtcgcgtcctcctcgtcctctagtgtcgatttgtctatcgaggatctcctcgcgctcatctacttcggctccctcttcgacgtcaagccacagaccgagttcgtcgccacaatgctcgtgcgtgccaaggagcgggactgctgcagcaccttcgactatgtctgcccttgtcgcctcacgccctgtcactcaccggtctcgccgccactcgccgctcgtcagtgcgggaagaagacaggagaaagaagaaaaaaagggaaaaaagaagagatggatggaaaacatgacggcgatggcacagttccaattttgtaaaattttagtggcacggctatgaatagacgaattatagtggcatttttctgaactgacatatttgtaattgtatggatccaattaaccctagtatttattgtgtggtgagcaaaatcgataaaaatcaagtccaaaagtcattgtctgtaaatatcactcttcagttccttaccgagcacgggcaatgcctggttgctttgatgagcggcaaaatttgtgcttccacttttgtttcccacctatagagagatcagccaaaggacctgaccaagtaggaacagagcttttctcttgagtaaacatagtgctaaatgaagtcggatcttggggttcgcatagtgggtccatgtgatttgaaggaaccaagagaccacaccatcctgatgtggaggaggaaacttttcactcttgctttttgcagttgcatgtgttattaatcttcttttatcgatatttatttgaaagcatcagaacaattgcatttcaacaatgccattcctagtgtcaatgttattttgaaacagtggcaggggagtgttttgtagtccatgtctagagctagggctatccatgaactcctttgtcggtctctcctgttggacggttgttgtctgagagtgtgttttgtgttttggtgacacatcgcttgttgtgatgtttttttttcaagatggttcctctgtgaacttctcttttgagcttattttccctcttcttaatgaaatgaaacacaaggctcttgtgtttcatgaaaaaaggtccaaaaatcaattaacttttagcgaattctgaaatccaaaacaacttctaatattccttgtatggcatatgactcacccctccaattgtttagtaccagcagaatgtctaaatcttctcacaatacaagccaagcacttgtaggtagttagccacagaaaaatcttctagctagaagctctcacaaaaaccaatccccttctacgtagtgcggcacagctccatccgtcatccgagtttgtcgggtggttatcatcgccaagcatcacgatagacatcaatccttggatcgtggaggccatggtggaggccatgtacaccgctatcaatatggacgtccaagagtcacacacgtcaagcactgcacctttcccacgatgcatggcatcttcatatgggcgacgtcgttcaccgctaatatatcctcctgcccttctcttgttaggaattccatgctgcgaagcctgacattctcattttatatcagcgtgctcctgttcgtgtgaccacacacacacacacacacacacacacacaattatagaatttactgtacagtgagcaaaatcgataaacataaaggccaaaaatcattgtttgtaaacatcactcttttgttccttatcgagcacgggcagtggctggttgttttgatgagcggccaaatttgtgcttctacttttgtttcccaactctagagagatcagccaaaggacccgaccatgtagggacagagcttttctcttgagtaaacacggtgctaaatgaagaaagatcttggggttcgaatagtgggtccatgtgatatgaaggaaccaaagagaccgcaccatcctggtgcgaaggagaaagcttttcactcttgcttttcgcatttgcatgtgttattaatcttcttttttcatatttatttggaagcgtcagaacgattgtattaccaacaatgccatgcataatgtcaatgttgttttgaaaccattggcggaggagagtgttttgtggtgcatggctagagctagggctctccatgaactcctttgtcggtctctccatgaacaccactatcactggacgtccaggagaagcacggggcagtcaagcgctacaccttcccatgctgcatggcatcatcatatgggcaaggttttcaccgctaatctatcctcctgcccttctcttgttaggaattacatgccgcgaagcctgacattctcactggatgtcaacgttctcctgttctgattatgaatagacacgcgggcgcgtgaccacaaacactccacacacacacacacacacacaatcatagaatttactgtgaggtgagcaaaatcgataaaaatcaagggaaaaaataattgtttgtaaatatcactcttccgttccttatcaagcacgggcagcggttggttgtttttatgaggcggccaaatttgtgcttccacttttgtttcccaactctagagagatcagctaaaggacccccatgtaggaactaatattttctcttgattaaacaacttttatcttgagtaaacacggtgctaaatgaagaaagatcttggggttcgtatagtgggtccttgtgatatgaaggaaccgaagagacagcaccatcctgatgcggaggaggaaacctttcactcttgctttccgcatttgcatgtgttattagtcttcttttttttatatttatttggaagcatcggaacggtcgcattttcaacaacgccatgcataatgtcaattttgttttgaaagcattggcgagggagagtgttttgtggtgcttggctagagctagggctctccatgaactcctttgtcggtctctcgatgaacatcgctatcactggacgtctaggagaagcacgggacagtcaagcgctacacctttcccacgccgcatggcatcatcatatgggcgaggttgttcaccactaatctaccctcccacccttctcttgttaggaattccatcccgcgaagccagacattctcactggatgtcagcgtgcttctgttccgattatcaatagacacacgggcatgtgaccacaaacactccacacacacacacacacacacacacacaaaatcatagaatttactgtgcagtgagcaaaatcgataaaaaccaaggcaaaaaatcattgttcgtaaacatcactcttctgttccttatcaagcatgggcagtggttggttgttttgatgagcggccaaatttgtgcttccactttactaacaaccaaatttggtaacattggcatcggaaaagaagattagatcgaagtggagttgaaggcggagatcgattcaggaacaaagcaagaatcggctagagtccagatcgactacgattaggatcggctgagtctgagtcggactaggtgggctgatgcagccgattccgacaatacaacttggtgtatgacatcgggttgaattgaggtgcttcgagatgatcaccgcacatggatagagtcctgagaaggcaattgtatctattaattaggatattttatgtaatttccttaaagatatgcttgggcaaaagtctgccgcaaagacttatggtattttagagtttgttagagataatagtcgtgtccggtttggacatatcttgtaattctcgggtataaataagaccccgagccctatgtaatttctaacacacacgttcaatacaatttcggcgcatcgccacctttttgcttttgttttatttcgacgagttattgctttcgggttgagctgcatcggtttcgatcttcaacaagaggtaaaacttgttatgacggtttgcattctcgggattagtgcttccatctttatgacactctaatcttgtttacgtaattcgtcgagttatcatatatcttacataatctctagcaatattgccatctaacccacaatcggctaacatctgttaaaagagggcagccggttaggttaaatatcgatattggtttagattatataagatatataccactctatgaaatgtccagcggcttgattgtctagatattgttcttcttttcatacttaatgctgcatcagttgagtttgatctattaagtcgtgcttagaatatcaatctgtagcgcccgttccgtcgtggcgcctagcgggaaaattatctcttaaaaaccctaattgcgaaatttgtttctttgcttgttgtgtagtgcccgtgccatctcaagatctcaaatccccgatc

SEQ ID NO: 7356 - DNA, 2563 bp, Oryza sativa
tatcactcttcagttccttatcgagcatgggcagtggctggttgttttgttgagcggccaaatttgtgcttccacttttgtttcctaatatatagagatcagccaaagtacctgaccaagtaggatcaacgcttttctcttgagtaaacacagtgctaaatgaagtcggatcttggggtttgtatagcggatccatgtgatttgaaggaatcaaagagactgcaccatcctaacgcggaggaggaaacttttcactcttgcttttcgcagttgcatgtgttattaatcttcttttaacgatatttacttggaagcattggaacggctgtattttaaacaatgtcatgcctagtgtcaatgttgttttggaagcagtggtaggggagagtgttttgtggtccgtggctagagctagggctctccatgaactcctgtgtctgtctatcctgttgactggttatttgttgcctgaaagtgtgttttgtgttttggtgacgcatcgcctgttgtgatgttttctttctcaagagggttccttcgtgaaattctcttttcaacatattttgagtattcttaatgaaatgaagcacatggcttttgcgttttcatgaaaaaagaagtccaaaaatcaatttgactttttagtgaatcctgtaatccaaaaccacttctaattttccttgtatggcatataacttacccctcccattgtttagtaccatcagaacgtctacatcttctcacaatacaagccaagccctagtaggcagtcaaccaccgaaaaatcttctagctagaagctctcacaaaaaccaatccccttttatgtagtgcggcacagctccatccgtcgtccaagtttgttgggtgcttgtcatagccaagcgccatggtacacatcaatccttgtatcgtggaggacatggcagaggccatgtacaccgctatcaatatggatgtccaagagacacacgaatggaaagtcaagcactacgcatttgccacgttgcatggcatcatcatatgggcgatgtcattcaccgctgatctatcctcctagccttctcttgttagggattacatgttgcgaagactaacattctcactggatgtcaaggtgctcctgtttcagtcaacgacacacatgcgtgcacgtgaccataaacactccaaaacacacacacacacacacacacaaactccgcgtggaccccatggcctcacctgatttccctacctccctaccatcactgctgcatctccaagcccaaatcccaaaaccatagcccatggtcgcatctcccactggctcctcctcctcggccactgccgtggcgacgatggcagcggcagccgagcccactgacgggccaacccttagcgtcgtctcgaagtggctccacgcgctgcggaagaagcacaacaagattatccaaatggaggagccgctcgctgacgggcggaagctgaacaaggagcagggggaggtgccctaatccaagcccgtcatcgtcgtgctcatcgacgagctcaagcggatgcgtgccccgctcgccaccgcactcgctgaggagctctcctcccgtcccgcccgttccccatccgtcgtcgtgtcctcctcctccagtgtcgatttgtctatcaaggatctcctcgcgctcatctactttggctccctcttcgacgtcaagccacagaccgagttcatcgccaccatgctcgtgcgtcccaaggagtgggactgctgcatcacctttgactatgtccgcccttgtcgcctcacgcgctgtcgctcactggtcccaccgccactcgcagctcgtcagtgcgggaagaagacaggagaaagaaggaaaaaagggggaaaaagaagagatggatggaaaacatgacggcggtggcacggttcgaattttgtaaaattttagtagcatggctacgaatagacgaattgtagtggcatttttttgaaccgacatatttgtaattgtatggatccaattaaccctagtatttattgtgtggtgagcaaaatcgataaaaatcaagtccaaaaggcattgtctgtaaatatcactcttcagttccttaccaagcacgagcaatgcctggttgttttgatgagtggaaaaatttgtgctcccacttttgtttcccacctatagagaggtcagccaaaggatccgttggctccgaccaagtaggaacatagcttttctcttgagtaaacacagtgctaaatgaagtcgaatcttgggattcatatagtgggtccatgtgatttgaaggagccaagagacgacaccatcctgatgtggaggacgaagaagcacaacaagatcctccagatggaggagtcgctcaccgacgggaggaagctgaacaaggagcaggaagaggtgccctgatccaagctcgtcgtcgtcatgctcatcaatgagctcaagcggatgtgtgccccgctcgccaccgcacttgctgaggagctctcctcccgtcccgctcgttccccatccaccgtcgcgtcctcctcgtcctctagtgtcgatttgtctatcgagga

SEQ ID NO: 7357 - DNA, 25347 bp, Oryza sativa
caggggggtaatttgaattatcaatatcagccaccatcacctcatattcagaaccagcaagcaggatcggtgtcacatcctgattttcgtttcaggatttataaattatttaataaattaataatagaatttatattaaatgttcattaatttacaagtgaagttaaatgtgggaaataaaatttcctaaatataaagcatggatggatttaatttttattaaattctccatggttaattatactctctggaatattctcggatttttcggagctcaattcctaatttttaatcttacaaagagcatttcagtaattaaccacatattaaattaatcattaaatggtctaattgtaattttattaagtactttgagtgtccaagtattttcaggatttttcttgaaattatttgagcattggaagtatttttaataattcaaagatcatttaagtgattattttaattgggaaagtaataaaatcctcctcctcagcttgggccattttcggcccattccttcctttccttcctctctcttccgccggcccaacctgagccgcctcctctcctctcagctcagccggaaaagtctactttccctccctgcgctactgttcatcttccaactcaggcagagcccgagccagccgtgccgtgcacagtgccgccgcctcttccttccaaatctcgcctccccgttgctctttttctccaatttagttgaggggaaatattcctcttatcctcctctatctttacccccaaaaatcggagcaaatcgttgagtatcttatccgaatcaaactcgttttcgagtttatctccaaaaccgagtttttgatttcccggatcgatttcttgcgggaggagtccgatctcttcaatccaaggctataaataggaccccctagtcctcctctttcgtttgccccctctcccgtcctcttccgtgctccgtagctccgtcgccaccgccgccaagcaaaccgccgccgccggccatctccggtgccgccgcgccgccgtctccatcgtcgtcgccggtcgccgtcaccaccgttgggtgcgccgtggtgaggggaagctcggccacccttccttttccgtcgccggtcatcggagctccgccgccccgtgcaacccgagccgccgccgtcgcctcctcgtcgccggccgtcgtcggtcgtcgtttggcacgagggtgagtatcgttgggttcgtctcgtcgtcctctacgtgttcatgtcctccaaatccgcagccggtcgctctatatccggcgaggtcgccatcttggtccggccattgatgatgtcatcatcgtttttctttttccagttttttctaatagattaaatcttcggaaattcataactaaatcatcgtaactcggttttgagtggttcaagttgctaaattcatctaaaatcatgatctacatgtttgtttactttatatgtactgtttatttggtttttattagtctttttcttcgttttgcgtgttagcttgtcgtttccgtcgttgcgaaggttcgtgagtgcgccggaagtattcaagaagattaattgaagaccgattattgcaaggcaagtcacacagatcctaaacacaatcctttgagcatgttgatcctatatttaaattctctatttatttcaactgtgcatttattttcgaatgtcaccgggtggtgtgaacctattcctttgttatggccagtttgcattgattaccctattccttgataccttgggttattataacttgactagttgggctttatatattggttcagctagatattagttatgattgcttagccatgcttagaaacattagcacactattggaataacttatgactcactattatttaaggatggcttaatgatagttcacgatggtcaatcgtgattggttaattaattacttgccaactaaaacttgataatggtgggttgtgagcacatggttttgagagtcgtgctcatgacaattaaggaccggttcgcgagctactgttgtgaaacatttatcgtgccaaccacaagccagcgtgggcaacggctttatcttttgtatagcgtgattcattatagtgcgccagactgagaagtggcgagaagtccacgggggtcgctggggagtccatgcctctggtttttgagggggtgattatgatccaggaaaggtgcgctgtaatggattatgttgtgcaaggggtattgtcacaactcctttccgaggtaccgtggtggtattgaggcacatggtgacatgatgtggggttgtgtcttgtgggtacagtggtacacctctggccagagtaaaactattcgaatagccgtgcccgcggttatgggcgggttgagcaatgtttttcgtgattagtctcacacctctcacaatagttatggatgttataactggtaataatttgcttagctcctggtttggagttagatctgtacagccgggtatggttgttcaggatggttgggcctgtgcagcatgggtgtgctgttcagtgttgattaaaatttttaattaattactctactgttttactactcttaactatttgctaaatgctgctttcgcaaatgagcctatattatgccatcctttggtatccttgtgcacttgcatatttgctgtgtggcttgttgagtatgtcatatgctcattcttgcaataatcaatcaacctcagttgaagaaaaaggatccagaaggagaagacgtttggcttataccccagttgagctgcctgtgggagtggagctgaagccatcgctagaccgttaattccgctgctgttttcttttcttttgtaagtgtgtaacgttattattatgatggatttgtatattaaattgtcagtttgtgtacctcggctgattcctggacgaggattttatgcacaaataagttcggaaattactagtgaatttccgggcgtgacaatcggctcaaccccaatttgttcctcaatacaaccaattcgagcctatgccacaacaacctcaaggggcacctcaacagcgaccatgggccgatttgattgcagatgtcatgaaggaacagtttgggcttaggccgaaagatgctggaaatctatatcgacagccatatcctgagtggttcgagagagttcctctacctaatcggttcaaagttccggatttttcaaagttttcagggcaagatagtacatcaacttatgagcacattagccgatttttagctcaatgcggtgaagcatcggccgtgaatgctttgagggttagattattccggttgtctttgtcttgattggcctttacttggttttcttctctaccatatggaacaatcaacagttggactgatttagaaaaacagtttcacagctacttttatagtggggttcacgagatgaaactgtccgatctgacatcgatcaagcaaaaacatgatgagccggtacatgagtacattcagagattcagagagatgaggaataagtgttacagcttaagtctgactgatgcccaattagccgatttggcttttcagggtatgattgctccaatcagggagaaattctcgtcggaagattttgaaagcttgtctcatctcacacagaaggtgatattgcatgagcaaaggtttgcagaggcaaggaggaattccaagaaaattaaccacgtctgcccttatatgtatgggtcagacaatgaagatgatgattctgaagtagctacagctgaatgggtgagaagtaaaaaggttataccatgctaatgggtaaagagctcaggaaaagaggagaggtatgactttaatatcactaaagatgacaagatttttgacttgttgctccgagagaagcaaattcaacttcctgctggtcacacaattccatcgactgaggaattaggcaagaaaaggtatttcaagtggcacaattctgggtctcatactactaatgattgcaaggtgttcaggcagcagatccaagctgctattgagggaggcaaaatcaagtttgatgactacaagaggccgatgaaaattgatggcaatccttttcctattaatatggtacatacagctggccgaacagccgataggggccgtgcaaggggttttcaggtaaattcggctaagattatcaacaaatatcagaagaagtacgacaagcagcaggagaagcattatgaagaagatgacggtggctttgatcctcattggggttgtgagttctttagattctgttggaataaaggtatgaggctaccatctattgaagactgtcctgggtgcagtggtattgccgagagctcaagccgatcatatagtagggggcaatcggttaaggcagacaagagttcctgttcaacaaagattgggtccagtgaatcaagatcatggccaagaggacaatgaaaataggaaaagtcaatggtgtccttctggtatctttacgaagaatcaaaagagaagggttcaaagattgaggaacagggagcgctttcaggaggtcgagtaggaaattaaccaacggctgaagaagacaaagtcgaggcaagagtggcgtgtcaagaatcaaattcctgtagctgatgaagccgcagccgatgaggcgaaaaggttggctaaagggaaaagtgttgtaactgctttggttaacatggttttcacattgtctgccgagtttggggtcaagcacgatgaagttgaagaagaatcggctaaattgattttgtcaccggagcaggcaatttttgagaagccagaggggacagagaatcggcatcttaaaccattgtatataaatggttatgtcaatgggaagccgatgtccaagatgatggtcgatggtggggctgcagtgaatttgatgccttatgctactttcagaaagttgggcaggaacgctgaggatctcatcaagacaaacatggtactcaaggacttcagtggcaatccatcaaagaccaagggagttttgaatgtggagctgacggtcggcaacaaaaccatccctacaacattctttgtcatcgatgggaagggttcttatagtttgttgctcggtattatcggatggcttgtcatggatcgatccaagtccccccttacaaacttgtttatggacatgaggctgttttgccatgggaagttagaatcggctcaaggagaactgagttgcaagatgatttaacagccgatgagtattataaccttatggctgatgaaagggaagacttggttcagtctaaattaagagcccttgcaaaggtactagggataaggagcgaattactcaacactataacaagaaagtggtacccaaggatttttcggaaggtgaacttgtatggaagttgattttgccgattgggacccgggatagcaaattcggcaagtggtcgccgaattgggaaggaccgttccagattcataaagtagtgtctaaaggggcttacatgctgcaaggactcaatggtgaagtttatggaagagcattgaatagcaaatacttgaagaaatattacccaagtatctgggttaatgcatgattggctgatgttgccgatacatgatagccgatgtattttcatcgtcttgagatggccgatattgttatatcgcccttagttgttttttcatattgtactcggatgtggtttgccgatatacaatggccgatattgttatattgcccttagttgtttttataattttatcaatgcttttgacattgtaaaattaggggagcatatatatatattcaaaaagacaataaagtatgagagtatcttagccgattacagcaatttctaaggcttattacacagaaagtcaaaatttctaaggcttattatacagaaagtcattgagataagtatcgctggatagccgaaatagccctttgcttatatttgttctacttcaatagcttgggcatcttgagcatcggttccagggatgactttcaaacatttggtcaaatctgtaacattcttgatagccaatttgagtttggctttttgttcttcgatagacattgggaaatcggctaactttttctgttccatatctagctcggtgttgcattcttcaagttgtgccaagagctcaatcttgcgagcttcgagccgatcaatattggatttgatcggacccttagatagttgatcaagtttggtcttctcttcatgcacaagctgccgattggcttggattgtggcctcgatatccttgcgctcccgacgttcggctagtcttagcttggccttctccagcttgaactgatgttgctcaaggtatactactggagtaaggatatcggctagctcatctgggattagagcttggatttcatgtagtcgagtcctaattggcccacagtttaccaccagactatctaatgatgatgcttccagccgatgagagatatcttcaagtgttttcttcacatcatcggataagggagctaaagctttgcttgaagtatcttcctctgcctcattaagataatctctgatgtcaaaagaaaagagatcggctaaaacctgcagacaatttcaggaagattgagagttaggtaggtacagccgatctaaattcttgcatcaaaggaaaacttactgggatagcaggagcagctggttgttattcttccacaatatgatgactccccacagccgatggagttcggtcactcgatgattgttgtacaggggaagaaggaggaggaggaggctgtaaaagagacaagtgttagacaaaatcggctggaatcaactagtagaattgagagtgtcttactagtgaagctggtttgagaattggtgctgccgatttcttctttacagcagttttcttcttctgcagctacaaagtctatgagtaatcggctgaaaagtaataattataaaaggggatgcaaagaaagcggcttactcttaagatgtgagtgggggcagaaagagttggaggtgtctgcttaggcgaagccaatggcgtttttttagtatcgcttacttcggctgcagcctgatcaacatcatcctcaatatcttcttcatccagagcttgttcaatggatggatccaaggcaggcaggtcgtcggttggcttgattttcctagacttggcctttttctttggagctagaatcaaagtgctcacagccgatgatctagtttttcttttcttggttgcatcagttggttccctgattgcgccttgaaggagggttgagaccttgggggcatgatagccaatgacagtgggagacagtccgcctccattaggaatcagacctggagcatattcaatatctctgccgctgttgctgtgatgtggagaagaagagtcgattgtctgtaaaacagaagagaaattgatcaagtaatgaatcggctgacaatcatccaaaatttaaatgacaaagtttaccttgggtacgacatcagggaatagatctgtcatgtacattgaggccgattgatgaaacaagtgcaacttccattcgccccaccatctgtcaaagtttctgcttttaaatccggccaactcaatattgttaatactacctagaggaggtccttggaggttaagcagccgatccatcattagagttgaagaaatttctcctcggcaatggatcttgtcagcaaagaataagccgattggaagttggcctaatccaagttgtcgagctgaactcatagggtgatagaattcgtaggagacttggatatttcttccttagtggatgccaacaggtaagatgcatgggctaattgcagctgtaaagacttccctggatatttgatatctttcatggttgatatcttcaaatctaaagtctgatgggagctcaaggtttgctgagtcttcataaggaaaccaaactcgggcatctttctggaagccttcataaaagctgcagaaccagtctttgagcagctcggccgatagttttgccccagattagggttgaaagatatccaagagatggccaagacttgaaagtattcttctagtgacccagattagggttggctaatctaaaggggattctgttggtttcaccgatgatgaaatcagtggggtcaagattgccgattggaccaagaaagtagtggttttcgtgtgacaggctgggaattgcgattaggttggaaaagtgctgcacatccaagggaattgggaagaagaaaacacggtgaaaagggggaaatcgatttcatacgaagaaaggggatctagccgatgagaacttacctcggcatactcggcgatggcgcgacagatgagctggcggaagatgacattgctgcgggcggagatttgatcgagaatgaaatcgcctgggagtcgcctcgagcatcgaaggagtcgccgaagaaagagaaggcaaggttggtttcagcggtgaaaacggaagtaacggggtgaagatttttcagggcggcggttagtatttaaagcgttggggataacggtcagaaaacggcagattgcgaaactcgttcggggtcgatttatagcaaatccgaaacattaccaaatgttccggacttggggggcatgtgttaacaaccaaatttggtaacgttggcatcggaaaagaagattagatcgaagtggagttgaaggcggagatcgattcgggaacagagcaggaatcggctagagtccagatcggctacgattaggatcggctgagtctgagtcggactaggtgggctgatgcagccgattccgacaatacaacttggtgtatgacatcgggttgaattgaggtgcttcgagatgattaccgcacatggatagagtcctgagaaggcaattgtatctattaattaggatattttatgtaatttccttagagatatgcttgagcaaaagtctgccgcaaagacttatggtatattagagtttgttagagataatagtcgtgtccggtttggacatatcttgtaattctcgggtataaataagaccccgagccctatgtaatttctaacacacacgttcaatacaatttcagcgcatcgccacctttttgcttttgttttatttcgacgagttattgctttcgggttgagctgcatcggtttcgatcttcaacaagaggtaaaacttgttatgacaatttgcgttctcgggattagaggttccatctttatgacactctaatcttgtttatgtaattcgtcgagttatcatatatcttacataatctctagcaatattgccatctaacccacaatcggctaacatctgttaaaagagggcaaccagttaggttaaatatcgacattggtttagattatataagatatctaccactctatgaaacttccagcggcttgattgtctagatattgttcttcttttcatacttaatgctgcatcagttgagtctgatctattaagtcgtgcttagaatatcaatctctagcctgccttctggttgccgattagggtagcatcggagtttcagccgatcttatctgatttaactatatttactctatatgcttcattgacatgttaaatctgccctttatatcaagatattgtcgcatctaagtatattaagcttttgtttgatatattatacctgttttaatatcctgatatagagtagtatcggagtattagccgatacatgctaaatccatctgatcggctatgctataaacatatatagtcctgttattaatatatattctgatctaagtgatttatactgtctcggcgtggcgaccgatctatctcaatcacttgatttaagtatatatcgatataagagttatatattggtaatatctacagcagatcgagtagatttagttctttattatctacttataatcgccaatcgattcacatatgacatcggctcaaagataaatgatatgccatcggcacatagccgatcggctatcgtttatagatttaaccgcggtgtctttgtctttatttcttgttgattgcaggatcaaatcaactggcacgctaacacacccgaaggcgagctttggacctgcactggagttaagcagatctcccaggcctcgtgtttttcatcaacacgcttttggcacgcccggtgggaccgataagaagtgaacaagccattctttctcatggccgagaaaccacctctatgaccatcctcggctagcccgggtactgtcacaccctaaaaatcctaaatatataaattgttgtttaattggaattattagaatttattttaaaagtctagaagagaagatctaattttaattaataaattccaatataaaatggggccagataaaatttcattaaatactttgcttaattctataattcctagatttttctgggatttatttgagctaaggaagtatttttaataaatggaattgcatttcaagaataatttaaattgaaaaaggtttttaaaagtctcttttggctttgggccgaaagtcggcccaaaaccttctctctctccctcggcccaagtcggcccagtccgccgctagcgcgcgcgccctcgctcgctgacaggtggggtccgcctgacagtcttcgtctacctccggccgccgccgcccgaaaccctagcgccgcgccgccgccgtctccttccaaattcggccgcccctttccttctccggtgaaatcaattgaggggaattgtttcccgagatctcctctaccttttctcttttggaatcatcgtctaaatcgctttggaaattcatggattcgagtttgattcggattcatttttcccgaagtttccttcgcgtcgccggccgccgtgggccttcaccgccgccctccaacccctatataaggacccccggtgtctcctctacccgccgccaccctcgccttcgtctctcgccgtcggaagagctctagcgccgtgtgacctagcgtcgccgtcgtcgccgtcgctccagccgtgcttcgccgtcgctccagccgtcgccgtcgctcggggaggtcgccatcgtggtcgccaagtcgtcgccgtccttgtccgccccttcgtcgtcgccgaagaccgccggagcaccatcgccgccgtcgacccgatcttctccgccgcttcgacctcgtcgccgtcgccgtccgttgatcttccgccgccgttttggtcaccggtgagttcgccacgtcgcgctctacgtcctggtgcctttcgttcgtgccgaagcatcatcgttcgccggcgagcgtgcgccgtctgagccgccgagccgtcgccggaggtgacgtcgccgctgacgtcatcggggccgttggccgtgagccgccgtagacccgatcgatctcggccgtccgttttggatggatcgatctcggccgttcgttcccgtgaaccgctgccgtgcacccggtccaccgcaaaccctagccgctgacgcaataattcccttttccttttcaaaaataattcattattgcgtcataattcaattaaaatccatataagtgttttaatccgatttaatctttaaaaattcataactaattcatcttagctcggatttagttggttcaagtctctaaatttttctaaaattgagatctacatgttaaaaatatccacatgtattgttcatgcttgtttatgtgctgttttggtgattttgctcttttctgcttagattccgatgtttccggagagtctgttttcgcaggagaagaatttgaagagttccaaggccagcaaggcaagtcacacagatcccaaacaaccctttgagcatgttgatcccgattaaagctattgtttctattcaactattgcatttattttcgaatgtcatttggtggaattaacctattgtttgttatagcccttttgttcttgattactttattccttgataccttgggttattataacttgactagttgggctttatatattggttcagctagatattagatatgaatgcttagccatgcttagaaacattagcacactattgggataacttatgattcactattaattatttaatgaggacttaatgatagttcacgatggtcaatcgtgattggttaattaattacttgccaattaaaacctgataatggtgggttgtgagcacatggttttgagagtcgtgctcatgacaattaaggaccggttcacgagtttcggttgtgaaacattaaccgtgccaaccacaagccagcgtgggcaacggctttaccttttgtgtagcatggtttattgcggggcaccagactgagaagtggcggagataagcccacaggggtcactggggagtccatgccttgtttatagggggtgattatgatccaggaatggtgcgctgcggtggattgtgttatgcaaggggtattgtcacagctcctttccgaggtaccgtggtggtattaaggcacatggtgacatgatgtggggctatgtcttgtgggtacagtggtacacctctgatcagagtaaaactattcgaatagccgtacccgcggttatgggcgggtctaacaatgtctttcgtgatgagtctcacatctctcatcataataaaagatgcaataactggtaataatttgtttagctcctggtttggaatggtatattcctggtttggagatagatctgtacagccgggtatggttgttcagaatggttaggcctatacaacagggtatgttgtatagcgttggattaatattgtttaaatattacttaactgttttattaaattctcaaatgtttgctaaatgctgtttatgcaaatggaaccctattatgccatcctttgttatcctgtgcacttgcatatttgctgcgtggcttgctgagtatgtcatatactcaccttgcaatcgttcatcagaggaagagttctacaatgatgctgatggtgtggaggattaggtgtagccctggtcaagctgcctgtggagtggagtcgtctgcgccgtttatcttattttccgctgcttagatctttattgattgagaggaactatctacctctgtaatgacattttattcgcttattaattagagtaataattgtactctattatcaatttgttattgtgtgcctcggctgattcctggacgagggttcacacacatagaaattccgggcgtgacaggtactgtcaaggaaacaatccagaagttaggttttactgacgtcaatgaaggaaacgtcatgcctatcgatccagaaaagttcacacctgatcaaaagaaagattttgatgcggtgatgcagcaagcacgggatcagttcttgaactcgttcatgcagacccgaaagggaacacttgttcagaagtataaactaaaagtgtttcctgatgaccccaggactagttcttccaatgatggagaagggaaacaagctccagatggcttggctcaaccgagtgacaagaatgccacagagggttttttagcaaatcaaggtgacaacttgccaggagtgcacggggttcaaggtgatgggtctcagggtgttcaaggtggaggtgttaatcaagacagtaatacagcacagttgcagtttaacaactttcaagatcaggttgactatgatgtacaccatgctttgatcaaccaatctgggatattaactaacattttggcaaatatggtgaagtcaatggttgatggttcaatggccgagtatcaagctacaggaccagtatacctaccaggaggagtgttccccaattatcagccattaatcactaataatcaaccagttgtccagtcaattcctctcaatgcaccatcggctcagccgacggcaccagcatcgactccagcacctgctgcgccaccttcggctccaggacaattagttaatccccagttgttggtaagagaacaaccacaacacgctggacagaatgtgaatcggctaacgcaagaccaggttgcatctatgttcttgcaccctcaacacactattgatccaacccagcagcagccgattcaacacaccccgtcaaggcaacaagttgtgcaaccaattcaacaaacgcccccggtccaacaggttgtgcaaccagttcaacagacaccaccaagacagcagatcttgcagccgattcagcagacgccactaaggcaacaggtcgttcagccgattcagcagcaaggtccgatgaatgcatcggctgggtctgcaatacctggtggtcagcccgtgcagcatgttgcaaatcaggttgttctagaacacttggttcatcacgtacaaccagatggcacagtaattcctcaagttattcctgagcatttggtgcgcaatattcaaccagatatccaaaattaccaggggggtaatttgaattatcaatatcagccaccatcacctcatattcagaaccagcaagcaggatcggtgtcacatcctgattttcgtttcaggatttataaattatttaataaattaataatagaatttatattaaatgttcattaatttacaagtgaagttaaatgtgggaaataaaatttcctaaatataaagcatggatggatttaatttttattaaattctccatggttaattatactctctggaatattctcggatttttcggagctcaattcctaatttttaatcttacaaagagcatttcagtaattaaccacatattaaattaatcattaaatggtctaattgtaattttattaagtactttgagtgtccaagtattttcaggatttttcttgaaattatttgagcattggaagtatttttaataattcaaagatcatttaagtgattattttaattgggaaagtaataaaatcctcctcctcagcttgggccattttcggcccattccttcctttccttcctctctcttccgccggcccaacctgagccgcctcctctcctctcagctcagccggaaaagtctactttccctccctgcgctactgttcatcttccaactcaggcagagcccgagccagccgtgccgtgcacagtgccgccgcctcttccttccaaatctcgcctccccgttgctctttttctccaatttagttgaggggaaatattcctcttatcctcctctatctttacccccaaaaatcggagcaaatcgttgagtatcttatccgaatcaaactcgttttcgagtttatctccaaaaccgagtttttgatttcccggatcgatttcttgcgggaggagtccgatctcttcaatccaaggctataaataggaccccctagtcctcctctttcgtttgccccctctcccgtcctcttccgtgctccgtagctccgtcgccaccgccgccaagcaaaccgccgccgccggccatctccggtgccgccgcgccgccgtctccatcgtcgtcgccggtcgccgtcaccaccgttgggtgcgccgtggtgaggggaagctcggccacccttccttttccgtcgccggtcatcggagctccgccgccccgtgcaacccgagccgccgccgtcgcctcctcgtcgccggccgtcgtcggtcgtcgtttggcacgagggtgagtatcgttgggttcgtctcgtcgtcctctacgtgttcatgtcctccaaatccgcagccggtcgctctatatccggcgaggtcgccatcttggtccggccattgatgatgtcatcatcgtttttctttttccagttttttctaatagattaaatcttcggaaattcataactaaatcatcgtaactcggttttgagtggttcaagttgctaaattcatctaaaatcatgatctacatgtttgtttactttatatgtactgtttatttggtttttattagtctttttcttcgttttgcgtgttagcttgtcgtttccgtcgttgcgaaggttcgtgagtgcgccggaagtattcaagaagattaattgaagaccgattattgcaaggcaagtcacacagatcctaaacacaatcctttgagcatgttgatcctatatttaaattctctatttatttcaactgtgcatttattttcgaatgtcaccgggtggtgtgaacctattcctttgttatggccagtttgcattgattaccctattccttgataccttgggttattataacttgactagttgggctttatatattggttcagctagatattagttatgattgcttagccatgcttagaaacattagcacactattggaataacttatgactcactattatttaaggatggcttaatgatagttcacgatggtcaatcgtgattggttaattaattacttgccaactaaaacttgataatggtgggttgtgagcacatggttttgagagtcgtgctcatgacaattaaggaccggttcgcgagctactgttgtgaaacatttatcgtgccaaccacaagccagcgtgggcaacggctttatcttttgtatagcgtgattcattatagtgcgccagactgagaagtggcgagaagtccacgggggtcgctggggagtccatgcctctggtttttgagggggtgattatgatccaggaaaggtgcgctgtaatggattatgttgtgcaaggggtattgtcacaactcctttccgaggtaccgtggtggtattgaggcacatggtgacatgatgtggggttgtgtcttgtgggtacagtggtacacctctggccagagtaaaactattcgaatagccgtgcccgcggttatgggcgggttgagcaatgtttttcgtgattagtctcacacctctcacaatagttatggatgttataactggtaataatttgcttagctcctggtttggagttagatctgtacagccgggtatggttgttcaggatggttgggcctgtgcagcatgggtgtgctgttcagtgttgattaaaatttttaattaattactctactgttttactactcttaactatttgctaaatgctgctttcgcaaatgagcctatattatgccatcctttggtatccttgtgcacttgcatatttgctgtgtggcttgttgagtatgtcatatgctcattcttgcaataatcaatcaacctcagttgaagaaaaaggatccagaaggagaagacgtttggcttataccccagttgagctgcctgtgggagtggagctgaagccatcgctagaccgttaattccgctgctgttttcttttcttttgtaagtgtgtaacgttattattatgatggatttgtatattaaattgtcagtttgtgtacctcggctgattcctggacgaggattttatgcacaaataagttcggaaattactagtgaatttccgggcgtgacaatcggctcaaccccaatttgttcctcaatacaaccaattcgagcctatgccacaacaacctcaaggggcacctcaacagcgaccatgggccgatttgattgcagatgtcatgaaggaacagtttgggcttaggccgaaagatgctggaaatctatatcgacagccatatcctgagtggttcgagagagttcctctacctaatcggttcaaagttccggatttttcaaagttttcagggcaagatagtacatcaacttatgagcacattagccgatttttagctcaatgcggtgaagcatcggccgtgaatgctttgagggttagattattccggttgtctttgtcttgattggcctttacttggttttcttctctaccatatggaacaatcaacagttggactgatttagaaaaacagtttcacagctacttttatagtggggttcacgagatgaaactgtccgatctgacatcgatcaagcaaaaacatgatgagccggtacatgagtacattcagagattcagagagatgaggaataagtgttacagcttaagtctgactgatgcccaattagccgatttggcttttcagggtatgattgctccaatcagggagaaattctcgtcggaagattttgaaagcttgtctcatctcacacagaaggtgatattgcatgagcaaaggtttgcagaggcgaggaggaattccaagaaaattaaccacgtctgcccttatatgtatgggtcagacaatgaagatgatgattctgaagtagctacagctgaatgggtgagaagtaaaaaggttataccatgctaatgggtaaagagctcaggaaaagaggagaggtatgactttaatatcactaaagatgacaagatttttgacttgttgctccgagagaagcaaattcaacttcctgctggtcacacaattccatcgactgaggaattaggcaagaaaaggtatttcaagtggcacaattctgggtctcatactactaatgattgcaaggtgttcaggcagcagatccaagctgctattgagggaggcaaaatcaagtttgatgactacaagaggccgatgaaaattgatggcaatccttttcctattaatatggtacatacagctggccgaacagccgataggggccgtgcaaggggttttcaggtaaattcggctaagattatcaacaaatatcagaagaagtacgacaagcagcaggagaagcattatgaagaagatgacggtggctttgatcctcattggggttgtgagttctttagattctgttggaataaaggtatgaggctaccatctattgaagactgtcctgggtgcagtggtattgccgagagctcaagccgatcatatagtaggggcaatcggttaaggcagacaagagttcctgttcaacaaagattgggtccagtgaatcaagatcatggccaagaggacaatgaaaataggaaaagtcaatggtgtccttctggtatctttacgaagaatcaaaagagaagggttcaaagattgaggaacagggagcgctttcaggaggtcgagtaggaaattaaccaacggctgaagaagacaaagtcgaggcaagagtggcgtgtcaagaatcaaattcctgtagctgatgaagccgcagccgatgaggcgaaaaggttggctaaagggaaaagtgttgtaactgctttggttaacatggttttcacattgtctgccgagtttggggtcaagcacgatgaagttgaagaagaatcgggctaaattgattttgtcaccggagcaggcaatttttgagaagccagaggggacagagaatcggcatcttaaaccattgtatataaatggttatgtcaatgggaagccgatgtccaagatgatggtcgatggtggggctgcagtgaatttgatgccttatgctactttcagaaagttgggcaggaacgctgaggatctcatcaagacaaacatggtactcaaggacttcagtggcaatccatcaaagaccaagggagttttgaatgtggagctgacggtcggcaacaaaaccatccctacaacattctttgtcatcgatgggaagggttcttatagtttgttgctcggtattatcggatggcttgtcatggatcgatccaagtccccccttacaacttgtttatggacatgaggctgttttgccatgggaagttagaatcggctcaaggagaactgagttgcaagatgatttaacagccgatgagtattataaccttatggctgatgaaagggaagacttggttcagtctaaattaagagcccttgcaaaggttactagggataaggagcgaattactcaacactataacaagaaagtggtacccaaggatttttcggaaggtgaacttgtatggaagttgattttgccgattgggacccgggatagcaaattcggcaagtggtcgccgaattgggaaggaccgttccagattcataaagtagtgtctaaaggggcttacatgctgcaaggactcaatggtgaagtttatggaagagcattgaatagcaaatacttgaagaaatattacccaagtatctgggttaatgcatgattggctgatgttgccgatacatgatagccgatgtattttcatcgtcttgagatggccgatattgttatatcgcccttagttgttttttcatattgtactcggatgtggtttgccgatatacaatggccgatattgttatattgcccttagttgtttttataattttatcaatgcttttgacattgtaaaattaggggagcatatatatatattcaaaaagacaataaagtatgagagtatcttagccgattacagcaatttctaaggcttattacacagaaagtcaaaatttctaaggcttattatacagaaagtcattgagataagtatcgctggatagccgaaatagccctttgcttatatttgttctacttcaatagcttgggcatcttgagcatcggttccagggatgactttcaaacatttggtcaaatctgtaacattcttgatagccaatttgagtttggctttttgttcttcgatagacattgggaaatcggctaactttttctgttccatatctagctcggtgttgcattcttcaagttgtgccaagagctcaatcttgcgagcttcgagccgatcaatattggatttgatcggacccttagatagttgatcaagtttggtcttctcttcatgcacaagctgccgattggcttggattgtggcctcgatatccttgcgctcccgacgttcggctagtcttagcttggccttctccagcttgaactgatgttgctcaaggtatactactggagtaaggatatcggctagctcatctgggattagagcttggatttcatgtagtcgagtcctaattggcccacagtttaccaccagactatctaatgatgatgcttccagccgatgagagatatcttcaagtgttttcttcacatcatcggataagggagctaaagctttgcttgaagtatcttcctctgcctcattaagataatctctgatgtcaaaagaaaagagatcggctaaaacctgcagacaatttcaggaagattgagagttaggtaggtacagccgatctaaattcttgcatcaaaggaaaacttactgggatagcaggagcagctggttgttattcttccacaatatgatgactccccacagccgatggagttcggtcactcgatgattgttgtacaggggaagaaggaggaggaggaggctgtaaaagagacaagtgttagacaaaatcggctggaatcaactagtagaattgagagtgtcttactagtgaagctggtttgagaattggtgctgccgatttcttctttacagcagttttcttcttctgcagctacaaagtctatgagtaatcggctgaaaagtaataattataaaaggggatgcaaagaaagcggcttactcttaagatgtgagtgggggcagaaagagttggaggtgtctgcttaggcgaagccaatggcgtttttttagtatcgcttacttcggctgcagcctgatcaacatcatcctcaatatcttcttcatccagagcttgttcaatggatggatccaaggcaggcaggtcgtcggttggcttgattttcctagacttggcctttttctttggagctagaatcaaagtgctcacagccgatgatctagtttttcttttcttggttgcatcagttggttccctgattgcgccttgaaggagggttgagaccttgggggcatgatagccaatgacagtgggagacagtccgcctccattaggaatcagacctggagcatattcaatatctctgccgctgttgctctgatgtggaggagaagagtcgattgtctgtaaaacagaagaaaaattgatcaagtaatgaatcggctgacaatcatccaaaatttaaatgacaaagtttaccttgggtacgacatcagggaatagatctgtcatgtacattgaggccgattgatgaaacaagtgcaacttccattcgccccaccatctgtcaaagtttctgcttttaaatccggccaactcaatattgttaatactacctagaggaggtccttggaggttaagcagccgatccatcattagagttgaagaaatttctcctcggcaatggatcttgtcagcaaagaataagccgattggaagttggcctaatccaagttgtcgagctgaactcatagggtgatagaattcgtaggagacttggatatttcttccttagtggatgccaacaggtaagatgcatgggctaattgcagctgtaaagacttccctggatatttgatatctttcatggttgatatcttcaaatctaaagtctgatgggagctcaaggtttgctgagtcttcataaggaaaccaaactcgggcatctttctggaagccttcataaaagctgcagaaccagtctttgagcagctcggccgatagttttgccccagattagggttgaaagatatccaagagatggccaagacttgaaagtattcttctagtgacccagattagggttggctaatctaaaggggattctgttggtttcaccgatgatgaaatcagtggggtcaagattgccgattggaccaagaaagtagtggttttcgtgtgacaggctgggaattgcgattaggttggaaaagtgctgcacatccaagggaattgggaagaagaaaacacggtgaaaagggggaaatcgatttcatacgaagaaaggggatctagccgatgagaacttacctcggcatactcggccgatggcgcgacagatgagctggcggaagatgacattgctgcgggcggagatttgatcgagaatgaaatcgcctgggagtcgcctcgagcatcgaaggagtcgccgaagaaagagaaggcaaggttggtttcagcggtgaaaacggaagtaacggggtgaagatttttcagggcggcggttagtatttaaagcgttggggataacggtcagaaaacggcagattgcgaaactcgttcggggtcgatttatagcaaatccgaaacattaccaaatgttccggacttggggggcatgtgttaacaaccaaatttggtaacgttggcatcggaaaagaagattagatcgaagtggagttgaaggcggagatcgattcgggaacagagcaggaatcggctagagtccagatcgactacgattaggatcggctgagtctgagtcggactaggtgggctgatgcagccgattccgacaatacaacttggtgtatgacatcgggttgaattgaggtgcttcgagatgattaccgcacatggatagagtcctgagaaggcaattgtatctattaattaggatattttatgtaatttccttagagatatgcttgggcaaaagtctgccgcaaagacttatggtatattagagtttgttagagataatagtcgtgtccggtttggacatatcttgtaattctcgggtataaataagaccccgagccctatgtaatttctaacacacacgttcaatacaatttcggcgcatcgccacctttttgcttttgttttatttcgacgagttattgctttcgggttgagctgcatcggtttcgatcttcaacaagaggtaaaacttgttatgacggtttgcattctcgggattagtgcttccatctttatgacactctaatcttgtttacgtaattcgtcgagttatcatatatcttacataatctctagcaatattgccatctaacccacaatcggctaacatctgttaaaagagggcagccggttaggttaaatatcgatattggtttagattatataagatatataccactctatgaaatgtccagcggcttgattgtctagatattgttcttcttttcatacttaatgctgcatcagttgagtttgatctattaagtcgtgcttagaatatcaatctgtagcgcccgttccgtcgtggcgcctagcgggaaaattatctcttaaaaaccctaattgcgaaatttgtttctttgcttgttgtctagtgcccgtgccatctcaagatctcaaatccccgatctatcgtcgagttcaatcccgaatccaaatccttccaaatcaaattcctccgcaaagtctattttgcctcccccggggtcgatgggccgaatttctctcggcccatctccccctcttccccggccctctccccccggcgtgctccctctctccctctccccctccgctccgcccgcgcgctgcgcgcgcgagcgcgtgagccgccgcgccgagcgcctccctccccctccgctctgcccgcgcgcgagcgcgtgagccgcccgcgccgagccgagccctcctttccgctccctcgctgccgctccccgcgcgtcgttcgcgcgcgcgcccgcgtggtcgtcgcccgcgtcgcgactgcgccgcccggccccgctgccctgccgcgcctgcagccgctcggccccgcagccagcgcgcgtgcccgagccgcaccactccatccgccgcgcctcgtgttgcaagccgcgcgcgcgtgccgagtggccaaccgcctggtagccgccgtcgtcagcgcctgcccgccgtcgtcagcgcctgcccgcgcctatcgcccgtgtcgccgctccgctccacaccgccctgccgtcatcgccgtcgtcatcgcctcggccccgccaccccgcgtgcaagccgccaagggacggaggcagagccctcctccctctgccgtgacacccccactcccctcctccttttcccaaagaagaaaggggcgagccccccttcccatccctccttttccccttttcctcccgccggcgtcatcctccctccgccctgtcgccgattggacgcgagcgccgagcgccagctcgcgccttgaccgcccaagtcggttccaaaccgacattgccgcccttaaagcccaggcaccctccctctcttctccttccatcgccattgttgccgccgccttccgagctctgtctcgcctccgccgttcatcgccaagcgccgggagagcctgtgcgtttgtggacgcggaaggggactccgggcgctcgtctttctcctcttccccggcccgaggccggagagattactcccgcgccgtcggcctctcgtcacagcgcccctcctcatctcggtagtgcctccctccgttcttcctcctcgctccatctctcccccttagttttcagtagtagctcgagtagcctccccgtaactagccggcgccgccccgaccgttgccgtcgctcgccgtgtgctcgccgccatcgccgcccgagctccgtagcaccgctcgtcgccggcctcgctcggcgtagctccgcccaatccgatgctaacaacggattcccgtggccgcatagatgctctcaccgccgggaattggcccctcgtgacctcgtcgccgtttccccctttgccttccgccggttgccgctgccaaaatccgcc

SEQ ID NO: 7358 - DNA, 10799 bp, Oryza sativa
acgcatataccatcgggagtggtgtctctcaaaaagagggaattcaggtcgctcactcaggggtctcgctctgttacggagtatctgcacgagttcaatcgtctggctcattatgctccggaagaggtacgcactgatgaagagcgctaggagaagttcttggaaggacttaatgatgagctttcttatccacttatgactggagattgtcctgatttccagaagttagtggataaggctattcgccaggaggacaagtacaaccgcatggagcaaaagaaacgccggattgctcaattcaagacacaacaggggaataatcaaaagccgcgtcttactttaggaccccagtccatgccacagggaggttcttcgtctgttgttcgtccgcagcgtcagttcttcaacaacaatgccggcaacaacatccgtaatcaagctccatgccctgttgcagcctcgacacagcaacaacctgccaagagggagcaaggcagcaagcccgtggtgtgtttcaactgtggagacccaggacattacgctgacaagtgtccgaagccccgacgtgtgaaggttgtccctacccagggcaactctaccgcaccagcatcaaaggcccgtgtcaatcatgttgctgctgcagaagctcaagatgctccagatgtgattttgggtacgtttcttgttaacttagttcctgcaacagtgcttttcgattctggtgctacacattcattcttatctatgagttttgcgggaaatcatgggatggaagtagaagatcttagacgtcctatgatggttagtaccccaagtaatcaggcactctctttgcaacgtagcccctctgtcagaatagaaattcaaggcgtaccatttctggccaatcttatcctattagaatccaaagaccttgatgtcatcctaggaatggactggttagccagatataaaggtgtgatagactgtgctaacagaaaagtaactctcaccagcaatgatggtcgagttgtaactgtttatgcattgtcttctgagtctttaaggtcaagactaaaccaaataactttggaagagattcctatagtccgggagtatcctgatgtgttcccagatgatttacctggtatgcctcctaaaagggatatagagttcagaatagatttggtaccaggaacaactccaatccataagagaccttatagaatggcagccaatgagttggcagaagtcaagaggcaagtggacgatttgcttcggaaagggtacatcagaccgagttcatctccatggggagctccagttatctttgtggaaaagaaagatcatacccaaaggatgtgtgtggactatcgtgcactaaatgatgtgactatcaagaataagtacccgctacccagaattgatgatttgtttgatcagcttaaaggtgccactattttctccaagatagatcttcgatcagggtatcactagttgagaatcaaagaggaagatatacctaaaacagcttttaccactaggtatgggttgtttgaatgtactgttatgtcttttggacttaccaatgcccccgctttcttcatgaacttgatgaataaggtgtttatggaatacctagacaagttcgtggtggtctttattgatgacattcttatctactcctgaaccaaagaagagcatgaacaacatcttcgccttgcactggagaagctgcgagaacatcaactgtatgctaagtttagcaagtgtgaattttggttgtccgaagtgaagttccttggtcacgtcatctcagcaggaggagttgccgtcgatcctagtaatgtggaatccgtaaccaattggaaacaaccaaagacagtttcagagattcgcaattttctaggcctcgcaggatattatcggaggtttataaagaatttttccaagattgctaagcccatgacacgattacttcagaaagatgtaaagtacaagtggtcagaagaatgtgagcagagttttcaagagttgaagaatcgcttaatatcagctcctattttgattttacctgatccaaagaagggattccaagtgtattgcgatgcatccaaatttgggttaggttgtgttctgatgcaagatgagaaggtggttgcctatgcatctcgtcagttacgtccgcatgagaagaactaccctactcatgatcttgagttagctgcagtagttcatgcgttgaaaatttggcgtcattatcttttcggtactcgtacagaggtgtataccgatcacaagagtttaaaatatatctttactcagccggatctgaacatgagacaacggagatggttggaattaattaaggattatgacatgggaattcattatcacccgggaaaggctaatgttgtagcagatgctcttagcaggaaaggctattgcaatgctacggaaggacgacagttgccattggaattatgcaaggaatttgaaagattgaatttgggaattgtcagtagaggtttcgttgcagctttagaagcgaagcccactctaattgatcaagttagagaagcccaaattaatgatcctgatattcaagagatcaagaagaatatgaggagagggaaagctatcggtttcttgaaagatgagcaaggaactgtatggttgggcgagagaatctgtgtccccgacaacaaagatttaaaagatgcaattctaaaggaagcccatgataccttatactccattcaccctggtagtactaagatgtaccaggatctcaatgaaggattttggtgggcaagtatgaagcgtgaaatcgcagagtacgtagcagtatgtgatgtttgtcagcgagtcaaggcagaacatcagaaacccgccggtttgttgcagcctttgaagattcctgaatggaaatgggaggaaattggtatggatttcatcactggtctacccagaacgtcatcaggccatgactctatttgggtgatagtcgacagacttaccaaagtggctcatttcattccggtaaagacaacctattccggaagtcggttggcggaattgtatatggcaagaattgtgtgtttgcatggcgtccctaagaaaatagtgtctgattgaggcagtcagtttacttcaaatttttggaagaagcttcaggaagagatgggttctaagctgaactttagtactgcttatcatccgcagacagacggacaaaccgaaagggtgaatcagattttggaagacatgttgagagcttgtgctttagacttcggtggaagttgggataagaatctaccttatgcagaattttcgtacaacaacagttatcaagctagtcttcagatggctccgtacgaagcactgtatggtcggaagtgccgcactccgcttttgtgggatcaaacgggagaacgtcaggttttcgggacggatatcctgagggaagcagaagaaaaggtgaaaatcattcaagaaaggttgcgtgtggcccagtctcgtcataagagttatgccgacaatcgtcgtagagatctaagttttggcgaaggagattatgtgtatcttcgtatcacgccttttcgaggagttcatcgttttcacaccaaagaaaaattggcaccgcgttttgtgggaccttataagattgtcaatagaagaggagaggttgcttatcagttggagttacctcaatctttggcaggagtccataatgtgttccatgtttcgcaattgaaaaagtgtttaagggtacctaccgaggaaactaatcttgaacagatagaagtccaagaggatctgacctatattgagaaaccaatccgtattttggaaatagatgagagaagaaccagaaatcgagttatccgtttttgcaatgttcaatggagtaatcactcggaagaagaatcaacttgggaacgagaagatgaattgaagtcagctcatccgcatctgttcgccagttcttccgaatctcgaggacgagattctgtttaaggggggtaggtttgtcacaccctaaaaatcctaaatatataaattgttgtttaattggaattattagaatttattttaaaagtctagaagagaagatctaattttaattaataaattccaatataaaatggggccagataaaatttcattaaatactttgcttaattctataattcctagatttttctgggatttatttgagctaaggaagtatttttaataaatggaattgcatttcaagaataatttaaattgaaaaaggtttttaaaagtctcttttggctttgggccgaaagtcggcccaaaaccttctctctctccctcggcccaagtcggcccagtccgccgctagcgcgtgccctcgctcgctgacaggtggggtccgcctgacagtcttcgtctacctccggccgccgccgcccgaaaccctagcgccgcgccgccgccgtctccttccaaattcggccgcccctttccttctccggtgaaatcaattgaggggaattgtttcccgagatctcctctaccttttctcttttggaatcatcgtctaaatcgctttggaaattcatggattcgagtttgattcggattcatttttcccgaagtttccttcgcgtcgccggccgccgtgggccttcgccgccgccctccaacccctatataaggacccccggtgtctcctctacccgccgccaccctcgccttcgtctctcgccgtcggaagagctctagcgccgtgtgacctagcgtcgccgtcgtcgccgtcgctccagccgtgcttcgtcgtcgctccagccgtcgccgtcgctcggggaggtcgccatcgtggtcgccaagtcgtcgccgtccttgtccgccccttcgtcgtcgccgaagaccgccggagcaccgtcgccgccgtcgacccgatcttctccgccgcttcgacctcgtcgccgtcgccgtccgttgatcttccgccgccgttttggtcaccagtgagttcgtcgcgtcgcgctctacgtcctggtgcctttcgttcgtgccgaagcatcatcgttcgccagcgagcgtgcgccgtccgagccgccgagccgcctccggaggtgacgtcgccgctgacgtcatcggggccgtttgccgtgagccgccgtagacccgatcgatctcggccgtccgttttggatggatcgatctcggccgttcgttcccgtgaaccgctgccgtgcacccggtccaccgcaaaccctagccgctgacgcaataattcccttttccttttcaaaaataattcattattgcgtcataattcaattaaaatccatataagtgttttaatccgatttaatctttaaaaattcataactaattcatcttagctcggatttagttggttcaagtctctaaatttttctaaaattgagatctacatgttaaaaatatccacatgtattgttcatgcttgtttatgtgctgttttggtgattttgctcttttctgcttagattccgatgtttccggagagtctgttttcgcaggagaagaatttgaagagttccaaggccagcaaggcaagtcacacagatcccaaacaaccctttgagcatgttgatcccgattaaagctattgtttctattcaactattgcatttattttcgaatgtcattgggtggaattaacctattgtttgttatagcccttttgttcttgattactttattccttgataccttgggttattataacttgactagttgagctttatatattggttcagctagatattagatatgaatgcttagccatgcttagaaacattagcacactattgggataacttatgattcactattaattatttaataaggacttaatgatagttcacgatggtcaatcgtgattggttaattaattacttgccaattaaaacctgataatggtgggttgtgagcacatggttttgagagtcgtgctcatgacaattaaggaccggttcacgagtttcggttgtgaaacattaaccgtgccaaccacaagccagcgtgggcaacggctttaccttttgtatagcatggtttatggcggggcaccagactgagaagtggcggagataagcccacaggggtcactggggagtccatgccttgtttataagggggtgattatgatccaggaatggtgcgctgcggtggattgtgttatgcaaggggtattgtcacagctcctttccgaggtaccgtggtggtattaaggcacatggtgacatgatgtggggctatgtcttgtgggtacagtggtacacctctgatcagagtaaaactattcgaatagccgtacccgcggttatgggcgggtctaacaatgtctttcgtgatgagtctcacatctctcatcataataaaagatgcaataactggtaataatttgtttagctcctggtttggaatggtatattcctggtttggagatagatctgtacagccgggtatggttgttcagaatggttgggcctatacaacagggtatgttgtatagcgttggattaatattgtttaaacattacttaactgttttattaaattctcaaatgtttgctaaatgctgtttatgcaaatggaaccctattatgccatcctttgttatcctgtgcacttgcatatttgctgcgtggcttgctgagtatgtcatatactcaccttgcaatcgttcatcagaggaagagttctacaatgatgctgatggtgtggaggattaggtgtagccctggtcaagctgcctgtggagtggagtcgtctgcgccgtttatcttattttccgctgcttagatctttattgattgagaggaactatctacctctgtaatgacattttattcgcttattaattagagtaataattgtactctattatcaatttgttattgtgtgcctcggctgattcctggacgagggttcacacacatgtaagcgtttggaattttggatagaaattccgggcgtgacaagttggtatcagagcctccttgaccctaggttatgccaaatggttacccatagaagccctctaaaaatattggaaaagtagaactgttctcctccccttctcttttaattaaaccaaaataatggcacatgcacttcataatctcttttagtggttctcattcaaaatttattccagtgttattagtactgtacatctattattgtactaatggctcatttaccagcaaaagttctacaacattgttttatttaatcttgctgcaaggaaataaatttagcatgttgattttatgactttcttttatttcttttgaaacctgttattcaaaagcacaaaatttgtggccttgtttccaactgtttcaaattatcctgcaagtttggtttactttttttttctaactttattcaaattaatccaaaaacttgtgctattgattggataaatgtcttaactccctcctttcacttgtctttagatgccgcgctacaagcctgagtacttgtttggtgttgagggatttgtccaggagttgcgtacgatgtccattgccataggatttgggactgcccctttttatgcccagattcctcatgatcgtcatgaagagaagtgccgggtcaaagtcaccttaaacagtaatagcgaagatatcccctcagtgatgttcgaagctggaggaaaaaactacatccatgcatgtcagaaggtggcaaggatcgccataggagagctgcgcgatcgctacagtgatcagttggccgacaccgagtatcgctaccatcctcgccaaccacagggaagtgaccgtggcagctaccttgagactgaaggaattgagaatgatgctaccacatagcatttggttgagatgctgtgggctatggatgaaacccgtgcagagactgtgttagcagctcaagatcgtgaagatcggaatcgtggtaagatttgcaagctagaggacaaagtggatcatttggagaaggaactagccgccttgaagggagaagcaccaccgcagaaggccaggattcgtcttaccgcaaggaagagagctctatttgtccctcgctatcaattggcgccaaaggttcgtgtggtggaaaaagaagttaccccagccctagcagatcctccggtcgtcaacgtaagtgatgatgaagtagaagaatccaagcgcacccattccaaaatcgagtggggagccactcaagatgatgaagatgagccgaacgagccttcaatcaactccgatgcccggaagacctagagtgccttgtcaaaccgttgtcttagatcgttgtgttagtttgcttgttttaagtttggttgtgtgtgtctcgcatgtgattacatcagtggtgggatgtaagtgcatgcgttggtttgctttcgagtgttaggtagttggtgagtttagtggtgtgagagtcttcagtttgtaataatgaaactcacttaagatcaataaaagttaaattaattctctgtcctaagtagttttccccggtttctcttcttgtgctcctgttcatgccagatggtgctcactcgcagcaacgggaatggccccaacaacaacaacaataacaataacaacaacaatggagagaatcccacacttgcccaagtcctggctcaacaggcacagcttatgaacatgatgatgcagcaactccagaaccagcagaaccagggaaataaccatgcacctccccagaacaagttagccgaatttcttcgtgtgaggccgcccattttctccagtaccactaatcctgttgaagctggtgattggctgcatgtcatagagaagaagttggatttgcttcagtgcactgatcaggagaaggtctcatttgcatcacaccagttgcatggccctgcctctgaatggtgggatcacttccgcctgcatcggactactgctgaacctatcacttggcttgaattcaccgctgctttccggaagacgcatataccatcgggagtggtgtctctcaaaaagagggaattcaggtcgctcactcaggggtctcgctctgttacggagtatctgcacgagttcaatcgtctggctcattatgctccggaagaggtacgcactgatgaagagcgctaggagaagttcttggaaggacttaatgatgagctttcttatccacttatgactggagattgtcctgatttccagaagttagtggataaggctattcgccaggaggacaagtacaaccgcatggagcaaaagaaacgccggattgctcaattcaagacacaacaggggaataatcaaaagccgcgtcttactttaggaccccagtccatgccacagggaggttcttcgtctgttgttcgtccgcagcgtcagttcttcaacaacaatgccggcaacaacatccgtaatcaagctccatgccctgttgcagcctcgacacagcaacaacctgccaagagggagcaaggcagcaagcccgtggtgtgtttcaactgtggagacccaggacattacgctgacaagtgtccgaagccccgacgtgtgaaggttgtccctacccagggcaactctaccgcaccagcatcaaaggcccgtgtcaatcatgttgctgctgcagaagctcaagatgctccagatgtgattttgggtacgtttcttgttaacttagttcctgcaacagtgcttttcgattctggtgctacacattcattcttatctatgagttttgcgggaaatcatgggatggaagtagaagatcttagacgtcctatgatggttagtaccccaagtaatcaggcactctctttgcaacgtagcccctctgtcagaatagaaattcaaggcgtaccatttctggccaatcttatcctattagaatccaaagaccttgatgtcatcctagggatggactggttagccagatataaaggtgtgatagactgtgctaacagaaaagtaactctcaccagcaatgatggtcgagttgtaactgtttatgcattgtcttctgagtcttaaggtcaagactaaaccaaataactttggaagagattcctatagtccgggagttcctatgtgttcccagatgatttacctggtatgcctcctaaaagggatatagagttcagaatagatttggtaccaggaacaactccaatccataagagaccttatagaatggcagccaatgagttggcagaagtcaagaggcaagtggacgatttgcttcggaaagggtacatcagaccgagttcatctccatggggagctccagttatctttgtggaaaagaaagatcatacccaaaggatgtgtgtggactatcgtgcactaaatgatgtgactatcaagaataagtacccgctacccagaattgatgatttgtttgatcagcttaaaggtgccactattttctccaagatagatcttcgatcagggtatcactagttgagaatcaaagaggaagatatacctaaaacagcttttaccactaggtatgggttgtttgaatgtactgttatgtcttttggacttaccaatgcccccgctttcttcatgaacttgatgaataaggtgtttatggaatacctagacaagttcgtggtggtctttattgatgacattcttatctactcctgaaccaaagaagagcatgaacaacatcttcgccttgcactggagaagctgcgagaacatcaactgtatgctaagtttagcaagtgtgaattttggttgtccgaagtgaagttccttggtcacgtcatctcagcaggaggagttgccgtcgatcctagtaatgtggaatccgta

SEQ ID NO: 7359 - DNA, 10987 bp, Oryza sativa
tcgccattgttgccgccgccttccgagctctgtctcgcctccgccgttcatcgccaagcgccgggagagcctgtgcgtttgtggaccccgaaggggactccgggcgctcgtctttctcctcttccccggcccgaggccggagagattactcccgcgccgtcggcctcttgtcacagcgcccctcctcatctcggtagtgcctcccttcgtttttcctcctcgctccatctctcccccttagttttcagtagtagctcgagtagcctccccgtaactagccggcgccgtcccgaccgttgccgtcgctcgccgtgtgctcgccgccatcgccgcccgagctccgtagcacccgctcgtcgccggcctcgctcggcgtagctccgcccaatccgatgctaacaacggattcccgtggccgcatagatgctctcaccgccgggaattggcccctcgtgacctcgtcgccgtttccccctttgccttccgccggttgccgctgccaaaatccgccaccgacggactccctccggcgaatccgagccgttggctcgctccctctccttcttcctcgtcatcccggtgtacgccccgtcgcccctcatcgtcgcaaggcgccccggagaaaccgccaccgcccgccgtccattcgcggccggcgccttcgtcttcctcccgccagcccgcgtggcagccacgtaggcgccaagtaggcgccatgtcggcgccagctcggccgagatcgggtcgggccgaccccggtcagcccctcccgtgcgcgcgttccaccgcgagccatgaggctgcgcgtgggcccgccgcatccgttcctccgcgaaccacgcgcgtgcaccgcgtccctcccccgcccgcgcgcgtgcaccgcgtgctcgctccgcacggtgaaccgtgtcaccgacaagcgggtcccacccgggaccactcgtggtgagcccggtccaccggcgctctctctctcctcccctcccgcgcgcgcgcgtcttgggccgccttgggccggccagcccatttagctcggccggaccgctccatttctcttgggccacgccctagccgcccgagaaaagtctatattccctccctcttttcttttcttttcttttcttttccaaaaaggatttaattaaatccttttcctttagaccaaaaatccaataatcttagaaattcaatatcttcccaaccgtaaatccgtttgactccgttcaacttccaaaattcctcaaatctcgagatctatctaatggcacgcttagaggtcattaatagggctttattttcgccgtttgttgagttgtcccgtttcgcgtgtagtttcggagcccgaagacccgcagtgcgaggatttcgaggatcaagctccagatctcgagcaaggcaaaccacctttgaacatcttgagcctatatttgaatttaattatgttgcttgaaaaatattatgcattgataggatcgcacttaatctgtttgtcccgtctgcaaggcagattggcggacctacctagcttgttgcatttgatccttcctctgttaattgtcataccatgttcccttgtaaccacccagttgcgcctcggaaatcgtgcactctgcacgagtatcgacggtcgccttcaaacttaaaatctgaaaaacatcttgggtaaaacttgggttttacaaaagacttggaaaacccgacacctgggacggtgcttgcgaactaaatgaatttccaaaaccgcggaccggggaacgtaccgggtgtacggtttcccgctctcgcacttaaggaccgattccttggaatttcatccaaacataagtcaagtacgaccacatgggtggaatgggacacccctggctgagtaactagcttatcaggggagccttgatgccaagagacatgtggattcgccggggtggtgtcggggaggacccctgggcttcctggcacagtatggtctgggacctaacctgttgttggtctgggatccctctcgtcggcatatggtaaacctgtgtcggctttggaaataccttgtcatgaaagcttggaggtctcccgacgtggctgatccccacgggctgggtgatccgggttagtaatgtcgtgtgggtaaagtgtaccccctctgcagaggttaacaaactgttcgaatagccgtgcccacggtcatgggcggatgtgaggtgattcctagcgtagttttgttcgactactgcttgtgaaattgctgttgtggaaaggggttcgatgtttgaaaaaccagcagctgacgggatcagctaggcccgggtggccgtttgaaagttgttggcccgggtggccgtttgaaagttgttggcccgggtggccgtttgaaagttgttggccgggtgccaatctggatcaattctaaagactgatacattgcacatactccgaccggacgagacgcactgtctcatccacgtcgtttgagaagcactcacttagttgtttttagaaaagggttcaaataaaatcaattgcaaaaacaacagcctttccttgaagcctgcattaaacacttatttcccatggcttgctgagtactcccgtactcacccttgctctatataaataattccccccccagttgctgaagaagatgaagcggaacctgctgatgaggagttcttccaggagcaagccggctacgatgagttttagggtttcggcctagttcccaagtcgcgcctgtgttgtttggtccaagtcctggcttccgtttcccttttgtaatgcagttgtgagctcgggatctgtccgcagcccaacatgactgtacctctactctataataaagagacctctgttgttgtgatattctgtctccctgtgataccagcactgtttcctgggactggtatcgattaacaggttaatttggagcgtcacgggctagttccagtcgggactagttcggggcgtgacacaatctctagcctgccttctggttgccaattagggtagcatcggagtttcagccgatcttatctgatttaactatatttgctctatatgcttcattgacatgttaaatctgccctttatatcaagatattgtcgcatctaagtatattaagcttttgtttgatatattatacatgttttaatatcctgatatagagtagtatcggagtattagccgatacatgctaaatctatctgatcggctatgctataaacatatatagtcctgttattaatatatattctgatctaagtgatttatactgtctcggcatggcgaccgatctatcccaatcacttgatttaagtatatatcgatataagagttatatattggtaatatctacagccgatcgagtagatttagttctttattatctacttataactgccgatcgattcacatatgacatcggctcaaagataaatgatatgccatcggcacatagccgatcggctatcgtttatagatttaaccgcggtttctttgtctttatttcttgttgattgcaggatcaaatcaactggcacgctaacacacacgaaggcaagctttggacctgcactggagttaagcagatctcccaggcctcgtgtttttcatcaacacacttttgtttcccaactctagagagatcagctaaaggactcccatgtaggaatagagcttttctcttgagtaaacacagtgctaaatggagaaagatcttggggttcgtatagtgggtccatgtgatatgaatgaaccaaagagaccacaccatcctgatgcggaggaggtagattttcactcttgcttttcacatttgcatgtgttattaatcttctttttttatatatttatttggaagcatcggaatgatcgcattttcaacaacgccatgcctaatgtaaatgttgttttggcggggctagagtgttttctggtgcatggctagagctagggttctccatgaactcctttgtcggtctctccatgaacaccgctatcattgggcgtcccagagaagcacggggcagtcaagcgctacaccttcccacgctgcatggcatcatcatatgggtgaggttttcaccgctaatctatcctcctgcccttctcatcatatgcggcacgatacacatcaatgcttggaacatggaggccatggcggtgtccatgtacattgctatcattatgaacattcaggagaagcacgggagggcagtcaagcactgcaccttcctcacgcttaatggcatcatcatatgggtaaggtcattcactgtcgatcggtcctcctggccttccctcattaggaatcccatgccgtagagcccgatattgtcactggatgtcaaggtgctcctgctccgatcgccgatacacatgcgggcacgcgaccacatacactccaacacacacacacacaatcatagttttttatgcggtgagcaaaatcgataaaaatcaattccaaaaatcatttgattttgttttagcaaaatcttgaatctaaaaccacttcttattcccctcaaatatttagtacaagcaaatgtgtctacatgttctcatagtacaagccaagcactagtaggcatgtggccacccaaatatcttctagccagaagctctcacaaaaaccaatccccttctagctagtgaggcacatcaacatcgtgttgtgagagtttgtcgggtgctcgtcatcactaagcgctcacgatacacatcaatgcttagaacgtagaggctatggtggtggccatgtgcactgctatcactatggacgtctaggagaagcacgcgaggcacgtcaagcgctacaccttcctcacgctacatggcatcatcatatgggcaaggtagtttgccgttgatctatcctcctaccattccctcgtcaggaattccatgtcgtggagcccgacattgtcactggatgtcaaggtgcttttgtttcggctgccaacacacatgctagcacgtgaccacacacgcacgcgcgcgcgcgcacacacacacaaaatcatagggtttattatgccgtgagcaaaattgataaaaaaaataagtccaaaaaatcatttgacttttgtttagcaaaatctttagtctaaaatcacttctggtttccctcatatggcataattcaatcctccaattatttaccaccagcagatgtgtctgcatcttctcacagtagcactagtagtcatgtagccttccaaaaatcttgtacctagctagaagctttcaaaaaacctgatccccttctaactagtgcagcacaactccatcatgttgtccgaattcgtcaggtgcttatcatcgctaagcagctcgatacacgtcaatgctcggaacgtggaggccatgtacaccgctatcactatggtcgtccaggagatgcacgcgaggcacgtcaagcattacaacttcctcatgttgcatggcctaatcatatgggcaagggcgttcttacctcctggccttccctcatcggggattgcacaccacggagcccggcacagtagctttaggtcaagatgctcctgctccaatcaccgacacgcatgtgggcgttcgaccatacacacacagagagaaacacacaatcatagagttgattgcaataatacttatttcgttttgtgtgccggggaggagggttccaacccctcctcccgaacgccagccttagttctatttagcacaactctcgcggttctaggtttatgctgaatttaaagtatggcacaacacaatcgtagagtattttgtagtaatacatttttgtttttaaaaaatagattaatatgattttttttaaaaaaaacaactttaacggaccgtttagtagttcgatcggatggccccgcacatgtgtcgctcgatcggacgatccgcacatgcgtcgcgggcttgagtgggatacggccgttggatcaaatgtggacggccagatctgtgacaactgcagactgtgccgtagccacacccaaacccgcgccaccgccgccgccgtgggagcagctcgaccgttcgaggaggcggcgatggagcacgggacagtggaggactcgagcgcgtcgacgttctccatcgcggaggaggaacacaccctcgccaaccccgccagattcgtcctcaaccaggagtgagagttcttgtgtaccctttgtttcttgtcccctttgttttttccttttatttttcctgtgtcccctttgttggtttccgtgaaattcgatcgtatttccggccaacattttgaatttgtgcggtagatgaatctgtggttagagccctaggagaggaggcaaaaacttggttctagcttctatcaatcttggggtttacagtggaagagaggagagatgtggatttgttaggcaattagatcgattttattttagtgagtaaaccgattggctgtagcagttgaatctccagttatcgataggaattctgatgaaattaagtgggcaagattttgttttgggtttttggagaatgagggcattgtgagtgttgaaaatggtgaagcctactttttttttgttaactaagtaaaattacaaagatagggagaaatatttgtggggtaatgttgcaaacaaccatcttgacctgttgatattagtgtcagttgatagggttgtctattggatcacctaggtttagatctagtcgggtggttctatttgcaatggatgaacaacaatagatgaatgaacaaagagggagtgagaggatttagggttgtgaccagtcgttgttgaggaagaggaagtccggccggccatcgtcgttgtcgtcgcgggcttgacgtggacggcggcgacgatgtgctcggttccgatggcggtgatgtggttgcagcagcgacggtgtcgacgacgaggcgtggcgcggcggtggacttcccgtcactggctgcgccccctcgatcggttagggtttatggggtggagtggcggcaggcgacgaaccacattccttgtgtcgttatgccgtcccgtcctccacccctctttatatggcacagtgtgacgggggcccaccagccattgggctgggcgcccccgatcagggcgcgggtcaaggcccccttgagccgttgggctcaaggggagggagatccatctaacattctcccccttgatctcactatttcctttagctttttctattccatcacagatttacatatagagcatgtttcatcatcacggttaattaccgatggattcgacagccactatacacatctctattcagaaacagatactttaacttttgggccctatagtccaggattcataaggcttcccttaaaacccatgcatgctacatgttccttgaacatgttgggaggtaggcctttcatgagcggatccgcgagcatcctttctgttcttatgtgctcgagactgattgtttgatcccggactttgtctttcacaacatagtactttatgtcaatgtgtttggcagcaccacttgactaattgttgtgagagtacattactgtgggttctttatcgcattataactttagtggtttctcaatactatcaaccacctttaaaaccgggtatgaacttcattagccagttcacctgccccgtagcctcatggcatgctataaactcggcatacatggtagaccctgcagtggtagtctgttttgagcttttccatgaaatagctcctactgccagggtaaacatgtatcccgatgttaactttgtattatcttttgcaaagtcagaattcgaataccccactatgtggagcgattctgattttctgtaagacagcatgaggcttttgttctttgcaaataatctttactaattccagtgctctaggcctggattactttgcaatctgccaaataacccggtaacaaatgccaagtcaggtcgtgtgcacacttgagcgtactgtaggcttcctacagttgacgcatatggctttattttcatttcattgagctcatactgatttctaggacattgtgatgccccatacttttcgcctttgactataggagcaggtgtagcactgcatatgtacatattgaatttcttcaacaccttttctatatatatgccttttgagaaaatcccaatgcatactttgttctatttcggtgaatctctatgcccaaaacatatgaagcctcaccgaggtctttcatgtcaaagtttgaggacaagaatttctttatttcctgcagtagattgacatcactactagccagtagaacgtcatctacatacagaattaggaaaatgagtctcccattcttaactttgaatcaatacagttgtcctctacattctcttgaaaacccaaatttctttattgttccatcaaacttcaagtagcattgtctcgaagctttgcttttaacccataaatggatctctttatacggcatcccatattttcgtttcatttcatgacgaaacctttcggttgtgccatgtatactttttttcttcaaatcaccatttagaaattccgtttttacatccatctgatgtaattccaaatcataatgtgccactagtgccattataatcataaaggaatctttacaagagactggagaaaagtctcattgtaatcaatgccttctctttgcgtgaaaacttttgccacaagtcgcactttaaacttttctatattccctctggagtcatatttggttttgtagacccatttacagcctactgttttggctcctttaggaatttcttctaaatcccagacatcatttaatttcattgatttcatttcatctttcatggcttctcatggcctcttcatatgagatgggatcatcctccatatgcgactctttcaggccttctaggggcctcctattctggcacattatctgtttgaggctgttgcagctcctcctctgatgtggcaataatttctgttgaatcctgtagaacaggttcctcactttcattcattgttgccacaggagagataacaacaggtgttggtaccgcaacggcatgcattgctggcacaacattagcaggtagagagaagaaaggttcctgagtcgacggagcgggtacagacacccgcctctcctcaagatcaatttctcgaattaccgagctccccctaatcatttcgtctttcaagaagacggcgtgtctcgtttctacaaactttgtataactgtttggacagtagaaacgatgaccctttgatcttttagaatagccaataaaatggcagcttactgttttgggttaaatactttatcctttgcaggacttccccacacacggaggatccatagctcatacggtgttttgggcaccgatgcattctatacattgtatgcatcgttctaaaactgagaactccaatggaggaagaactacattcttaaccagtctctcaattctccccctcgaaatatggcataaacaacagtgccataatttcgatgagacatcagaagttcgcttttcttttcttttgtcaacgaggacacaacattcacattctcagaaagagataacaaataaagctgatcttgcaacacaagaccaatacattcattattataccatagttcacatttgccatttcatatctatcagaatccaatttggatactcttattatcaagtttctttgcaaagaatggacataaaaacatctggaagtaaaagtgtgaagccattcgcgagttctaggcgaaaatctccaacagcttcaacttttgcttcaactccattggcaactctaatggatctttcacttctttgcgtagtcctcattgaacggaatccctttaaacaattacacacatgaatagttgctctagaataaatccaccatgtggatctagaataaccaatcataatgagattctttacaaatgtaataatgttctcacctttctttgccatgatcactgtcaggaagtcaggatgatctttcttggaatgtcttgtcttcttgcagtgtagacactgatcttgtctcaactgtaaactgttgtttctgaggcggatgctgaggctgtttttcttttgaggagggtgacctgtggctcttttccttgttatctttgacaaggttaatggagtcaccattggtctctttgtgtctttcctcctcttgcacacaattagagatgagctcttcaatattccaattctctgtacttattttgtagttgacaacaaggttgtcaaagttctttggcaatgaggacaaaaccagatggaccagaaagtcatctgagatgcccaaatctttttgcttcaatttggaagccatgttgctcatcctaagaatgtggtcttttacaccacctccatggtacctctctgtaacaagctgctttatcagctgtgtcgcataaaactttgaagaaccagtaaactggctctttatactttcgaggtatttagagacagtgtcatactctgggattgagcccaatatggttggctcaatcgtgttctttaccgcagccaaacaattcttgttagctgaagaccatttcgcatgctcaatgtcatacgacatgatgagggaagcattgtccctctctctctttttccattcagcatctgactctttttcacctctgaaaatttcagcaggttctataggacatggggtagtcaacacccagtccacctctcccaagataaaggcaaggtcgagttctcttttccattcttcgtagttatctcctttcagggtcggaatatctttaatgtaacccatcaaggagtagccacctgagataatcatgtattgtgagaacaaaattaacattaaaattattatgtattaagtctacatcaccgttgggcagaaaatagacataacacataaagccataactataacattgcaattatcaacgttggtcagaaaaattacaacatcatagcacataattaatgttcctaaaattaaaatctcccgttggttcgaaattta

SEQ ID NO: 7360 - DNA, 50047 bp, Oryza sativa
attcctgcagccctgcgtgttagtttctgtttgtgtatgtgtgtgtgtgtgtgtgcgtgtgtgtgtgtgtgtgggtggggggggggttcacgcacccaagtgtgtgtcggtaaccggcacaggagcaccttgacatgcagtgacaatgtcaggctttgcaacatagagtccatgacgagaaaagggcaggaggatagattagcggtgaacgacctagcccatatgatgatgccatgccacacaaggaaggtgttgtgcttgacatgcctctcttgcgtctcttggatgtccatgttgatggcggtgtacatggcctccgccatggcctccacaattcaaggattgatgtgtatggtgacgcttggcgatgacaaacacccgacaaactcagacaacaaatggagatgttccgcactatcttgaaggggattggtttttctaagagcttttagatagaagaattttcggtggctaaatgcctagtagtgcttggttgatgttccgttggatttaaacaattagaggggtgagttatatgtcataagagggaaacttgaagtggttttggattaagcattcgctaaaacaaagtcaagtgatttttggacttcatttttttcaattttgctcactgtacagtaaacttaatttatatgattttgtgtatctgagtttgcgtgtgtgcgtgcatgcgtgtgtgtgtgcacgcgcatgtgtcggcgaccagagcaggagtaccttgacatctagtgacaatgtcgggcctagcagcatggaatccctgatgagggaaggccacgaggacagataagcagtgaacgacctcgcccatgtgatagttccattcagcgtgtggaagatgtagtgcttgacgtgccttttgtgcttctcctggacgtgcatagtgatacatggcatgtgccatggcctccacgttccaagcattgacatgtatcccaccgcttagcaatgacaagaaggtctggaggacaggtcagtggtacatggcctcgccagatgatgttgttgtgtaccatgaggaaatatgttgtgcttgacgtgcctcacttgcttctccttgatgtccatggtgatggtgatgtacatggcctttatgttccacaggttgagcgtatcacgttgctagcaatgacaagcacccgatgaactcatatgacacaatggagctatgccacaccaactagattggtttgatttctagtagagtatttttcgatggctaactgcctactagtgattggcttgtagttggagtggacacatgtgcatttgctgatattaaataattagaggggtgagcgatatgcgaagcaagtgtaataagtagtggtattaaataaatgatttcgctaaaacatagtcaaatgattttggactagatttttgtcagttttgacacaacacggtcaactctatgattggtaggtgtgagtagacgtccaatggcattgttgggctacgtgatgatgactccttgatgacgcatggccatgaggacaggtcagtgatgaacgaccttgtcgagatgatgatgccatgtagcttaaggaaggtgtagtgcttgacatgcctcgcctgctcctcttagacatccatggcgatgtacgtggattttgtgatggtctcgacattccatgggttgatatatatattgttgtgtagtggctggttggtggcacccagcatgatggagcccctcttcccggcataccgtgtagaaatagggtatctagttgagcccgttgcagatggcgtggatgacgcaacactcgacaacagcacaataaaccaacttactagccatggtagttattgcccatgcagccatggtgggaggttaggtgaggccggggaagttccctcgttgataggaatggagcagaaaaccacgacgaagaggaacggcaagtggggggaagaagctgatgcaggagaatgtacacctatggcgaatgaagaggggagcagccagaggtactaattgactaacaatggacgaacacaaggtcaccatcatctagatagagcaactcgatgatgccaacttgtacttccaagtgtggcattgagagagtggtatcgatgtccctaaagggtgacaaagagaggttaacggaggaggcaagggaagagactagagaggatgaagatgggctcactgagatgtgggtaccactatatattttttatttttttccctaattgcaatgccacatgagtgacatgtaaggcatcacatcatatgaagaccaggtaaacgtgtcacgtaggcactacataggatgaaaccacaatccacgtagcttgcggaggcaaaacaaaccatttcaatagttgagggatccttcatatctagtttagaggtctgagggaagcgaatgaggctcggcccatagctgaggaaggcaaaatagacttttccaaaatcaagaccaacctagagggtcttcagcctgttagtcaaccagtcaaccagccaaccaggctacacttcacgcataaacctgacaacacatcatgagatttccggaagaggatcactcagccctaacatttcctgggtgtcacatctcgctcactgtgacgtgctgcacaatggcgtagcatcgaccggtggtgtggggttagccatcttcatcaaaaagcctaattcgcgaacacacacgcccattgaatgcatgaacacgttctggacgcataacaacaatctccaggttagtgttagggtattgggggtgggttggggagggtgtggtgctagggaggggaagtgggggatcaagcttagagggatagtgcaggaggcgatggacaagggcatacaacgagtgtggatagtatgggtactagatacccacaaggcctcttatcagactagtgatagaaggtgaaccagatccatgtaataggagataaagtaaaactcgattgccatgtagccttgtaccctaagataggatatagaatccaggccgaagaatactatgtacagattaggaaactgaaaccgtgtccggctaagttttccccctttgtaaccctgtccaccaaggtatataaaggagctcttttaggatgggccaatcgttcgtacgaactcctccacgaacgttcgcgcaacggccattctggcatgaacctattaaacccttgttttccacatccatctgctttgagatctcgtgcgtagccttcttaaattattgccgatacaaaacatcaacaacaaggcggtggtagtgcctccggagccacgggtcggcaactgactgtgggctggtgttggtgcggaggcaaagcgaggcaaaggggaggggaggaggccagcactgcaggggcgcgcctgcacattgattccctttggtgccgccaaggccaggcgactgcattgtaggtgggtggcagtcgaggaaagggctaacctagtcgccagatcaatctcgtcaagagaaagctcgccatagggagggagctggggctcactagaggaggcctttgccgtcatcatcaccagagggaagctgctcgactacgtcttgtcttctcaatcggaggaagctcaccggatggatgtggagcaagctcgctggaggaaggctgctcgtccgcgacttctcttctcactatgttgcatgcgcggatgggtggcttcctatccgtatgtaccagacaaagaaagagagtttgggagggggggagctaattaatatgttgtgggctgccgttttgtggtaattccatgcatgtcatagttcatcactaattaacaaacaaagaaatcaatccaaaactgggtgaatccattctctatggccgagcagtagtgctaagaagggaaattaccttctctatggaagacggtgtggtctcgcgttagctgctttgcggtggatggcacacgatcagctaaaaccctacagcaaaagcatcaatcatcagtcaaacagctcggcgagctcaaatcctgtcatcctgatcagataaatacatcaaaatttaaatggaagaaactaattcgttaatcttggatatgatcttttggagaatcaatttacttaccaaaataaatacttgatatattctgtctatcctaaactcgatttcttccatgaagaagcactaatctaattttccatgatatcacctcaaaacatcacgcaaatggaaaggtcttactttgcaacgcaatccaaatttgagagaacaaataaattcagcgagaggtacagttagattttcctgtagaatggggggggggggggtacttaccgtgcacgatcactccacctcacgagctgatccgctgcaaatttccagtcatccacactgtaaaacaacttagaaaatttaagaatggcaaccaatgccagaaaatcgcactgagctaacacagtgacgaccaacacacaacggcttacacggatctacctcccaacgaggccattgaccatgacgatgaggtgctccaggaagcccccctccctacactacctcggcctcggccatccgcgtgctccactcgtcctcccctccactacactctgtctccccctccacgggtccacctccggccgcttccctttcacctccttcacggccactgccagccagaaacagctcatccatcccgagctactagctgctcaccatagccacagccgcggccgcggggacaggaacatcaggcggagtggtccgacagcgcgtggtaactatgaccgggtcccaatgttagagtaggtggggctgtggtatatatataaaggtggcaccggcaacgatcatctagctaggaggggaggatgtggccgccttggctaccgtggctgctagatccactctgcatcgatgagccagtccatatctggatgggcagatccaagcaccaattcaaaggccgccaccgttgagcatatgcacaaggggatggggtgcatgatatgttgggaaggggggggagcggtgacaaggaggggatgggaggagccgaggaggcagcgtgctgggtaaggaggggatgagatgagatggcggcgtaagggagggtgggggaggagttagaggaggggaggataagagagggtagcgggcggcatggaataggaataccagatgcacacatgtgggggcggcacgccggtgaggattggggcaagcggattgcggcgtagggaaaccctactcttgatgagagggagaggggtgggggagggggggatgattagtagagagttttggttggtggaaatgcaggtgtcaaccatccgattaaatactatggaccaccaaatcaatcataagtgtattcgagggaggatgtgggtagtggactgcatgttaaaattgacggacgattaaaaaaagatgacgaaacagaagcactttgatttgttcaggtaggtaagttgattttttaggtaggtaaggtaagatatggaagtgaactaacttgtaatatttttatttgttattatcgagaagtgatagctcatattatttttcattgttctttactacaatattacgaaatgacagcttgtaattgattcccttgttatttagtatagggaaaaactcctaatatgccatttgataaatgacaataaacagatacactgtctacagtatctcacaaacatgtaaattgtaggattaatttgactagcaattttctatcacatacattcccacagttttcatctaatctattattgttataaggaaatatcttatattatcaaaattgataacagtaaaactaagttacttccaaacaatactagcaatttgctattatattttgcacatctgtcatcacatttcttatataaagattatcttatgtcttctatggctgcgttcgtttgtgagacatagggtgagaaagcatctcgttttcctcgcgcacttttcccaaactattaaatggtgcgtttttgtaaaaaaattttataggaaagttgctttaaaaaatcatattaatccatttttgaaatttaaaatagttaatactcaattaattatgcgctaatggcttacctcgttttgcgtatcttcccaatctccccaatttccttctcctcaaaggctcaaacacaccctatgttgccatatattggtaacacaactatacaacagcctatcaaaactaatatatttcattgactttttcttacatgtttgactattcgtcttattcaaaaaatttacgtaattataatttattttgttatgagttgttttatcactcatagtactttaagcgtgatttatatcttatacatttgcataaaatttttgaataagacgaatggtcaaacatgtgaagcataaaatttttgaataagacgaatggtcaaacatgtgagaaaaagtcaacggcgtcatctattaaaaaacagaggtagtatttaacaagatataccagaaatatgagataaatagttttttttattttctagaaatgtgcatagtacttgcatgtaaactagtagttatattttttataaaaatgttaattcttgaacatttaagaaaatgaactaggcgtgtgttcaaacaatataactttcagcgtgccatataaataatatattcttttatagcaatgtggaactatattagttgagattttttttcaccaaaaagaactgtattacattagaaaaaaatgagaaaggacaaccaattaacatacttaacaattatagcaacaggtagaaagatagtttgtcaaaatagttggttatacaatatcatattcacaaaataatatctcaaccattcatttgttttatgaatgcttgtgagcaaggagggccatgaatccaggaattcacacatacttcttttgaatagggtgatacatatgcacgtacataaagtcagtaaacatgtgccaacagacaacacaattcaggtgaaaaccggtagagtatgatcttggtcctccattttcgggcataaacacataaaatttgacaagaattttacagtcgtatggtagaaatttcacaaatctgttgattaataagatattacttacaaatgaatcaaatatcgacccaaaattattaaatatttgttaataagatctcttggaaacgttaatttttcaacattctattcttaccttttgaaattgtcagcagcctaaagatttaggggaaaaactgaatgaagatctattcacattcctctattctttgtctcatatatatctccttaatgagcgggtgctgcattgaatcacattaatctgtgtggttcccgattaaaaaacagcaacgctatgaacacagaagaaaaggtctggcagtttcggtactccatcccagatgaaaaccccatatatggcctttattggttagatcgagcgatgacgttgagagtgatatgtccttcttgaaggtgttccttgtagaaccagtacctataatccaaggtgaatacctttgacctgaccttcactcgtcgaatctagtatcgatgatgcaagtcgtgtcgatacgaaggtgagggttcccaaccctcatctaagaacaaagcctaaagccacatcattttttttgtcacacaattgtcatgctcttgtggatggcatattgtttagtttcgatgccagatgatttttttcccttttggctaattggtgtcttgaaatttactccctccgtttcaaaatttactccctccgtttcaaaatgtttgacacagttgactttttagtacgtgtttgaccattcatcttattcaaaaaatttaagtaattatttattcttttcatatcatttgattcattgttaaatatactttcatgtacacatatagttttacatatttcacaattttttttgaataagacgaacggacaaacatgtgctaaaaagtcaacggtattaaacattttgaaatggagtagtttgtaatgttttttttggcttttctggctaaacttgtactaagattttagcatggtggtagaatggttgtgtgtatctctagttgctgcaacagccagaagttgtacttctgttttctaaaattttttcctgccaagggcaaattgatttttttttcattacacatagttctgtacactcaatacccatccttaaaattctggctctgcaaatgcttcaactacacctcacatcataggcacgatcagttatatcaaataagtaaatatcacttccctgatgataatgttacatgagtgacagcatagtgaggatcatatattctgaattgccagtcttgcagcgatcataccaatattatgttctacatactcaatcccactgtttagtctttcaagagtgtttgttgaatccattgcttgtatcttatatttttgcagggaaagaagttctgcttctgacatacctgtagtgcatgattttgatgttagatactatctccgtttcaggttataagactttctagcattacccacattcatatagacgttaatgaatttaggcacacatatatgtctagattcattaacatatatatgaatgtagacaatgctaaaaagtcttataatatgaaacggaggaagtatgatcataggactacatgaagctgctgcacacactgtgcgcaacatctgtttttgttggtcattccatgaaagattggcatacctcattgaaattgaaatttcaaataaaaagcaaaattcaacattgcaagctatatatttaggcgataatgatctgttgtcacctgaaacagtctggtacgcagcaaaggagagacgttcgggtagcgcagggataaaaccttcattatactcctcaaaaatttctttttcagaccacaacagggaggccttgatgttagtttgcaatggttcatcctcaggtacctatgtggcaaaaatgaagtctcacgacttacgacaaaaccattgttcagcattcgcaaattgctgaaattacagtggtagtggccaaaccttcagtttcatctgtagactgtgtaaattacacatagactctcttagcttggaaattcttaatcccaattcaatactctcggaagatatgtccataatgggagaaacatcaccacgcaagtagggttccatctagatcaatgaagtaaaacaggagaaggactgtgaatcacaactgctcaaataaacgtacagttttaaagagcatgtgcctgaaaagtcatttgtttgtaccacttcttattagtataaatacgtacttcaagaccaatgcaaaaaaaaaaaacattatataatgttccatcaaaatataccaaaccagagcttttttttagacagtagaagtagtactttcgacttgcaccaactagggatgtatacaatcacatgtatggacaccaggatttaaaccttgatggatggagacgcccatgactccatcaccacactataaacaatgcttccccaaatcaatcttgagaaaatatggtcatcacaattacaaaggaacttttttaaacatgtttgaccgttcgtcttattcaaaaaatttaagtaattattaattcttttcctatcatttgattcattgttaaatatatttttatgtagacatatagttttacatatttcataaaagtttttgaataagacgaacggtcaaacatggctaaaaagtcaacggtgtcaaatatttagaaacggagggagtatgaagcattgaatggcacatgagttcctatcggtgacacaatgcccttacaggatcaatgcggcaatgtctggtggattatacagacaactcatggaatttatattgattaggtatgacatgttataagtataaacattgaaaaaatatttcaatctacaaaattgcaatgaggttacctgcaaaaggttgataatgtttacacggcaaactcctctaattgatactagtgctccaatatcaagcctttcaacctatactaaagaaagatcattgagtagaaaatgtaaataatcctatgcagaatcctgtcataaaaaaattgtaaaaaaaaagggtatgaaccacaagaactttacactttctatctggaccaaacaaccatgtcttacagcaaaggaagctttaggtgaacctgatacaactgggtcgagcaccaaatgcacaaaagaattgtttgtcctatacaaggcctgttgagcaaaaaggtagaaacagatgagaaataattatattttcgcataactacaacaacactggtgcggtgtgtgtgtgtgttttttctataacaagcaaattacccggctttgggagaaagccaaaaacagagacagtcttacataacggaaattggtgtggtgtgtcactcagctgaactactgaaggtctcgttataactattaatctagtgatagagatatacagtttttgtaattctgttacgtcatattatgtcataatcccatttccaccgagaaattcttcccttgcctattaagggtaactagagcaccttagaagagcttagagctgaaatcaaaatatagcgcaatagcaatataattcaaacttaagggattcagcaaatggtaattacctcttctagcaacgccagatacctagcctcatacaagtgtaaagtcttgcactccgatggaatcaacacctacaatatttttactgtcttagcagcaccctagtgatttagttgacagtaaaacgtgcagatagtaagcatttgtggcaaccctgaaaaccaaacacctctgttagaatgcagatatttgacccaatcggcctttgccgagtaatgagccagatacctacatgctaccaaattaagatactggctagcttgcttagtcgctgcagcatatgacgagtaactgatcaaattacttcttattcattataaccagtaacaattcagagaactgttactatcacagatactgcagattcagatatgtttcttcacatgtaattcccaagtggggtgaaagaaaaattatacagacgttacacaaaggcagctgaaggtaaacaattggcatcgtgatcaagttagtgctaatcatggcatacagtgcacagacactggttgctagaaacaatcgtagatacatgccagccactgccactatgtcagggacggcctaagctgcgaaatttttttggtggctcctcatcttagcctcttgcaagaaagcaataactttctttcacttgaattagctacagataattaatccagctcgattcgaacactgctattgacctattgttgtgtcaaactgacggtatgcatgtgcgtccaatttcaaatcaccatagccataggtaggggcggcagctttcttgttgttcagaggtcatgaggtcgtacctctgcgggctggaacgggaggagggggaggtcgagggacgccggcgacggcgacgagcagcgtactacggcgcggggatggcggcggcgcgtcgcgcgcgcgtggagggatgctggggacgagggagagaggaggcggagcagagccgaggcggccatggatgggtgggagtgggagccgtgggagagagataatgcgcacctgtttcctctcctcttcttttcttttattttcttttgttttattttcttgttttctttttaagcctcaacccttcaagtacaagtagtagtgtctgaactcacgcacaaactcacaccaccacaccgcacactacacactcacacaacaagatctacgcaaatacccaaaggctgcacgtggctgagagatatgcgaagtgaactggcttcgcacgtgacaagcatgtcaccttgaccattgtggcacattcacgtgtgaggctgcaacagaaggaaaaggggaataaaaccccaatgcgaaacccgcgtcgagcggcgctcgaacgcgggtggtgggcgctccaccgagcagcccaaccaccgagccaacggctcgttcgctcttttcttgttttgtcttggagaaatcgtgcaaatcctctcttactatatatataaaaagttataacatttaaggatcacgtaagtatgctatattatctatagttttataatttttttttaaaaaaagttagagattcaaaatgcaagcatgtttcatcatcccacataattcatataatattttgatatatctctccatcatttttttataatatcctataagttcatcatcacttagttaatgttattttattttctctcattaagccatataatatcaattgcttttagtccttatatgattattctatggttaaaattatctttctccttttcttctcattaaaccatattatctcaattttttaagccttcagatgtatagtctaaattatcttccttcttttgttctcacaccatcttacttttacatttgaatcatcattctatataccatttcaatttaaatcacatcaacttatgtagtcctcgtcaccggcctccttcttgcactgcgccgcatctttcggtccttccactccttcgcccacatcgcgcgcccaccgccgccgcgggagacgacgggagccatggatggatggaggtcaaagggcaacactgcaacacaactctttggctgcagggatgattagcatataagctcgacgtagaccttatgatccagtggttcatatgcaatctcatccatcgatcgaacggctgagaattagtgataacgtggaatgctgaggtttcagctttagatcttaactttatagaaagaagggatttacgtgagggaggtggagagccggagatgatttttgggagatgggattttggttttatatttaaaatagatctaatggtgtaatataatgggcccactgtattaagggaaaataagagtaagatgttttgttctcttttttttagaatttcttgggtttctctaatttattagagcgccaagtgacgtcctagagtgtttatagaaagtttaatggatttttaatatataatagataataaaaaagtaatcacatgctctacccattttcttttgttccaaacacgtagagaccagatgcgtggagattttgagctcggtttgacaataaataccagtgcataaacctcatgcacataatctttcaatcgcaacataaaattttcggtgtataaactttatacgcataaagtttcaatgtgtaaactttataaagagaaagtttcaaatatactcaaacgaattcaaaaattgaaaagtttttcactcaaaatcataatcattcaatcaaagatctaaaaatttcttttttatatataaaaaaaactttgttcaactgaaatctctaaatgtcccgctccaaatcatgaactttcaactgagatatagcaaaagatataggagtaggaagaacctgttgaaataataagcacataatgatttaatttattccataaataaattatgacattacagatgtaaactagaataatcgcatcattggatctacacatgtaaactaagcagtaaaacatgaacagatcgaatatgcgcaacatgttgaacgcgtatcgaggttgccgaaagatcggttgctcagcaggaattactcgcggttgtggacattgacgaagcgtgagcaaacaggaagacgagccgtcatggacaaacaaggagcggtcgtgtgaagcgcgcgtagtgtaactgaactggataagtcgcgcgtaacttatccggactctatgccattgtcacacatgagtaaccaattttgcagaccattcgacgcgtaacatcgtgcacgcgccaagcgaggcgagcgagcgcatgtgttccccctcttctctccacctcacatgctttaagtggctaggagggcatcctcccatttaaggaagtccctctctcctagaataagcaaggtggtactaaactccctatgcatgctatcccatgaggtgaacttttgtgatttttcaaagaattaatctttaagtggggtaaggcctatctattaatttcaacagaacccgcacccatctaggatggggtttcacgtgctatggtctatggctcaatcacatttttttctgccctcatatgtataggagaaagcagagattaggggagaagagtggctgcggcttcactgttccgttgttgtgtttccatccgtgttccgtaccatgtggagggcatcggtttgtcgattctttttggtggtggggtcggcttctatctaccgtgcagaatatgacgccgtcactactccgtcaaaacaaaccgggtactagtacttttcactccgcgctgcacaacttggaaaaccactgcatccttatctcttgtccccaaatcagagagttcatctgaagttctgctcatctgctgctctcctcatcttcctcttggccgcacgcaaccatggttgctctcgcgttgtcggcggccaggctcgccggcttggcgtggtctgcactccgcatactcgtcggcttggtgtagttcaatggtcagtaccaaatgtggaactcccttgttgctggcaactactatttgctatggtgaagaagtgaagaattgaagatcgaaacttttttcaccatacagctgcattaaggtagttttatttgataagttcatttttgcaaacacctcttgtgttttgatgcttctaaattattatgatttttttcacatgagccaaacaacatgtttggtgggaaccatatatttgatgctaatacaagagaaagtactagtatgatttgacagcttgaatcgacatgggaattcagattaagatccaatcttacaagttgtaatgtgattggaaattggtaaaggtgctaattaatatgaaaaaaaggtggggattttaatttaaatgggcaaacatgctatagggatatgtatcaaatgtctgtgcagtctcttcatgctgcatcccttgactttgtttagaagttcgaaataaccagatgactgaagtaatgaagcaccttcaacatgatagtagtctggcatttgcatgtgattgtagttagtgggaatctctgaacgaccctgaatctgtataaggcaaataataatcagtagcactgataagagagtctctgccaagtgtgtgtgtgtgtgtatatatatatcttgaatctactaacctgcatcatggtgtatggcagtgatggtgttaccacctctgcttgtactggacactttgatgtgcttgaatcactctttttctttttactccattgtgttgccttgtcaaaaccaccaattggtctcctcgacccacgaatggctttctccttaacctttatgcctcttgctttactcgggccaacattttcctctgtgcctatgataaaatatttttgagatagctgatttagattataacatagtagtcactagcataagtactattcaactcagagtaggatacaaacctgatttatccaaatctggatcaggccttatactcaagtatttctccacatcttctgctaacttttgtgcattgttggcagccattaagtatgtttcatcagattctgcagctcgagatgctattttaacaaacattctgcacaagtctctcctgcgcgttgataactttattttaggatcttcatgagtactgcagttgctctttatatgtagagattttgcatcaatggtccatctttgtagtatgtattgcttaggaatttcttttatattgttaacatcaagtatcttcaatgcatggcaacataggattccgagaaattcaaacttcttgcagctgcacctgactttaccttctgttggagaaaattttataacatgctcatggtgcttaccgtgaacttttaatttgtacatttcagcatcaatatcaccacagtagtataggtcacagttcaatgtttgcaacacttgttcctgaaacactttaaatattgctggagtataaattcttgttgcttgccttaatattgtcaaatctacttttggccatggtgtactttgtgttgtcttaaagtcatttttgacttcctcatatcttttgtctgacaacaacctgtcaaagtgttccaagaaggtaagtatgtcatatttcacactgatatagcccttcaattcattgttcatgctctcacttctctgtgttccactcatatcagcagaaaatgtgtttctcccatacactaatgcccattgctcttttttctgaaatagcctctcaagccatttgttctcctgcagatcatactttttaagcattctattccatgcatttataaattcatcttcctcctctttgtcataaatacaattctgaaaatctgcattgaatttcttgtactccttcacaactccagcaaggtgtttgcaggcattttggttcatatgccaaacacaaattctatgatgactttctggcatgactaacttgattgctttggccattgctgcgtcttcatcagtcaatatagtctgtggcttctttccagacatggcttttaaaaatgtcttgaaaagccaaacaaaactatcagcagtttcatcatacaaaagtgcagcaccaaaaacaacgcttttcttatgattatccacaccaacaagcaaaccaaatggacgaccatcatttagttttctctatgttgtgtcaaaacaaagaacatcaccaaaaacttcataatcagcaatcattttagaatcagtccagaaaatatttgttatcaagtcatcctcatcaacctgaatggaatagaaaaaattaacatcttccgatgattttttctccatatattccaagactccccctgtgtcaccttcgtttaccttcaatgacctctttgaatataatatattcttcatgtcttcacgagtaaatccaagattctcatatccacccgcttcttttgccattaaatcaatagtagccttattagaaatgcctactgattttgcattttcagcacttgccatctgtgcttcagttatttttctttgagatcttaagtagagggcctgacttccagtagcaagaatgtggttatgctcgtgcaagaattcatatatgcaatacaatccatcatccctaagacttatcttcatgcatgctcggcacatacatcgtgtttctggcctactaaaacactgaccgtaatttgaaatttggtcttctcttttatcatgaccacgagtacctattgttaaataaaactaacttagtatatgaattctatatgaacactgaactttgtaaatataagttggaactagtacctgcacgagaacaacaaaatgtccgattctttattatggtggaatctttcacataatggtaactgcttcttcgaatgctaaaacccatgtctcgagcataggcattatagaaatcatatgcctcttgttcactgttgaatttcataccaatgattggtgccttccctttggagggatctgcttgtggagtagcttcaattttactaggatcctgattaatatacccgttttttatttgagacaaattagaaaagaagaaaaactttcatgaaacttacagaaaaaaagggctaatagaaaagaagcaaaacttctatgagatttactgaacggagatatgatgtgcttgtagtgatcaagtctcaatgattactaataaaagaaagtgaaaacattatgaagtcttactgtctctaattccccttccaggttaccatgaaagcttgtccctggatgatgcagtacaaacgttccagcagaggcagctggttccgtcggcatggttgtcacttgttcatgcagtgaatcggtgaccttgattgaccttggaagattagatagagaggccattgttgttgcgaagaagatgattgtgatccgataataatgtgccatatgtaaagcttaatctattttctgaaaaactgtctaatggtttggcgccttaatttttatttggcgcctttgtttccctggagggccacgctaattaggattaatcgctaactgcgtaatctggtaattgacggagagaataatcatgtaatctccgtttatggtggggccacacaaaaagaatcgacaaacggatgccctccacatggtacggaacacggatagaaacacaacaacggaacagtgaagccgcagccgagaagagtggaggaagatgagatgttggatgacatatgggcctggctttttcttattttatggatgacgggactgctagataagcagatgaatagcctgacattttcttatttcagccctgtctagttcaccccaactatcccaaacttctaactttccatcacatcacatcatatctaaaatttttttacacatataaactttcaacttttttttcaaacttccaactttccctaaacttctaattttttttaggaactaaacatagccttcgtagatgattggactggtatttaggcgaagagccaaagaggccttcatcaactacccagcaaagacattaatcaactggtactggctagaagagttgaaggggtcttaagttgtgttcggcacagaaagttttctgctaaatggtgagtttttttttcaaaagaaaaatcgataggaaagttgctttgctaatccattttcaatcttttagctaatacttaattagtcatcattaattagtcatcagctaatgagtcacttcattttgtgtgcacgggctaattagtcaacagcacgtacgcattctaaaatagtcgtgagaaatgagtgacttcatattctaattaaaatacttatttaagcctatcttagccgttgggaccagattatggccctctttgtttaggcttaaatttattggcttagacttttaagtcagcttattggcttataagatgtatttaatgtcctaaatttaatggtggagtcatgcatctacctcacataaaccaaaaaatcttatccaacctaacttttggcttaatagtgttagagtggcttatggcttcaaaaaagccaaacgagaaagctgtttgtttatttaggcttagacttttcatcttataaattgacttataagcctaaacaaagagagcctatatacagtatatttaagcatcactttccttttctttcgtatgcctctccgccccacctcagcctatgttaggccattcccaacccaatgactaggatggagtcatggagtctatagcattaaataagctgccacctaaaatgaaaaatgatgtggcaagtgaataaatgaggaaagagaatgaaaccatgtcttgcatgagacttggtttctacacgatatccaaaacatcatgtgagataagtagcattaaatttaagtatagaatagtggtgtttgcattggaagagtagtgtctagtactagtttcttgatgatgtggagtttatggaaactatgtctagtatcttgggttgggaatggccttagcatgtgcagatgtgcttcattgtagagctctgcatgcaattagaaagtatgcatgcatgctaaacatggttggtttaatttttttggcaacttcatactattttttctcctaaattacttctccaaactatgatccaattacactattaaatttgttgctattaattttttacaacaagaccacatgtttcgatgaaaaaaaggtatttagctttgttaattcttttaaatgttgcacgtggattaatttaaatgtttcaataagtattttagaatgtttgactagttaatttacaaatgttgtacggtgctctttgaatatttcggcaaatattgtgtaatgtctctatagttacaacttaatgttcctacatgataaaacatgttcaatataaagtttttcaaatatatcatatgtcccccatgattctttttatgttttactcgttgggactcaatgcttcatatattggttgactatttttaaatgttgcatatctctgaaagtgaattaaaaacaatattttacaagtggtgaaacaatgttcgatttttttttatcaaaatataatcatgtgatatcatgttataaagattgaattataagtaatataacactgtaatcggataatagaccaaataaatattttaagaaaaaaatcaaaagaaaggaaaatgtgtaaatgtacctgcaaagaccttgctgcagacatgcatgggcacattgacatgcacttagggatgaaactggttcggatagtttccgtccgtctggaccaattttcggattcggaaaaattcggtcggaactatccggaatttctcggattcggaaacgtattcggatttttttctcgcatacgaaaacgaatacagtaaggtgatatccaacggaatcggaaaacggtcggaaactatccgggatttttcatcggatatccggagatatttttcagcaaaaaaaataaaaagaaacccagaaaccctagccggctagccggccgggccagctgcccgctgccgccgcccggcgccgcccgccgtgtgagcccaccagcaggctctgccgcccaccgccgcgcggtgcgccgctcgagcccgcctgccgcgcggcgcaccgctctcggccgatcgccgcctgccccgccccgcgttggctcatccggccgccgcccgccttgtgccctgtggtgtgtggatgagaggaagtgagagagagagagagagtagaaagtgtgtgtgagagagaggagaggaagagtcaagaggataaggttggggtgaaaaaaaattggtggattttttttcaatgtaaaaatcaatttttattttatatgtggctctttaaaatgaatttaaaggcactaaatcaactcatttgaaaaaagttgttaaaaacaaagttgtataacttattgagatctatcatttttattttggtcatttctccgtccgagtttgattaaattatataaaaatttgaatttaaaaatataagaaattcaaataatttttcgggtagtaaatgatttcaaatgaaaaaattgtcaacaacaaagttctataacgcatcaacatgtacaacttttgttttggtcatttttctatatgactttgtttgaaccgtttgaatttgaatttcaaatctatatgactttgtttgaaccgtttgaatttgaatttcaaaatatgacaacttcaaataatattttgaaatactaaatgatttcaactgaaaaagtcatcgacaacaaagttgtataactcatcaagatctataacttttattttggtcatttcttcatccaacaaagtgatagtaatattgttaacaaaatctacatctatcttatttggttctataaactataagagagatatgtaaactttgtgaacaatattactatcactttattagataaagaaatgaccaaaataaaagttgtatgtgttgatgagctctacaacttttatgttcatgactttttcagctgaaaataattacagcttcaaaatattatttgaagttttgaaattcaaatttttaattgataaaacaaagtcacaagaaaaaaatggccaaaataatagcggtaagaacacaataacatgataaagcatgattttagaaacatttaggaaaaagaatcatctaatttagagttcatatgagtgagataaattagtttcaaatttccaaattttatttttgcatacggcttcttaagtcccttaaatggtccacatacaaacaaatgaaaaaaattcaattctgaaaaataaccactcaaatttttaaaaactttcaattgaaatgttcaacccaaaatttaaaatattcaaccaattttcaaaaatttcaatgtgcctacgaaaatttcggtgatacacattaatttatttgtttcatgataacataaatttatatggaaagtaaacataacattttctatctcccccttgcccttataaatagagataaaatttgaaaataatgatgttttgatggctacatctctttctcgttttaagaagcttattttgaggggtcttcatattttgataattattcgttatcgtattcgtttcgattcgtattcgctccgtatctgtattcgataatattcgattccgttttcgtatccgggtttccgattctgatttcgattccgagaaaaaatatgaaaacgaatatgatagagctagtttccgaccgtattcgattcgttttcatccctacatgcactggatatagtttgatcaatagcctaacatgcattcagccacatcatttagaaataagagctagccattggatcatttccatgttttaatcacaaccattcattttgtacctattattcctcattaattagtatataagtcagaataaaatgttattgccataaataagttacactatcaccatctttggcaccattgcataacactttttcatctcagcctatatatactcataactatattttgaaaatttataactgtattgcagctgcacctcgcggggtgtcatctactatcagaaaataagaaaagaagagagaggaggagttaggcgtgagttgggcatccgatttaagaaaaagtgcattttgactcccttaacgtaggacaaatctaattcgtactctttgaccagaaaattggataggacgactccttcaattattaaaactggtgtaatttgactctcttagtggttacggaaaacagttttgctgacgtggccctgtgacccggtccaatcggcggactcaacatgtgggacccatatgtcagtgtcatattttcttctcccctctttcttttctcattttctcccctttttcttcagggcggtggtcggtggtctgcgaggagaggagcgaagtggcgagagggtctcgacatgatgtgctcgagcagcacgtcggcatcggcgggcagtgggtgtagtacacagcgaccgacggcggcgacccgctcggcgtggccggcgtgcatagcatgtacatgtcggaaggaggtggggacgggattcgcgacgggttcctcgggcggttcctacttggggagggtggccaaatttacatattaagaaaaatatcattacaatttgtctatttgtagccatgtcactaaaattttacaaaattagaaccgtgccactgccgttacttttcccatccttctccatctttctccgtcttcttccttctcgcttccgtcttctctctccatctctctgctgtcatgcctctgtcgcgcctcatcgtggaggacgagaaccgcacagccatcggcgtgctcggcgccatcccgccacgctgacggagtagcggacgtgtggagcggtggcagtagcaagagagacggcgctgacggcgcgtgaagcgagccatctcccgcagtgaggcgagatcggaggagagagagcttgccggcgacccaaccatggcaggcggcggcggcgcatggcagctccgctttctcctctccctcctcttccggatttggcggcaaaacccaagcgggtgaaatccccaaatcccctgtctcctccttctccgccaccacatggatccagctgttggcttgccgatctggtggtgggggcaacctcctccacagcaacgaccatcctcctccgccacctcgacaccgccaccgtgctctggcctgcctcccgcacccccggcttcctcgacggtgatggcttcgtcctcttctccatgggcggcaccatagccgccgctgtcctccaccgcatcgacgctgccaccgcactctgcgctctggcctgcctcccgcgctcccggccttctcggaggtgatggcttcgtcctcttctccatgggcggcgccatcgctgccgccgtcttccgccacctcgactccgccaccacgctcttgcctgcctcctacgccggtgaggattgaaggcgacggcaccacgtgcggcggtgaggacggaacgaaggaagaagacaaaaaaaaatgtaggggatggataaaaaacatcacggcagtggcacggttttaattttataaaatttcaatatcacgattatgaatagacaaattataatgatatttttctaaatatataggaaaaaattacaattgcaggaatccaattaacgaattaaatttgaaaatatactgttgattagttttttttctcagaaatatttgggatgtaaatttttttttggcagaaatatactatcagtctcgcacaaccgttacgcgaaaatgacgtgagcatgatgatacagacgttctcacacgaggaaaacgcgagactttgcagtatcgcgtaacgacgtcacgagaccgtgcggtgtcgcgcaacggaaaacgaaaccacgcgtcctcgggcgcacggagaagccacatcacaagcgcgtgagcgaacggcttgcttagaaagtagccgcattattagtgattaattaataataattagtaattaatgaggttgattagcgattaattaatcgataattaagccattcggtctcgctccttctcgctatttcctcgcggtctcgcgttttcttcgtgcgagatcgtccatatcatcatgcccacgtcattctcacgtgactgttgtgcgagaccgatagtatatttctaccaaaaatttacggcccgaatatttacgagaaaaaaacaaattaaaagtatatttgcaaatttaattctccaattaataacccagataataatacagttccattcctattgggctcatgaggcctgttatgtcggtggcccacgtgaggaacgccggcctgcacgccgcacctctccctcttcaggcgtttccatccatacaccatacccacccacactactgcccctcattccctctatagatggccatatggcccgaggcccacggcccggcacgaagcccgcaattttggcccggcccaagcacagcccggcccgactagggtcgtgcccgtgccggcccggcccgacagccgggccgtgcctgggctgcaccctcggcacggtgggccggcccggtacggcccaatcaaataaaaaaatacagggatgaaaaatagacttatataatcgtataaggcatggcccaagacaataggtatacaaaatagacttattatccagccatttaaacacagcccacagagttgagggaccaaaaatagacttatttccagccatttaaacacagccactgagttgacggaccaaatatagactttttctgtgaggcagcacaatagcccatcataccttcgggccggcccggcaaaccccgagtagtattgggccgtgcctgggccgtgtatgccacccgtgggctggcacggcacggcccggtgcgtcggtcgagccgtgccggcccgacaagcctcggcccaggcacggccgggcttgggccgtgccgtgccaggcggcccagatggccatctataattccctccctctcttgtcctcatgcacgaccacgaggaggcgaccgccgccgcacctctcctcctcttccacgacgaggcgccggtctcgccggcggagcccagcatcgccggcagatccacgtcgagcatcgcggcaggagcaggacagggagaggccgaggacacagcgaaaggggatcgatcgatcgatcgatctagggttttttgagctccgccacccgccccctccttcccgatggagaccccctccgctcccgctcccggggatggaaactcggctcccgcatcatctcgggtgacgtttgaggatatgcttcgcagctgcgatcagagttattatcaaatgctcgggttccctgacgctgcttcctacttcgaggcaaaggagcgggtaggtacccagattatcccttctccgtatggatcgatcgatcgatcgaccgaattgcaatatcttcccttcagacattcatttggctcactggttatgcaatcattttgcgactaactataaatatggcgacatgttttttggggaaaaaatactagtctgttgctgataacaggtcggcaacacagcaaagagacatatttggttggcaaaacagttagattaaatttcctgcaacatataatatttagcaagaatataacctagactagatcggtggtaagaattcatatgaacaagctccaatcaaatttcaaatttttattatctatctatataaaagttacatcagagttacagtgcaattacaatgtaactttgttgtaattatatataattatggtgtcattgtgctgtaattttaaccaaacaaaaagcaagctagtgctagctgtctgttcccggtgtaaaatgttgatttagctacctgtttcacactgctacatgcagggcccttatggagtgtagaaaactagtgttgtcttctttagttggatagaagcatgaatcataacacagatcaaacggtcaaacaacttactgtgattaagcaaaaaatctgttgacacaactatagcaactccaatgatttttggcttcctttgtagaatttgttgggtcagtatattgattacgcaatgtttctttttgggcttcctttgtagaatttttgggtctgtactgattatgcactgttttcttggcttcctttgtagaatttgttggctcagtactcgcgtcaggtattccctctgctatggcctatactggagaaggatagcctcacgcgcttcaatcgactttgccaagggtggtcgcgcttgatgggccttcgtggtttcatttacccggagattctcagctccattgtcgccaacaacgctttgcgctgtgccagagtggccctgcaaggcagctctccgttgcgcggacgtcgtgccgatcccaacggcctccatccttatggctacacggctctccacctggccgctgagacgttcagcgtcgaaatggtcaagctcctcctccgccacggtgcgtcagcaaaccaccgcactgagggcgactacgtcattgagggcctcctgcctcttcacgtcgctgttgagaatgccagcatgcacaaatacctggaggacaattgggctgatggccactctcctaacaacctcatatctctcctctgtctgccagagatggttagtgtgcatctactataataatttatcgcgaacatccatcaagctaccactattttgtttcttttagtctgcttacatttacttcatatgccattactctcgccgttttgttcagttaactatgtccatgaatgcttacatgtaaggcaaaaattatttactagtggtagggtagctaccgccatgcctcatttgttaagtgaactttatctgatttcaagatttttttaaaatcttgtgcataactaagcccaatcatttctccttatttgttgcatgcatccatcgaaacttgtttacagatttttcatgttgcctcccatttgcagaagatgtatttggacacaactagattaattgcccaacatacgcataacattgtcgatgagttgtgggattacatcgataagaagaagtttgtccagttagcaattttgctgctggcttctcagaagcagctccatggccccataaataggagccgtggcaaggctaatctgaatgggtttgaatctattagacggcgcacttatgaagctatcagtggcctacatctccagatgatagctatggtgaatgaggggaaaaatggcagtgcgcttaagaagctgaaagagaagaaggaagcccttcttacagcagacgcactagttggtattatagacaaagctggtcaagatcttgaggattatattcagactaactcagaggtagttcctaaatgatacccccctttgtgatactaatgagttttcattttctatttttatgtatgcttcaaatttctgtgatgttgtgcatgcatgacttcgttctgctagggatgctccaattagtaaaatgctttcttttgtgacttgtcaacagtaggagagattcctatgcagtttaccatctagtcatcatcccataaaaaagaactaaacatatctttacataaacccaagagattgtcagtgctgctttaaaagtttatgtattcctgtttgacagtagaatatttttttttaaaaaaaatgtgttcaatttgtaacttagtaactatttttattgatataggataattctttttgtcacaatgtagttcttttgtcagtcatctaaaaattaactaatacaatttaggggtaatttcgttcatacccttgttttgatgttcaatatcgattttatcctcattttttagggttttcatttttacccctgtttttttgaaacgaagttttattttacccctactctggatggtcaagttaacaaaatgacatttataccctcagttgtggttgcacatttgccccaatatttattcattaattctgtttttaccctggtttggaacatgattttggttcggaacataatttcgaaactcaaatgattttgacaaacttttactaatacatatgaatgaatgaacaatttgtagcccaccgtatgcaccaatatgtacaggcagaaatcacaatggatcctagacagaagtgattctgttctgcaaaataggggcaagaacgaaattatccctacaatttaagatcactttcatgggctgtgtttgaaatgtgtactgcaggaaatgtaaaaaggggtaaatgcctaggaataggcctaacatttgaagatctatttggatcacatgttttattttgggcgagtgaaacacctgatagttgttcatatggccaatagctaaacaaaaagaagtttcattaaaaaaatggagaattttgggatccatttggaagggaagatacataaagagtggtagataggaatctcatactatctttcctgtaaaattcctttggaatgcaagaacaacaaagaaaaccaagatagtaagagcgccaagaacatgcgatgattctagagcttcctcacacataggatcactactgcctatcacatcatgaagtgcctgtgaccacttaatcattaatcattctatcactgtcatggttggcactgctgttgccattcatggtggtggttgtgatggaagtaatgggatgacggagagtagtagcctggttggtttaggcagccccaactttccatcaccttttttttataaaaaaatgttttctaatttattgtctctcagtctcagttgtgtacaatgtggcctttgtagtggtaactaggtatgaatatcttctttgccgtcttgttgtgtaaaatcggttgtgattcgtgttttgtgatgtttttgttttttgttttttggtgtttccaagggtcctcctgtgttttcgaaaaaaaagatatatcttctttggctatttccacgaatatttacagcaaatacagccagtaggctactagcagtggtgcagccaggaaccagtcctagaactgcccttgcctactagcgcgaagtagtagtgtataccatgttgagaaatctaaagtagtgaaaatactaaagtttttcaccaccacaaagcgccaggtcatcggatatttaggaccgtcggatgcagccacgaattcaaccgctgccatcagatctgaagtgaagaggagtgcaaaatcctggtgaatggtagaatactccagagtctggccaaccaataatagaagccacaccaccatgtatatataagaatcactgagtgctccaccaaaaaagaacgcaaaacccagtgaacaaaagaaaaaaaaacaacacatccattggagtaggtgaaaaaggtacaaaaagaaaaaaagaacgcaaaacccatctccctaaacgcatccattccaccactgcctgcccacctcctcgcctcctcctcacctcttcccccattgctgttgcctcctccgccgtgcgcactcgccctctccatatccccgtcgccgcagcaagcccaccacctcagatcctccccatcccctccggtaaagttcctcatcctcctagtgcccgtgacagcctcctagtccccagccccatgccgtcgccttctcctctctacccccggcgtcttttcccctctctgcacccggcatctcttcctcgcacagtccaccgcctcctcccccattgacgctaaagccttgagctacgcgctttctcatccccatcccaatcacagctccagaaaatatcgaggttcacaacggtagatcaaggcgggcaacgataaatcggatcgcagcttccagtcacccctcgtcaacgggatcaacacgtcaataacccttggtatttggtgagtcacaaacttagtaaatcccatcgcctcctatctttgccttcccaagctgtagccaggaaccagttggggtcaataaagaacagtgatgggatggattgatgaagagcaatgttataataatatattagaaagcacatgtccaactgtgtttcgtaaaaaaaaaaggattgttcctgtgttttgttcagcaagggaatattaatgtgataagctgatagccaactcaaatgatttttttttcatggacaatagggtctttttaattttttttgccttctgagttctgaagctgaaagccaagcgcaacagttcatggtcaccatgtgacaataggccctctggtgtgtccttgaagcctgagggcacgttaaccttaacctgtttaagtacaaaaaaatttaggttctacttgatatatctttaaagccaacatcgatagcacctgtttaattgtacaccaatcacctgaatactggagtttctgactctgcatttagcctatgtaaatgtcaatcatatattgcaaactgtttatgcacatgtcaatataggattttagcgtgaatttgagaaacaaaatgtaaatgactgcatctgtaattactacatactaggtacttctgcatttttggcttgcaatatgctgaccacaaatggttgtcaagcctgaaatttatgatgactttcttcactcattctgatagagcttctttgatagaagaagttatatcttcttactctttaagattctagatattcctaccctcaacagcatatttcttcttactctttacgattatagatatccgtaccctgtttaacctttacgatattatatacactttgcaccagcgtatacatatatcttaaatagaccatcacatactaattttacaggtcatcatggtcgtgccacgcgcgacctacgtggctagtgttatttgaagttatgaactcagtaccatggcaaacaatgttcttaaggtggcggcgcctaggcaacaatgcactcccagcgcgatgtagagctgcaggagattcagaaaggtcaatcttgtgttatcaatctatataaaactgatggtcaaatgttaaaagagttggacttaggacaaacctagatggacttatatttgtggtaagaatttagtacttagaagacgatctttgtgtttttactgtgctgtactgtttgtcttgagagatgttctgttcaagggttattatgtgccatgcagccaccaccacccttgaaatgtatctgtataattgttggaataatgtcttgaacatttttttagtgacttacaaatattttgatgaaacgtaggtaaaccatgaggaggtccttgaacacgtttcatcaattctaaacagcaagggcattgttccttctgggaaagggatagacactgcagaccttaaatggtatgtcatctattagcttcaccttcacttatattcattccgtatcttctaaagcacatccgacatatagttgatgaggcgttcttttcctaaaatattccttcttgttttgaagctaccgatatcctgggcaaacatcaattaatatgtcacattcacgaggtttgttacttcttggttgattttatttcttaatactagaaaagagaaaaatttatacttccacctgttgtttgtggtgatgcactactttccaatattgcagtataaaaaacctgatcttatccagtaaaaaaagggggtgcaacgtaatgtaaagtgaatcaaaactgactggaccaccactctgctgctgaccgacaagtatcagctgtggtgctcgtaatattgtctgcagattcttttttttattcatgtatgtattgctgctgccaagatgcaaggacaacgattttcctccatatcgctaacacccataacaatcttagccattgcctattgattagatttctggctatgattaactttctgttcctttacactgtgcctttattgaatatagttgacccctaaccaattcctttattgaatataatggacactgggggaactaatgaagctgacaagtcatatacccttaatgctgaaggttgtaaaagggtaaggtgatactttactaaattggaattgtggattatctttcttttcccatgtcaaaaatatgtttacttcaacaaacatataattgctatgccgtttttttgcaagtacttgacagcaaaagcctttcagttttgttgaaaaaaaaagttttagtctgatcactgtaacttcttgtgatcctccaaatggcaccgtcaattcttatcttagttgttcaagtacagtagtgttgtagtctactcccttcgtttcacaatgcaagtcattctagcatttcccacattcatattgatgttaatgaatttattaacatcaatatgacttgcatttgtaatctgttgagtctaatttgtacttatagatatttatagtggcattattcttctgaagtaacatatcctatcaacttggtcgattaaatatttaaggtggtatttgatataaattaaataaacataacacgtaacctctagttgccgccatgctgtttaacaagttaccatgtatactcattgcttcccaggtgtttgttgtttatacattcagatgctacgtctcatgtaaacagatcccttcaaagcgaccatctaaactactggtcctaaaagaagcgagagataagttctttccatactggaaatcggtgctgtctgcccgtttgccgtgaagatagttccaccctgtgaaccaagcagcaatgacatacaaaggactgaaccaaggaaggacatcctaagtactgaagcaagcaggaaggacttgcaacccccaaacaaatcaatcgcgaatcttgtttcgacgtcaaagccccgattggcaagcaattatgaatgcaggaggcagctttgtgctcttgctgcgatgtctcttaaggtgttgaggcgcacgtgagtgaatctatatggtaatatacctgttaaaatactccttttttaggctactgcatgatcgtttcttttgttatagaatcttttatgctcaatgttgctataatctttgtgcaggcttggtaaagacgaaagtatcggcggcatgagagtagctgtgctagaatctgtgttcgtgttcttttgaccttcgtggccgtgttatattaacatgtatgtacttgtcatgaaaataagatatatatataccagatgtaatgtatttcaggcttgatgcaacctggtaacttggtaagatttctagctgaacacattgtgctatctttgggagtgccttaattttatgattaaatgctgtggtgccttgtgcaatgtgaagatcgatttaggttttactgaagtatttatatagtggcgctgcgaattgttgtatttagtgtagtcgctagtctcctgtaacatagctatagaatgggtatggctgcttggctatttggcctttgggaagaaagcacatactctcgtactggggacgtggagtatatgctatgtgacgtcagaaaatgtattattacagcatacgctactaagtacggtatttcgcagtctacttggcaggcagtattagcaggtctcgtggacgatccgcactagctcccatgtattgaaatgtggcacattagctttgatcccatctactaattggctctattgatttgcgtgcacacatgacgcacgtacacgtacccatgcatgcatgcatgcatcctaattaattagttagttaatgcatgcatcatcctagctaattagtaattagttatatgtatgcatgcatatagccgaacttaattagttactactaggatgttaatgattcagctatatgtgatgtatgtgtatgcccgccgatgcgatgcatggtcgcgcatccgacgatccgctccggccgcctcctaactccaccgatttcctttcctccaacccaccggccgtcttcttttgtttgtttggttagcttaattagtccctcaacctcaagagacgcggaattaatccctctcaagttacttcttgacaggtaaatatgtattaatgttctctaatcatccttaatctctatctagctattattataggaaaagaagctggatccctaccacctcaaccgcaaccgcaccggtgtggtcgtcacgtctgtcggagtcggagcccaagttgcattggtgcgaccgcgagtccgaccgacgcactaatcttgcggcgaatgaccggggaaaaaaaataaaatcaaaaagaaaaaagaagcgcaaaaacctactactactactacttccctcactccagagtccagaggcaaaaaccctctccgccgtctcgagagcaccgctgcggaggaggaaagccggggagccggggaggtggggggacgcggcggcggcgctctctcccggcccccgctgcgcatcttcgcgcgcggcgtctctagctctccccccggcccgcccggcgcccatcttcgcctccgccggtacgcatcttctcgaccttgaggcctctccccctctcctctcccattctcgagggttttattttgccatgttgccttgcctgcgcggttactggccgagagtttcttggtgacgaaatcttttggctttttgatgggtacggttctgtctgtgcgcggggaacttcacaatttctgggccggtggggaataatatatgactagttataacacaggtcttatgtctcttttcttatgacacattgtggatctatgtatgacaccattatggatgcactaagtagtttattaaatgcattgcttatttgtcagtcttgctaatttatttctttattattattttttttttgaaaagagggctttgcctcgtatatatagatagagaatcgggctaatttaattgtaaatgctgttaatttgcagccatgttacttcgacaagtgaatcaaaaatcatggaatcttctgaagcaacatagccgtccagtgtgccttcacttctcttctgatagttcggccaattcaacggctaatattgatcttgatgctgaagctatctgtatgaatcctttgaagccttactctaagtgttggttttatgtgcccccgtggatcaacttgccgcccataaataaggataatgatattaagaagttgattagttctaatccttcaacagtaatgaaagcttatgagactagcaagttagaaatgttgtttgagaagaaagttcgctcctttcttgtttcaaggtgtattctggcttgcgaatctataaatggtcctgacatcaagaaactgcattttatgaacaagagtatcattggccactttcctgtctatgtgacctctctctctttgatgaagtgtttgatcaaacatcgtgaagaatactggattgcaatccttcaatcacttgcagcagagaaggtgatggtattacctgactggaaacaagaattaactcctatcgaggtttcgttcttcgatcatggactacagttgccatccaagtctgaaacatcccttgacttaattacttgcgaactagaatctgatgcgtcatactacaaggtcccagacagtgaagcaacaaatccagacgtagcaggaggacaagaagcagccataacaactactgaaggatcagcatcagcagaagtgggaatggcaacaattgcctcgattatttggaacaatagagcgattttagaaggccgaattacatgtgggcttcgttgtgaggattctgagcacgcagaagcaattgggattttaagcggacttcaactagcaagaaaattgaagataaaaaagatagatgttgtaactgataatatggaaatctatgaggttctgattggcagaaaggatgtgtttcagcacaagcatcgtgatgttttgttgatggctattgaagtagctaaagaattcgatgtttgtaggtttaggtgggaacctcgagaattgctgtgccttgtgaatgaaatggcaaatgcaacaagagaagattaccgggcaaaaacattgagcttgagaagaatttgggagggcaaagtagcatattgtctgtggagtttaccggtcattcgtataaaccaatcaacaaagaagattgcactaaaactaggtatgtcaatgtactatatgcaatttatgttgtttgttgcagtttgcaatttatgtactgcaccatatgtactgtattttttcctgttgcactttgcaccagtggtggacccaggatttttatcctgggtgtgcccatgtcacgagcaaaatcaaagccttcacacataaataaggttttagtttatcaaaaagtttagcacaaatagttgttattttggtgttgaaccaacagtgcatccttagatggaactaaacaaaactggaacaacacaaattacaatttattcctattttcttccgatattattcttccctgttctgaatttcctcatcaccttcacagaagggaaaccctggacatagcattggtgatgtagaacgagtacagtatagaaagagttaatgcctatgctcctcttcatagttgactgattcaatttgacctaatcctacaaatcacggaacatgccttcactgatttggcatttcagttttcaattgaaaatatagccgtctagagaagcaggacgagaaattttgaaacttcagatatatatttttttcagtttttcaattaatctcttccactgccaaaggagaaagagcatacatgcacggctggaccttggtcgccacgggcagcctcctagtcctcgttgccttgctgattaccgtgcgatccaccagcgggaacgcatgcacacgccaccatacaatcttttggtgagctatgcgagaatcatggcattgggccttgatctgtctacttctcgatgaaacaagttacacatccattttttaggccaactaaagcatagttagatcctaaaattttttcgtaacttttgggtacccggcaccacctaggtctgcccctactttgcactaacactttgttttttttatatatgtagaaaaaggctgggctggggaggttaatatgaagttggttcaatcaaaagggtatcatgtgaacgttcgagaacaaatgcttaaaattgatgcattggagggattacttgacagtctggaccctccactgttaattgtattagtaggatcagaagaggctgcaagtaaagtctcacttgagctgaactggaggtttcgttccgttctgttgaggggatctggtcaagttagtggttccataagcaatgcaaatggtgactgcagtcctattccagagggtacagctcttgttctgaatagtgaaactaatatcccaccattttctgcacaaaaggtccttctagtagtttatgacacgccatcaagtgaactacagttcagtaaagatcaagataccacaggagttatcacagtcagaatcgtcgctcctcacgaggaagattctcttccagatacctcgactgaggtcaatcctttcgttttggggttctttaactcaggtacatattttcttcgcttgaatctgcattttggttctttactaaatgttatatttgtgtatcccacttgcaagttattcacttgaatctgcatttcggttgtctttactaaatgttatatttgtgtattccacttgcaagaaattaatacatgtaaaaccatgcagctaaaacaaaagcacacaggaaggaaaagacatcaaataaatcctttggagaaatttggtcaacgtgggaagatagaaaaggctgatgactctgttgtcttcaattcgatgccctttacatgctcttcaatatgcttgcttctttttggggggaattttaactatttgccacttttctgtttgctaattattcaaataccccttttaggtttgtactttaatctgtcattggagagagaagaattcttaattttatgctacttttgcttatgtggcgggacaaattagattggcagcttggatgtatggtgtgaaatgtctagacctcacccgtcatttatctatctctcttctctccggtccggtgtacggaccacgagcccacgaccgatccatggtggggcggtaggtcgttgtggcacatcctgacgcgatggccgctccatacttgtagcccaggattcaaacatacttgcagccaagaaatagtccgaatgaaatcaatcgcaaagagacaacaatagtacgtaatatcgaagggaacagccgatgaaaccatgatacaaacgagcatatcgttcagaaaagaagcgatatatgcaagaacatctcaaatcagagagcacgcacgcaatggatttgtacatggatagaagaagatcgatggatggatgtgttttaccggaggaaaggatattacggagcgatctgccagggatggagcggccgtccgtcgtgccgcatcggcgcatgcgctgctgcgccaggctgtgccatagcgccgcctgccccagcaggagtgcaggacgccaccgctcccccgcgcttggtccgccgcccgtacgctggagaaaataaggttggagggatggtgctgacactcacaggtgaggtctacgctggcaatctgatttgtctcgccacatatgcaaaagtggcatcgaattaataatccttctctctcctgtaacatattagtaagtgcaaacttaatatgggtatttggataattggcaaacgtaaaattgacaaatagttaaattctccacaaattttaggctgaaattctatttattatcctccatttattttcctcccaccttctcaaaaatatatttgttagaggcatatcacgagggccttcaatcggacctgacgaaaccaccgacaccataagacgtcggctgagtccaaggggtgcacctggggcgaagaccgaaggattcgccaccaaggtcaccatccggccaagtcgctacctcgactcagcaagcagcggcttcgaccacgctcaactctactcaagaaggcgttgacctcgaagcacaagccgaagcagaggtgggtgcgatgcgccaaaacatgaataagctgcaagacatgcttcgccaaatgcaagagcagcatcaagcgcacgaggcagctaggcaagtcaagtaagtttcggcagcccccccatccatcttcgatagcgatgatcgtcgcccaagctccagctacccaccaagctttcggccaagctgtccctcctcatgtggcgcaggcattgagcatgattaggcaggccaaccaagctccgacgtacgttgccaagaccgctccgaccgtcactgcacggccaacccctcacaccaccatggcgccagtacggccagcggcgatgcaagtacagccagcgaaactagtccaaatgccgcataccacgatggaaacaacttcggccctacaagcgcaacttcaagcttttcttcaacaactcaaccaaccccacaccattccaagaccagcccctttggcgcacgccatcgggagctcaagtctggcaaccatcaagtcagttcggcgccgtgcaccaggcgaaccaacaaggacaaggggcattgacctggcagcaggcgccgcacttcgaacagaatgccgcggtccaagcaccttcgactgaccttcaagggatgatcgccggtatcaacaccacgcaacaagcgaaccagccaaatcagggcgccatgacttgggcccacgtaccacagttcgacccaagcatggcggtccaagcggtttcatcagatctgcgtggaacgctgtccagaaccgggccccagccgaactcaatggcacatcatcacatgcaacagcgatggcttcgccattcgtggctccgtatcaaagcttgaactcacctttccagcaaggcatgatgacaagggctggggacgaaaagaagctgccactaagctgggggctcaagaatcatcccattcccccagttcaagtacccacccgttgcaagatactcaggcgaaacagatccaagcgagttcttgttgatctacaagtctgcaatcgaagcagctcatggcgacgaaaacaccaaggcgaaggtaatacatcttgcgcttgatggaatcgtccgctcttggtatttcaatttgacctctaatatcatttactcatggaagcaacttcgtgatattttcattcttaacttccgaggtatctatgaggagccgaagacccaacaagacctctttggcattcgccaaaagccaggcgaatcaacaagggagtacgtgcgacgtttttcgcaagcacgatgccaggtgcaagacatctcggaggcatccgtcatcaatgctgcttcggcaggcctcctcccaagcgaattgacaagaaaaatagcaagaaaggagccacaaactgtcgagcacctgtttcgcatcgttgatggctatgcgtggggcgaataagacacaaagcaaaggcttgaaattcaagctgactatgacaaggccgccactgccacggctgcgcaagcgacggcgcaagcagccagagccgtgcctatagcaaatcgctagttgcagctggtgaatcaagcgccgctcccaagacccagccaagatcccatgacttggaaaaagttcagaaccgaacgcggaaaggcagtgatggcggtcgaagaggttcaaactctccgaaaggagttcgacatagatacatgctgtcactatcaatggcccacctctactgtcccgtagcatatatgcccagataatgatacttaataatctagacaccacgtctacattattaaatattactctatatcctctggaatgacatggagcaaccgaataatcggacattaaacccataccattgcacctctctggtaagctagctacacaactaatacgacacaaatataacataaagccgatacttagataaagtaaagtaccgagagtatataaagaagaatattctattaattccgaaaatcttacaaaagaggaaagtagaactactaaagccatacctgaactcctccgaagacttcgaggattccgagagctattctattctactccacttagcactagagcactaaactaaagtatggagagatcttgagcttgcttgagtgtgtgagggagtgaatgaggcctcctccttttataggcaggtaattacggttacttctatacaaattgtccaaactacctcgcaactgtcattgggaagcaatcaggatcgtccacgtgggacgccaagataagaggagctagtcagggttcgccgaacctaggctggcccaacaggcctccagcttcggtagggtcactgacaggtgggtccttatgacggttatggtagtttttgtggtttccaggacggttacacctgacatgtggacccatattatcctttagcttgattaggagtgagttttcctcattttttcgtttattttatttgctcaattctagcaacaaataatactacaagtacaagtggaaatatactattctaaaacaaatatgcattataagcataactagttcttctttattttagttatattgacgatcgaaattggtctataacgaccgtcaacaacctcctagcctctccttcggttgggaggctgcaccaacatcttgtacctttgttgggctcaatcctatgattttgattaacatctgggcccttcaatccatgtaaatgcgtcccaattttttgtaggtgtattttcgttgcatgacggatgcattgtctccttaattgacatgcatacatagatttactaaaactagtgaaaatggttagttgtaaatcccagtcactaagatttgatactatattttatatttcttatgtaggagttgatggttaaagtttgtacttaacgaccgtcaacaacacctccacacttatcttttactcgtccctgagtaaagctcatggatctactacagttatggctttctgtccaatgatatgatacacaaaatattccaagacatacctgtgtatttgaaccttgatgtgtctaccatgtcatcttgattgaagaatgaaacggtcatcgactcaagtcagctttactccttctgatgaattaccctggggttttctttggtgcttgtttaggatgaaaaataacgtccgagatctctctctatttagagagatatgtgtgtgtgggtgtgccaatgtacctaaatacaccataaacaacacatagggaacatgcactttattaatctcgaggatcataaatacaaaatctcatgtaatgatacacgctacatagtccgtcattggacatatccgaattgtgcgatgtggtcttcctggttcctagggcctcgataagctcccatttaattacctccgcaggcgaaggcctacagcaggacctcggattaagctgcttgtggtcatcttgtcgtcttcgtttcacaatctccatgcatgattttggtggtgtagatgtgggcgccggcaacgatccacaacctcgtcggtccgtgcaccggtgttggtgacatagccttcgcatcggcttcactcgccctcgtctagtctcgccggtcttgagcgatgtgttggtgtagattgcttgaataagacatacatggattcgcgtagcttggatggcttgacgtcatagaagttcactactacaaaacatcaaataggtgttggcactataggtgccggagtgctaaaaccggcaccaataggccttttcccacctctgtgggttgaaatcgcaaaaaagggcacctttaaccaattataggtgtcggttctaaataaaaacctacacctattctatatgagtcggttttttaaaaaaatcggaacctttactataaaaactggcaccaataataaattataggtgctgtttttttttctaaaaaaggcacctacgaattgagccgagccgattggccccaccacgacgcgtcgaggagataaggtctgctcgctcgttcgaactctctcttctcctcttgatctctcttgttctctccgctctctctcgcccctctatctcgctcgctggtctaggcggcggcctggtggagcggcggtggcggcggcccggcggcgacgccctccccaccattctctctctcttagtggcctggcggaggtggtggcggcccggtggtggcggcggcggccgttgacgtgccctcccctcctccagatccagtgggagggaaggcggcgacagctcagcgactcggcggctgcgcccttcctcggctagatctagagggaggcaacggccgtgaggcggcaacacatcctcgggcgacggcggcggtggtggttaaggcagcggggaagtgttctatgttgttaatgtgttcttagatgtcttctgttttctgtgctgtgttcttgacatgttcttgaagttcttgatgtgctcggtttgattcgtgcttgggtcggcttgattcgagccgagccggcatttttttggggctcgttcatccttatagttgccggttttaaaccgctggcacctattttgtttgacatcagtgtcgcctccgtggtgccggttgggaaatccgacacctatgccaggttcccaaccggcaccaatatcctcttctgtagtagtggttgttggagatggtcagtgtagagatatcggacttcactcgcagttgaggacttagtacacatcctcatagccaagtgagtataggctgtatagcttaattagtactccctccgtcccataataaggaattttgagtttttgctttcactttttgactattcgtcttattcaaaaaattttggaattattatttaatttttttgtaacttctttattattcaaagtaatttaagcacaaccttttgttttttatatttgcacaaattttttaaataagatgagtggtcaaacagtacaagaaaaactcaaaattgacagagggagtaattaataagccatttggttggttttcttttcactgtagtactgtacagtagcatgcatgcacacgtaaaacactagcatatcaggtgacacacaatggcgtggcagcgacgacaatgatgaacacgtgaggaagggggcagcgctggcgaagagaccgcgacgagcgtgaaggcatcgcatgcattgcccggtggagtcttggtgagagcatcctcgcttagcaaggctgcacaacgacggcgccggcaacaggatccgaagatgtgtcatcatggcttgtgaacggtgcaacagcgatcatcatggcaacatccccgaagtttgcggtcagtgaagcgacggcttaattggaatggaagccatcttggatgggcacactactagaaaaatcctcacaaatcctacagggaccagctcataggtgccggttcatttaaaaccagcacctataaagctttccccacctccctatgatgaaaaattgtagaaccggcacctttaaacacgctagaaccggcacctataatatattataggtaccggttaattaaagaaccggcacctataatatattatatgtaccggttgtttttaaaaaccggcccctatagctttgagccgagccgtccagtcgagcctacccgcacacgcatctctccctcggtccttgtctacttcctcggtcccctcaatctctcgcatctctctccctcccctctctttctcacgtctctctccctccccagctcccctctctctctcggtggctgcccggcggaggcggcgggctcccgcagccggtggctgcctggcggaggcagcgagctcccctctctttctctgtctcagatctggccgggcgacagcggcagcggcggtggccgcgcccttccctccaccagatccggcaggaggggaggcggcgcacctcagtggagtggcggtggccatgccctcccctccgccagatctggcgggaggggaggcggcgcacctcggtgacggtagcggcggcggccgtcgacggcaggggtggagaaggacgccggtggtgcgggcgaggtggtgacccgcggcttgagttcttgagtgtatgagtttttctctttttgagttcttgagttctttctgtcttttctcctccttgatccatgccccaaatataatgtgaacttgttgattgatctattgaattcttttcggccggccataggtttgttgttgatttggccgagcagccgtggtgttctaggggatgatgtgatccaggaggcggtgatgaagggggagtagggctgggctcgaaggagacgacgggtgtgtggttggtgagttcggctcgatttgagtcggttctctttttttttttatgctcgagcaaagttaacggtgccggttgttagtattggtgtcgaccaataggtgccatttgggaaactggcacctatagccggttcccaaccgacacctatgataatttctgttctagtggcagcaccatgcatggtgacttaattggcagcgtccgcgtgtcattctccgacttctagatcagcatggcttggcggcgtccgcggtggctctggcgatcttcggcgcactccggcggagtggtgtcacgagggccttctccggtgggcagcagatggtgatttagtcaacgactcatcggagacaatgttagaaataatcttgtcattagtactatgcatgtttattttgttcattttcacgtatagaaagtggttttgcattgtagcagtgtttggcacactaaaaaagcattttcgtcgatgttgggtctttttttcacaggcgggtatgaccctcggaacccaatatccgcctacgaaaatatataccgaggtggattttcatcatccacctgcgaaaatcaatttttgcaggtggaccacttaagaggtccgcatgcgaaaataaattattttcacaggcggaccacttaagatccgcctgcaaaaatatgatttttacaggcagaaccttatgtggtacacctgcaaaaatcatgcctatataaaaaaaaaactagtcccctcttatcatcttctcttccatcttatcctctcccccaccactcattccttcctctctctgctccctcccctccccttccttccttcctaccagcggagggagtcggtgccgtcgcgggcggagggggctggcggaggcgccggcggagggcgtaggcagcggcgcgtgcggagggggccggcgaaggcgcgagcgcggagggtgtcggcgacggcgcctacgagcgacaacgacgactaccgcacaacgacgacgactaccgagcgacaacgacaactaccgccggccgcgtcgctacccctcccctcccagatccggcataggggatgggtgtcgagttgcatgcccaatagatggatactacatacccaatagtaatcgactaaattcggcgggacccaccacataccatgtcttatacggaaacaaacctcgtatataggagttccggataaggaaggatgagtagagttctatatgaaaacgacaaggactaatcggattgtatctatattggtctccctagttctacttggacaagggggcatctgtgggtataaatgcaagcccccctaggagagagggcacacgccacaaagtcacgagccaacacaaaccaatacaccgccagatatcaacatcagagattagcctagacaaacccaatccggtgcctatggtagccggtaagagggatctagcgctatctctgatctcgacgggttcatattcaaggaggaaaactaccccgtcatcgactacgagctggttatctagccgccaagtcaacgacagctagataggttatcccaaatattgtatgtgtgatctagataaataaagagaaacaccggtttaggccaacaagatgtagggttattatctgtcagataagaggcccgaacctgcataaaaatccttgtctccatctcttttacctcaatctcgcatataccctggtaccaatgatccccataccatccaaataccgtagtcgcgatctcaaacgtcgacagcagctgcacaaggtggatgggtcggtggcggcgcgggcggagggcgtcggccgtcggccgcgacgacgaagactaccgcaggacgacgacggccctaccgcgcgacgatgacgatgactagcgccagccacgtcgccagccctcctctcccagatccggccggaggggggagggaggcggcgacggccaccccatgcaacggaggagttcgctggcgacgacgacccggagacgacgacgtgtttttttaagtttacatgtacattgatgttaacttgatctgaatttgaatccaatgcttttgtgttgcaagtttacaatgtttgtgattggatttattttcttggatgagatttgtgaatatttatgatttgtgatttgaaaccctagggaggggtggggctggcgggaaattttcttggcgtcgagggtatttttccaagcgaggctactgtagcacttaaggcgcatgggaagattcgacatcgctcgggtgctttggtctgcctgtaaaaattgggaaattttaccgtcgtttggatacaggcggatggctttgccgcgtgcgaaaatgtgttctgacaacctggaaaaactttttttctagtagtggcaccagaagaagaagtacatagtggcaccagaagaagaagtacacagcaatatgtgtgatacgtacaagtacataggcttggccggagtgcagccggattgtacgaagcggccggagagtagcgacattatcttagacgtggaagttgcatgtaacaactagtgattagtgtggttgctttgagtagtggttagtcgtgtgtgatgcatggctagtagtagacctagtattaaggtgtgctcccgtgtatgcagagctagtggcattagagtaggaagagtttgttagcttgcttgcatgaaagtttatttagcattttacatggtcagctttgctagctcgtaggatcgtgtgcatgcatgatcagcttgggatcgtgtgagtgcgttgccgttgtatagtacgtacctacatcttggcttaagttaataagaaaagaggagaaaaaggacgtgagctagctgtgatagctgcgtagctaaaatctaaattcgtgtgttcttgctcattgtgtttgtgtgtgtgtgtccacaagagaaaaatcttgagtatttgtgataaacacctagagagtgagaggagagattcccaacagacaagcactggttggcagcgctttggcgactcaacgaaatggttgctggcacgtacggatggagtcgatgacgccgtacgtgcgggcgtgagtggtggtgctccgcccgatgttctcctcgagtggttcgacgatgagcgtgaagaaaatagcaaagccgatgagggcgagcggacgtcgatcggcggtgtcacgtagaggagggtactgcgaccggcaagagcgacatcacatcgccatgtagacgtcgtgaggtagaggttgcggccggcgaggcgagaacgtccagcacccgagccacgtcgcagcatacggcagatgccgtcaccaacgaccagcgtccccaaggacaattaaagcagtatcttgtgtcaactcggacgggcggcagatggttcggccgacgcaactgctacgtcgctactcgatcgctacgatatgatgacaacagcgcgcgcgtgcagacgttgcatgtatgtgctgcaaattaaatactctctccgttctagtttgactaagttaaattgttttaagtttaactaattttataaacaaatatagtaatattgtaatgttccagcaaatcaataattgaatatatttttataataaatttgtcttggattaaaaatgttactaattgtttctacaagtatggtcaaatttataaagtagtttgactttaaccagtattgtatcttacggagggagtagaagaagaaacgatctaattaattaccttgagcagccatcgtcctcctttctgtggtggctgatgatgatggtcgatcaggtgcgcgtcgtcctgccggacaccgcgacgccaatgcaaggcccggtgggcgtacgcgtgtgcactgtttcggcaaagtcgatggcgtcgtcggcgtgcgcagctcatgctccgacgctgctccgacgaagtcacgccggtggtgtgcgcatccggcgaggccgagtcagcgaggctcgtgtaaatgaattagaggtcgatgtgtgtaaagatgggataactgctggtggttttcgatctaatctgtatatatatgtgtgttaggaacgtgtgtgaagagaggagcagtgtatatatatgttgagatcagtgggatggcctcctttttataggtacaggagaagccctaacctacacagcgcattccccggcgccgcctgcacgcgtcacgcattggatcgctccgaagcctctgcgcgccatgttcagttttatctgaatcctccggatagactgaggctgtgtttagatcaagggtacgtgtttgtgtttagatcaagggtgttacatcgaatatacggatacacatttaatacggatacacatttaaagtattaaacatatagtaatctaataataagaacaaattatagaatccgcttgtaaaccgcaagacgaatttattaagcctaattaatccgtcatcagcaaacgtttactgcagcaccacattgtcaaatgagtaaagtccatcaccgggccctgaactagtaccgctgtgtcattcccgtccctaaactcgcaaatcaatcgt

SEQ ID NO: 7361 - DNA, 15076 bp, Oryza sativa
cccaagctcatagtcgcccccatcgagctgctcaaaagccgatgtgttcacgtgtccccgagcttcgcctctcctccgcagaggcaaacacgcggctccgccgcatcgtcttcgatgtcaactccatctactcacgttgcggtagcatcgtcctcgatgcatgcgcccttttccccaacgctcgccatcgccaagctttttgttcgttgctagccttctccccacccatcgccaagcgccgtcgtcgggcttctatctaccgccgccgcccaacaaccaccaccattctccctgctggtcaccggccaccacacacctctcccgcgattcagcgtctggcgtcctcttcgcttgcatgcacgggcactcatgcagtcagtggtgctcgcgagtatgctcaggcgtcgcaacgtactccatctcccaactcttggagatcctcccgccaatcccgacggtgtggctgatatgcaaccatgatgcggacgcggcgcagatgcgcggcgagctgccacgcaacgatgtggtggtgtaacccgaggggacgacgtgtcgggagcccttcctacttcgcttcttcgcgctctttgccgtgtaggtccatgacgcagccgtcagtcgccactcttctccccacctgttgctgactgccctggaggtttgggttgagacgggaagaaaggggagataggtgggagaagattatcggctggcatgtgggacccacatgggtcccacgctgactcagccaccacgtcaccaaaaccgaggagcaatactgccttgggacctaacgtgacccggtattgtaagattagggatttgttatatctggtattttagttcagggacaattaagaaactcgatgacaagataagggacctcaagtgaaccttttcctttcatctctctcatttctctttttttaaaaaaaaatagcaaagatgctcgtgcattgtgataggaaatccaaattacatatgttattttttttcgtggacgttggcggagagttagatgatggatatttggggggctttcttatgaacctgggtgggtctcaggcatgtcgtggatggaacatatgatagagatgtgggtttcacgtagagataatcaatagttgaaggtgtaattatttattagtgtggtataaagattttattttttgctgcaagggcacttatcactataaaaaatgattttcgcctttggctaaaacctgttcttgcaggctgctaggtctaaatattttttttttgctataacgacgcttatcactataaaaaatattttttagtatctttccatatgggcagcacaaaccacatgcgaaaaccctactccctccgtattttaatgtatgacacatatggatgatatggtagcaattttttaagaaaatgaactactccctccgtattttaatgtatgacgccgttgactttttaaccaacgtttgaccattcattttattcaaaaattttgtgcaaatatgaaaatatttatgttatgcttaaagaacatttgatgatgaatcaagtcacaataaaataaatgataattacataatttttttgaataagacgaatggtcaaacgatggataaaaagtcaacggcgtcatacattaaaatatggaggtagtattatatatgcaactggtgaatccgtgaaacaaaaataattaggtaaaatttgccacaggacatacaaaaaagcatgtaatcggctgagagacaccgttaaaatgtggcacggctgatagacactaaaaaaaacgtgtaattggctatagaacactggttgcattattttcttatttctggttcaaaagaggtgagatatttttctaaatgcccagattgccccttctctttccttctttaaacaccagtgggtcccaaatgtcatagacagtgtatgtttaatctaatttttaataggtatttaaccacctggccccacgcgtcatggactaatttgtacctaattagtagggtgattactatttgctaatcataagtgggcccctgttaacagtgaaatttggtaagcctaaagtcatcatcggcttagagtcattatcggctacatcatttcggaatcggtcgatggaagttatcaagtcaccaatagttggattcctactatattcggttaaggaaatcaatctactaaaggaagcttatccataaacgaccgagttcaaagaggatgcggcatggcaatttatctattaattaggaatagtttgttagtttccttttatctttaggaaagtgtgtttagtgtccgataaggactttatgttttccttttatcttttagaaagtttgtttcttgttcgacaaggactctatagacccaagggtataaattgtgtaccaggggtccctgtaatttttatctatcgatcaatacaactactctcggcgcatcgccaccctctttaccgaggtttttacttatctttcagcggaatttgggcacctgacgcggggctgcatcggttcagttcgatctccggcgaaggagtaagtcctacgttccgtcgggccctggtgaatctgtcatctacgtcggtgtcgttcaaggctgcatcagtacattcgacctcttggattgctctggtttggatgatatatttgcctacctatttatcatatgtctctattaatctaatcttagcatattaatttagctctatcggctgcttctcgctttagggtttctgccgatatcggctaaatcgtgttgctagattagattagcttaggcatctaccatcctcaaaatcagtcaagggcttgattgtctagatattgtgtttcttttcatacttagtgctgcatcagttaagtttgatctactaagtcgtgcttagaaccataatccctagcctgcttgttgactgccaataagggtttcatcggggtttcagccaatgaattatctggacgttgcatcggcttataagaattgtatatataagttagatttagccgatgacaacgaaggtttcactgtttaatctaatcttgtggattttatgacatcggacctccagccgatgtatgttttaaccttcggatcagtgctaattctaccatgttattattagccgattggtttctattggattatattattgttagtttattacatcatcatcagctgattgcctttatatcatcatctacattggacatatagccgattgcttaaaccctatcgctatcggctggtatcggaatcggctgggattgctccattggctgtttagccgatcggctatttgatctactgtttacaaatcttgtcggttgcaggatcaaactgactgacacgcccgcatctcaccaacctttggacctgcacaggagctaagcagatctcccaggccggtgtgttcgattttttttgtcaacaggcccacattgctctcatatccttcttcttcctcacacacgcggcggagcggaggaacgacgcgcgggcagcgcgacggcccgagtgggacggtcggtgtcgacgggttcctcagcggcggcggcttcagcctgatgctgcggaagcatggcctcacctccgacctcgtcgtcgtgccaccatggtgaacgccgagggggaggctcctcgatagggccgccatgggggaggacctcttctgggccatccgaggcggcggcggcaggaacttctccgcgtcgtagtgcagaaccagaacgcgtagttcgagtccctgtacctcggtagtcggcacacgccatggcctcgtcgccgcgatggccgacaccttcctggagctcggtgtgacggcgagcgactgcatcgagatgatgtggatctagtccgtgctctacttcacgttctacggcacggggaagccattggagatgctcctggacatggacaccagcaagccggacaagtacttgaaggccaagtccgactccgtacgtccaagaacatgcccagccaagtctgggagaccacctggagctggctcctcaaggacggtgctgggctgctcatcctcgacccctacggtggcgagatggtccgcgtcgtgccggcggtgacgccgttcccgcaccggcaggcgctctacaacatccagtactatgggttctggtcgaagagcgggcggcagcggcggagaagtacatgggctggatcagagggctctacggtaagatggagccgtacgtgtccaaaaccccaggggcggggcagcagccatcgccgccatcacaggatctctcgccgtctgccgctcctggcgcgggggaatatggctccaggggcaatcttgtcattttgaaaattttctcacctcttttgacccggaaataataaaataatgcgaccggtgtcctacggccaattacacatttttttgtagtgtccatcagccgtgtcacgttttcacggtgtctctcagctaattacacgttttttgcgtgtcctgtagcaaattttgccaaataattaatagctaaaactggttgagtgaaaaaaataatatgaaacgaagggagtaaagtatattctatgaactgttggcggtcacaagatttctatacacttgaagacagattcgtgagacccaccagcaaaaaatctctatcagctcaaaagacaactgaccgccatgagtctcgtttttgtgataggggaggcacatgtcactgcttgaggctacatgcagcgggtgcgtgatgttgtcgtgctcggattggaaactgaatttttatatgtgattgtttccgtttcacgtgggcgaaagagtcggacgtttgcgggggacatggaaacggaccaacaattcacatgtcggatgaaaaattgtgtgagacacactattctacgatgcacggcaaaaacactatgaatgttttaagtagataaagatatacaactatatacgtcgtattttgcaagcaaatttggtaggattgatatatagatacattataacctacctctcaacatttttcatattttttttaccaccgtatacatatatttcaaagcagtaagcatgatttaaacatcgtggttttaaatttcaaacaatagtcatgaaaatttttaaaaatattttagagctttgataatggtgttatgtctggccctacaaaatatcagctttagaatatgactcgtataaaaagagacgaagaagataaatgctcgagcaaaccaattttagtagttcaaggggtacaatgaggcaaaacatatgttagtgggttaagggtgtgctttttactccatcttccttacttatactcacttctttttatacgcacgcttttccgatctgtgtattttatgtaaaaaaatataaagaaaagttgctttaaaaaatcatattaatttgttatatgacctagtctcaacgatttattatggcgtgcccccacctaaatctctgaacaaatcaatttgctgctaggaaactcagaacgtttatttgttcagagatcatagtagcaccttgcaagtttcagacattaaacacattttttgtttcagttttgagtttagataaatatctgttaaacttatatagatggtgtttagctgaaatcatttgtgatccaaggtgagagttatatttgccagcaataccaaaatatacatgatcctaactaatatatatgtactgcatatacaaaattttaggtgcaatagatgctacttacaaattaggatcttgtattgatcagttcaacaatcaaacttctatttatcactaatcaaaagtaggattgtaccacactgatctgaaaaaatatccgtcgcatgaacataaggaggtcaatagtgcagatgatgcgtcaatagtgtagatgatgccatctaagattagtgagtcctttttgttcagaaatgaggaaggaatcaataagggagtactgcactgaacagaaacaagatgaatttcatgaacataaacgggaatataatattgaccaaatgtaaacctcactctaataacacaaacggttccattcatacaaaagtttttatactcactgtttgtattccgatttaatattgcaagctatcattatgtcagtcaataacaagcatccaaactcatgtgctagaaggctggcaatacataagcatttttttggaaaatctgagtatataataagcaatgtcagaattttttccagacggtaaatttcagaaacatgcccccctaaggccctaaaaaaaccagaaacacggttatccaagtagatgaaattcatatacaatatatgccaaaatcgaaaaacataatccaattgtagaagttatatcatgcagatagtgcaattcagtttatatttcatttataatggctatgatcaaaggataattcatcagctgaatgaaatacataactgaataaaattgtcacaagagaaaggttttcaatactcatctaaatgaatgaaaccaaatcagcgagagagatttaaaaagaaaatacctatgacatcctaaatgcagcaaccaaattcagtttgaatgttttcatcagtaacttcacaactcgggtactaccataatgagatggttttgatttttcacaaaaaaaaggattctgaaaaaaaaggcgggttcatgagatatttgaccatatttattcaatagttgccatcaattcacatatatacagtctaaatgtctgatcttaagaaaataatattggttttgaattagttcgtgaattagtttcgatatctttagacaaccttgatgacctggaccactttcagaaatatataaatatatgaatgatccaaatatatgttgtagctaaagggcagtggcggccaccagatcatgtaatggcatgtttacatgtaacacataaaaatttaagatgttcaatcccaattcagtaattgctgtatgtgcagcacaatagtgcaattaattttagaaaaaaaaatgttaccctaaaagccatgaacacatctattacccatgaacatatgctccatgtactacatgatttcttgcagtgtatgtgtacgagcatttcatcgaacaacatgagggtatccggagatagagctcaaatacaatcagaaattatgaaggccgtgatgcacgatcaaacataagccaaaacaacgacatgacctgtaatcaggagaaaaggaacacatgaacatgaagatttcctttcccatctgagggtagaggccggtgatgatgaagatggctgcagcggcgccgttagtcagcacgggctgcgcctcgatcgagccgaggatccctcacaccaaccccgcgttattcctgctctcgggcggcacgaagccgacggctagatctcgatgaaacgaatcagcgatggcgctagggcgaggcagggtggcgcggcacgacagtcggcgggggctcggtcaccgcgacgacgaacccaaggtgggggatcggtggcaatcgcgacgatgacggctgtgagggaattcggcggtggtggttgaaagagaggggtggaatcagcgggcgtggaggaagatcgcgagcaatgtggaacgtggagcggactgtgggcgtttgacgcgtaagcagatacaggggtgggaggtggagacgaccttgcgttggatttcgcatatgcaatctagaccgttgcgtgaggaacgagagaatgagtgatgagtaaaatcatttgttgaactatagggtatagggtagatgtggctgataggatgaagacgaatcgagatgataacaataaaaggccatgcattatgtagataaaacttagatatgaaatgaagggatgtgttgaagagagtttaaaaggataaagtcataggtctataaacaacaatggcatgtaataaactaattaatatatcaagattatgatggactagtggtggattactggtgaataatttatggaggtatagagcttgtcgtagtggttgtcgtagattagcctgtcattggcttcggactattaattactagttagtcattaactaattgttaagagaggatagcgctcatccctaattagtgtcttgaaatatttatcatattatagggtttgcaggagcactgtataaacctaattagtatccgattggaattgagtttgattgacgttgttttcgctgaatctggttggatggaaggcaaatatttatttttacactgaaaaaaggcatattaaatactctatccaataattatgtgaatttggtcatttcagtagtactccctccatcccaaaataagctagcattgtactaaaacgtgacacatcctagtacaacgaatctggatatactgtccaaatttactgtattagaatatatcacatcctaatatgaggttggtttattttagaacggagggagtactcctaggcaaaaagaccatcaggaagggacaatctccgatttctgcagctagcagcccaaaacccggctggtagcccgtcaagaatcgtattgcgcgaacattcgcaccaaatgcccgtgcgaatctggcattcacattctaacacaacaacaaacattctcattcacctccacctccaccttcacctctatattcacatccatggatggatcccacgtactctctctgtcccatattcctggctagatttattgtactatcacattttattctataggttgtttttttatgtgatggggggagtaggtcctgagtactcccaagaatacccatttttcatgaaaaaataaattatatatagatatattgttatttatgtatgctttttttgtctcctgttcttgagtttgttctcaagattgggccattttgttattttatagtgtgctcaaattctcgagatttttataatatattattcctatatgatttatgtcactattgtaatttaatatgtattatcctcctcaacatttgtgttttgtataaaacatttttttaaagtgtgaatatccggccatgaattcctacgtccgtcactgttcacatctatatcaaattaactcgaccaaatattcccattcacactattgcggcgctcattatgaatggttgacgaacttggccaattaatatattgtggcaaaataatgataaagagatattcgattcacttaagtgtacaacatactcagtacacatctttattcattccaaacaaactgcagctagtgcatattcgtgaaattaaagtgctacgcgatgtatgtacgcatgcttaccgtactatatgcgtagcatatgtatgctagatttattcagtgcatggtaactttagtgtacttgttcatatcaatagtggcacggccgttggcttcgagtgggaaatagaaggggtagatttcgtagcgtgcccaacagctgctatagtcgatttggcacccctgcgcagcgccacaagccttgtcaaacttggacactgtcgaagataggcactgagcacacgcaggcggtgcaaggtctcgtgtgcactgggccagcgcgtagacgctcacgaacggcgtgtactgctccttcgccctgcccagaccgttgccacccaccgagacagcctgtgttgttgcttttaccatcgccttccccaccaccttctggaacgcctttgggttgtccatgtccggccatctcctcaaggtcacgcttgcgtcctccctcgtgtccacatccccgatgaagttgtagctgctgtagtaccgcatgaagcagtactcgtacctacatgccacaagcacacataaacgaaagaaatatattaaacaaccggcctgaaatctactagaatgatacagtgtcactcatgtgtgtagatgacatgtagaattagaatccatagataccaaattctggagtctgatgtgtagttgcagttggagaccatctgcttggcggcttgggcgaggcaggcgtcgcagtcgccgccggagacgtcgccgcggcactgcgcgaggccgtagaagacctcggagcccctgccggccttggaggtggcgaatccgccgccggtgcgcgccttggcgacgaggtcggagacgacgaagttgacggcgcgccgcctggtgacggcctcgctgctgttgagatcgccgtagttcatccacgtctccgagcagaagctgccgatgggatcatacgtcgtcgccgccatgcccagtgggagcaaggcaaccaatgagacgacggcgaccagtaccagctggcttaatgccgccatggatggcgccaattatgtactctcacactctcacttcacctagattcaattcttgctagctactggagtagtagagatcgatcgatgtcgatcagcagatgtaggtggctatagctgggttgtgtgttcgatcgggagcaatggctggagcttataaaggcgaggattggaagggaaggagagagagatcgatgtgcttgcagtatattgcaggggaacatagtagacagacatagtatcacaacccttgttcttgcttgcagatttgttttgactgttctaatggtttgcatgcagtgatgatcagatcgagtcagactgtgggcaaagctattgcatttgcacctatgaatgaatgatactcttgcggatatcacggactagctagctggctagtggctaactacctgctttctaccatttcttgtgggcttccggggggctatgactagttttgagggatgaggtgatcgataggtgatggacagggtttacgatttcggttcgaaatttccgcaatttcaccccctccaacaagcaaatgtatcgaccgaaaattcagtttttccaaaattttggttaatttggtaaaaaattatttaaattcagtttattttctaaataatttcatgcaaaaagtatgaaaattcctgaaattttcggaaattacagtgacaccaaaatcccgaaactttcggtctaaaccagagttttaaatctcccgctctagttgtttgagaagggttctagctatttgttcacatgtacaatttagtcgctatagctctatttagcccgctatagctgccgctatagctgtttgagaagctaaccgctaaatgccttggcccgctatttaaaatattggtccaaacgaaattgaaaaccctggtgatggacggaaaccaagcaagccatcatggattaagtggtcaattcattattacgacattgctcaatccaaacaaaacagcacattagtgatgagtgaagatgaaaagctattcggttgcaggagcactgcatatatagtttgattgagtttgcgttcgctgaatctggttggatatgaagggcaaataaactatccaataattttgccaattagcaaatactaattgattcattcctaggcaaaaaccagcaggaatgtagtcgatctcctgtttctgcagccaaacagcccagaaactagtagccggccgagaatcatatctatatatacttcgtataaagttcatccactaataatagttagtacatatttaacctcatacaagcatgcaatatcatgcaaaaaaaatatggctccaattttattagccttatcttaggctgcgttcttttcagattctccccactctcaacagtgttcacggaaaacggagcggtccattagcacataattaattaagtatctgttaatttttttttttcaaaaatggatcaatatgattttttaagcaactttcgtatagaaacttttcgtaaaaaaatataccgtttagtagtttgaaaaacgtgctaacggaaaacgaggagaatctaatcctactagcctggaaagaacgagcaagaaatttgaagtactcaactggacgtacggccccctttttctacactgcatggaatagtttgcccatagtctgatcactgcatgcaaaccactagaatagtcaaaatagtctgcaagcaagaacaaggattttgatactctgttcccctgaaatgcatgcaagcacatcgatcgatctcactctccttcccatcaaattctcgtctttataagctccaaccattcttcccgattaaacacacatctcctatagctcatcacatctctacatacaagtgaccagtgagagtaatttggcgccatccatggcggcattaagccagctggtactagttacagcctttttggccgctgcattgctcccactgggcatggcggcgacgacgtatcccatcggcagcttctgctcggagtccgggatgaactacggcgatctcaacagcagcgaggccgtcgtcaggcggcgcagcgtcaacttcgtcgtctccgacctcgtcgccaaggcgcgcaccggcggcggattcgccacctccagagccggcagggggtacgacgccttctacggcctcgcgcagtgccgcggcgacgtctccggcggcgactgcgacgcctgcctcgctcaagccgccaagcagattgtctccaactgcaactacacatcagactccagaatatggtatgctattattatggatcctaattctacatgctagtatattgtatctcgatctagttccaacggtttgacaagctaataattgaaactttaactatctatgatttttataatatttagtttgaaagcaaatattagaacatgatatatacattattctttaaaattacttttaaaaaaattaaaattttacttttttttatattataatatgtaaaaatcattgtagaagtcgtattaaggaccatattattgtcccaaacattaagaatgatggaacataagagagtacacatgatttcacgtcgattgtttaattttctccttatttatgtgcttgtgcgcgcgggtgatgtgcatatgtacttacaggtacgaatactgcttcatgcggtactacaactacgacttcatcggggaagtggatacgagggaggatgcaagcgtgaccatgataaattggcagaacatggacaaccccaaggcattccagaaggcagcggggaaagctatgggaaaggcgacagcacaagctgttgcagtgggtaggagtgggctaggcagggcgaaggagcagtacacgccgtttgtgagtgtttacgcgttagcacagtgcacgcgagacctagcgccgccagcgtgcgcacggtgcctatcggagatagtgtccaagtttgacaaaacttgcaacagcgctcaaggatgccagattgattacagcagctgttgggcgcgctacgagatctaccccttctacttcccactcgaggcaggcagtcgtgccactatcgacatgtccaagtacaccaaggtcaccatgcactaaataaatctagcatatacataggctatgcgtacaatgcgataatgcatacatacatatatacgtcgtaccgtgtagcagtatatgcaatgtgagatcaatcccaataatagtatttatgtttatgtttaatttcaggaatatgtatgcaacgaataaatcatatgtaaaaggttatatatgtataaagttgtatcacccttatttatcatgctagctgcagtttgtttggaataaattaataaagatgtgtattgggcatgttgtacaatatcagaaacttatgttctcatattttctcgcaataaattaattgggcaagtttagcggccattcttaatgagcgccacagtaatgtgaatgtgtatgtttgagtttgacatagatgtggatgtgaatatggaggtggaggtggaggtgtggatgaaaataattctatttggggagcttaaaattttaagaaacaactgattggtagccaacttctgggttctagtttatcttctagattctacaactacatcttcttctcagaatctggatcaaaagttgattgtttgagggagcttctgattttgggagaagctgcagcagctagaagctcccccaaacaagcccaatgcttgcacggggcattgggtacttggttgcacgtttgcacaatacgattctcatgggctaccgggttttgggcacttggttgcggaaacatgagattaattgtaccttccttctatgttttgccttaggagtaccactaaaatgactaactggcaaaattttggatagtgcatttgcctttcatccaaccaaattcaccgaaaacaacttcaataaaactcaattccaatcggatctcgaaggcaagaaggttatacggtactcctgtgcaaaccgaatagatttttagcttttcaactttattcactaataggttgttttgtttggatagattgagtactgtaataggcaattgagcacttaattctagatggttagtctgatttaataaggataggcttcatccacccatcacctcatctatatggtggataacaagtcagcttggctcgctaagacttggttcatttgatcttcttatctcgacgagccatcttgactcggctcattgagcataatgagctgaaatcgtagcttagctttgctcgtgagttgactcgttaactttgttaagtctagcttagctttgtaattttaaatttactattttattatattatatgttaacataataattaaaactaacttatgaataacttactatacatacaaatgtacaaatagtttggatataactagaagtttaaacactcgtaaagatgcactaagtatataaaaatatgacgatctcttctactaacgagttaaacaagacgatcgtgaactgactgattaactcatgagcctaaaaatatagcatggtttgaatcataaatcattagagtttgagttcaagccgatcggaactaagctcgttccactaactttgagctttcttactacccctaattaacctcatccctcaatagtatgtacccggggctagggtgagccgagggcaagggggacagcataagtgaggtgatatgcataagcttagtcaaaatattcctattctagatggagcaggcatcaactggtgttggtcctatggaccgtgaatggatttgtctctggcctccgggtacatctgaacatggatgaaaatttcggttcaaaattttagaaattttcgccccccacccccccccc

SEQ ID NO: 7362 - DNA, 7115 bp, Oryza sativa
aattagggtttttaagagataattttcccgctaggcgccacgacggaatgggcactacagaccaacccccctaacaagaatctcgaccctgagattcagcacctaagggagcagctccgggaactcggagcggagaagatcttctcgctcccaggttgcctcgtcttcaaaatgattgctccattggactttgtagaacttgatggtcttccttcgagtctgacgttctgcctcttcaagaaccttgatcgggctttccttgtaggtcagattcttttccagttcgatattacccagggggacttgctcttctggaactcgaagacatttctttagctgggatacgtggaacacgttatgcacatctgcgagaccttcaggtaactcaagctgataagccacttcgccacgtctggcggttatgaggtaggggccgatgtagcggggtgctaactagccggacatcccaaaccttctcacaccacggaggggtgatactcgcaggtacacatgatctcctttttcgaactcaaggtcacgccttcgattttcagcgtaacttttctgacggttctgcgctgtctttaaacgttttcggattagcttaacttattcttctgctgacttgagtatgtcaggaccgaataccagtgcttcgcccacctcattccagcacaagggagtgcggcactttcttccgaacattgcctcattcggcgacatctgaatactagcctggtaactgttgttgtatgagaactccgcgtacggcaaacaacgatcccaagtgccttcgaaatccaaggcacacgctcgtagcatgtcttctaggatttggtttaccctttcggtctgaccatcggtctgcggatggtaggctgtactaaattttagatcagttccgagggcttcatgcaactgcttccagaaccttgaggtgaactgagtgcctcggtccgacacaattttcttgggacagccaaatctacacacgacatgggtcatgtagagttctgctagtttctttccatcaaaggtggttttcactggcacgaaatgagctgatttcgtgagtcgatccacgattacccagatggagtcgtacccgttaggggttcttggcaaaccggtgatgaaatccattccgatctcttcccatttccactcgggaatcggtaggggttgcagcagaccagctggcctctgatgctctgccttgactctttggcaaatgtcacacaaggctacgtattctgcgacatctcgcttcattccagcccaccagaagtatgccttgatatcttggtacatcttcgtacttcctggatgaatggagtaggcggactcatgagcttcctttaggatgagatctcttaactccttcttggccggtacacagatgcgtggaccgcaccaaactgtgccttgatcgtctatggagaaattggtgtctttcttctcctgtattcctttttattaattcttttatcccttcgttgtctttctgagcctcccggatttgcgactctagggtaggctgtactgtcaagctggcagggacacctgactgtaccacggtcagccttaacttctccaattctctgcacaggtgatcatggtcaggccgtatttgagctacattgcaataggccttgcgacttagcgcatcagcgaccacgttggctttaccaggatgataatggattccaagatcgtaatccttgattagttccaaccatcttctctgtctcatgtttaactcggtctgtgtgaagatatacttaagacttttgtgatcggtgtatacttcacatctgttcccgattaaatagtgcctccagatcttaagggcatgcaccacggctgccaactcgagatcatgggtgggataattgacttcatgaggcctgagctgcctggatgcataggccacaacctttcgttcttgcattaggacacatcctaagccttgtcttgatgcatcacagaagatctcgaaatcttttcggatatctggcaaggtgagaactggggcagtggtcaaccttttcttcatttcttgaaagctgtcttcacaggatgcagaccagtgaaatttattttccttctttaacagctcggtcataggtctggctagcttagagaatacttcaatgaatcttcgataatatccagctaagcctaggaagctgcgaatctctgacacattcttgggcgggttccaagcaagtacagcttcaaccttgctgggatctacttcgacaccgtgggaggagatcacgtgtccaagaaatgctactcgatctaaccagaatttgcatttcgagaatttagcgaatagttgatgatctctgagcttttccattatcagccttaggtgttcagcgtgttcttcctcattcttggagtatatcaggatgtcatcgatgaacaccacgacaaactggtccaggtattccataaagattttgttcattaagttcatgaagaatgctggagcattggtgagtccgaaggacattactgtgaactcatatagaccataacgcgttgagaaagcggtcttcgggatatcttcagatctgattttcagttggtggtaacctgacctcaagtcaatttttgagaaaactcttgctcctttaagttgatcgaataaatcgtcaatccgtggcaacgggtacttgttctttatagttacttcattcagggctctatagtcaattaccattctctcagagccatcctttttcttaaccagaagcactggggctccccaaggggatgagctaggtcgcacataacctttactctccaactcttcgatttgtcttttaacttctgctaactcattagctgccattcggtagggcctttttgcaattggagccgtgcctggtgccagttctatagcgaactcaatctctcggtctggtggcatactcgttaattcttctgggaatacgtcgggatattcacagactatgggcaccgactcaaggaggtgacttgtaaacaggttaggatagaccgacttgcggtaggggtgttaggggtaaagcggacttgctttcctccaggtccttgcaaggtgatggactttcggcacaatctatctgtcctttgtgcttagccaaccaatccatacctaggatgatgtccaagctttgcgagtctaggactatcggtttggctaggaagtcaacttcctcaattttaaggttaacttccgggcatatttgagttgcccttatattccttccaggggaatgtactatcattggtacacgtaaattttgggttttccaaccatttcttttcacaaaagcttgtgatatgaaagaatgggaagctcctgaatcaaacagaactattgcgggtacggagttgacagagaacatacccatcacaacgtctggagcatcctgagcggtttcagcttgaatatggttcacacgtcctcgaccaaagtggttggaagcacgtgaaccttgtccacttgcctgagagctgggacgagactgagctgtcgctggagtaggagttctggcagtgctgccattagcatgtactgagttggtgttggtaggattctgaggacactgtctggcatagtgacccatctggttgcaccggaagcactgaactgctgacggtccctgtggtgacttaaaagaggtaacactgtttggcgcagtattgccactaggggcacgctgctgtggctgaggtgccggatggttcatctgaggacgaggggcgtagcctggctggcggttagcctgagttaccgactggtgatattgcatgggctgaccgtagcgagggcgaggtgcgcctcgggaagaatttccctgatggttagacttgcgtttcttgtattcttcgatagcctcttttctggcatcctcaagtagaagtgccttgttgatcatatgttgaaaggtgggaaagtcatgagcaagcaactggagtctcattccaactgcgatccccttcaaaaatttcctgatcttcttcttgtctgtgtccacttcctcaggggcgtaccgagccaacttgttgaacatacttaggtactcattgacactgctgttgccttgcttaagtctgttgaattcttctttcttcatgtcaatagtgctttcaggcatatgagctgcacggaaagccgtagcaaactcatcccaagcaatgttagtgggttcagggtgtgcattgcagtaattctcccaccaatctgcagcgggtcctcttagctggtgagaggcgtagagcgtcttctcaacaggagtacactgcactaagttgagttttctatccacatctttcagccaatcgtcagcctcgacgggctcgacggtctgagagaactctggcggacgagacctcagaaagtctgtcagcttggatctattgttgctcatgtgagggtggccatttccatgcgtattatgctgaaaaccggctatggctgcggctaatccttgcaagatttgtgtctgaactgccattaagtgttgcatgttgttttccacatgaggtggggaagggaggcgttcttctccagaattgtgactggcagtgtggtgagagcggtgagactattccatcttcgtatcacgggaagctgtacgatgcgagcggttgctgtggcggggttgctcaacttctgcgttgcgggaaacagtacggtgtgaacggttgctgtggtgagactgctcattagctgactcatgatttgcttctggctcggctctaccatcttcaaaaccaaagcgggctggtgcacgagctgcacggcgggggcggctagccatctaaactcccagaagagggcggggtaagagttagataagcacttaggagggcaagtagcaaagtaaatagcaactcagatagcacacactaggcataaactggatttttcaaatcataaaaacacctgatacaacgggtgtggacaagtcacagagctacgccgagcttgactgtgcgcacaccacctaggagaaccagactaccaaacaacacccacaacaaacacacgcacgcactacctcgccacgactccaaaagagttggcggcggaacaaaagggcctgacacccggacggctgctgaagactgcctcctctactcctcgtcggcctggctgcctcctgtagtcggctcctcagtcgaagaaacgtcgatcggctggcgcgaagggaccggcggaacctgtcgagggccggcagcagcacgggccgctggcggtgggggagctgggtagtggaaacggaacacggtggaagaaccaacaacacgcttccgcgcggtgcggataaagcgtgggccacggcgggaggaagcaactggggtgtgtccgggggtgtaggaagggctaactgggtgtgggtagggggagtacactggtgagtacggcgcacgcgagctgggggagcgcggaccactgggagtgcgggcagagccacgggagctgtgggaggacaggtggctggcgtgacagagccggcctgagtcccaggagatagtgtcaactgaggtgacaccctcctcggccagacgggcctccaaagcggcgtagcggcgggcaagggagcggtaagcctcaaggagtaggtcgtgctgagtggcctgagcctccgaaagctcaaccatgcgagtcagcactggctgagactcgctgtacggacaagggtacctggcgtctgagtggccagaaggaaggcgtggaagctgccggaaggcggagcctccgagacggtggctgtagtcgtgggccaggcgacgaagcgcagtccaggagaggtcctggtacgcgatctggagagtgggcctggccacggtgaagtggtgtgggcgaaggccggctccgtgtatacctccacgggggtaaaggtacacagagagctcacagtgagggggaacacggtccacggagtaccccgtgtactcgggacacgagaaaccgaggaaacgggcgaggtcacgaagctgagcgacgtggtgaccctcaccaaaaccgtgggaactgaagctggagttcactgccatctacaattttgaaagagggagaaggatcagtaaccattttagaaacaaactattgaaaataaggaaaccaaaagaagccttagcttttcgcaagcagttttgaacttagtatccttagggtcgtcctaaacgtcgggtttcgccctagggccaagcctgtgctctgataccatctcttgtcacgccccgaactagtcccgaccggaactagcccgtgacgctccaatttaacctgttaatcgataccagtcccaggaaatagtgctggtatgacagggagacagaatatcacagcaacagaggtctctttattatagagtagaggtacagtcatgttgggctgcggacagatcccgagctcacaactgcattacagaagggaaacggaagccaggacttggaccaaacaacacaggcgcgacttgggaactaggccgaaaccctaaaactcatcatagccggcttgctcctggaagaactcctcatcagcaggatccgcttcatcttcttcagcaactgggggggggggatatttatatagagcaagggtgagtacgggagtactcagcaagccagggaaataagtgtttaatgtaggcttcaaggaaaggctgttgttttcgtaattgattttttttgaactcttttctaaaaacaactaagtgagtgcttctcaaacgacacggatgagacagtgcgtctcgtccggtcggagtatgtgcaatgtatcagtctttagaattaaaacaagattggcacccggccacagcttttcaaacggccacccgggccaacaactttacaatcggccacccgggcctagctgatcccgtcagctgctgatttttcaaacatcgaaccccttttcacaacagcaatttcacaagcagtagtcaaacaaaactacgctaggaatcacctcacatccgcccatgaccgtgggcacggctgctcgaacagtttgttaacctctgcagagggggtacactttacccacacaacattactaacccggatcacccagcccgtggggatcagccacgtcgggagacctc

SEQ ID NO: 7363 - DNA, 21005 bp, Oryza sativa
ctttttggtggtggtgttttttttttggggttcgtttcgacgtcatggtatctatctgttgcagtcttgagctttcatcgtgtgatgaattaaaggatagcgatgttgcttatgtttatcgttgttatgtctatccgctgcagtctttgcctgagtaacgtgtggcttatttggatttagcagacgatccttgataatgtttgcttttgtctatcttatgatccatacatgctacgtatacgtaacgcttcctgcatggtttacttaatttgttagcatattttggtatctctttagttcacatttttccgttacacttccgcaatgagtaatctgcatgtaagttggttttacgagcaatcattaattgatagtcatgcacgtctcatacatcacgctagttggcgactctgcggctatgctttgcattcttgtaatagttagcacctttagtttttttgtactcttatagctttcagttatcgactatggtagcgtgaaccaataaacaattaataggaagtgcaagggcatttttgccaaaaacaatcaacgtggcatctgcaattaccccgccaacctatggctcctactggaaaggtaaatatgtcagtgtggtttaatcatttcctattctaacaagaataataaaaatctgcaatcaataagggttttatttggtttgtcacatggatcatacaaattgtttctattataaaatgtttctatttggtttgtcaccgaaaccaaaaacatgttatattgctctctcattgggttatcatatgttttatatatatatagttaagaggcataaaatgatcggtttcaaaattatgaattgatttatataaaaaagatagatatttatcaatccacaatgtgtgagctccttggatcatttaaccggattttaaagcttttctttcaatgtgtagaatgttttgatggtgggagacatgtgcacatatccctcgcttttagcgcaactcatgagaagcatataatccctttttttcatatagttttttttaaaatcgtatctaagcatttaatttcttttggtgtgtatgagttaatctgcgtatcatttttataatagctgggagattttatttaatgagaagatatggttatacgaatgactgtgctagtattaattgatagcgatatatatggacatggccctcgtaataatgtttggagatacagtactataattatgctttattacgtgattaatattcagatgttgtactggaagcaccctggcctactgattttctactggccctttatgattaagtcctggtacttgtaatgcaacatacatgcatgtgttttccatggcaatatgagcaaaacactcctatatatcatattgtggggacagattaagatagagacatggtaaccaacgagattatgtgcaggtgcaattttattcagaagtccaaacagtcatgtggattattacctgattaacagttacatattaaaatgttctattatgtagttatgttgtaggcaatacaacattgctcagaagagaacattgtgccctttaatttttattagaatccttggtctctagctaacaggcctgagcaactctctagttatattagtcaactattttgtgtctagcatgagaatggtgtatttccacccatatttcatattttccatatatcaatgtttaagtcaactagctatattattgggtgaacttagctcactggtgagaatgttttgttgacctctgtacatccgaagtttgcagacctttacacatccgtagtttgaaaacaactccatccatttgagtggcagtttttttttgtcacaaaatttagtggaaattaataaagggactgcctatacttcttgtaaaaaaatcataaatttaatgataaaacaatcagatttcacacagtagaattaaaaagagatcactaaggttacaaccacattgtacgaatatgacgatgtatttgtaacaattccgactaataaaatagggtccacgagtgtctaccaagataggtggcattggaccaaaacgaactatgtaattaagaagccaacgagcaaattaagccatgatcacgacacttaaagatatggatacatgcaaaatcatagtacttataaattaccttgaaaagagatatcataatatcttgcttttattatgtgctataaatctgaaattatactgatatagaaaaaaataaagaaagaaatctttcacattaaaacttaacatttgagtacatacacacatttttgccctctctctcactccccaccatcacattcattcaccaaccaccagggtcagtgatttttttttcggttagtgacttagagcctcatcggttatctatatttcttaataaaccaaaaagactaattaaagaataaaagttaatttataaataaaacttttatatatctttaaaaaaattatgttgaaaatatcttaaaattaacttcaaaatcaagtttaaaaattcaaaatttaattttttttatttattagaccaatcgatggggctcttaatttgaaacaattttacaagtgaaaaggaaaatgcaaaaaaaaaaaaacctaacccaaacggtagaactcgagataaaacggtgacgaaaccgaattgtgcggtgcagtcacctcccccaccatcacaaaacggggagcggagaaaggtcacaggaatcccgggggacgcatctgggccgtacacgtggcacgcgggcccccgtgtgaacgcctggaaatttatccacgggccttatcccctcccacgccactgacgtgtcggcccgcctcctcccggccccactaaagtaacttatccctaccggtcgaacgtttgaaccgggcaggtaaggttttttttttcttttcttttaaccctttttggggtgtttttactgcgcggtaaaagtaggaagtggaaagcgaggagacgcgcccaacggctagaagtggtcgctggcgtgtactttgactgcgtggtggggccctgcggattcagtcagtcagtcagtgacagtgagtcagctgaatcagtcaatttctatagtactatatgtgtagaatctctctttggacccctggaactttttacaaattgcttcctcctgggtgtggactgtgagtttggaactgtacatcatatgaacaactctgtccagattaaaatcccttatattttagaacagatagatagagtatgagtcaactataaactcatgtggaagagagatgaaaaaccgaggagtattggctctcatgcaatagttatacacatgctccaatatatttacattataaattcatgatgagagaaagagagaggagagaaaaaaataaaaccaattttatagttaacttattatacatgttaactttaatatatgagctaataaccaattgtttgctatactattaaatctgctcttacggtggttctatgtcgtactaaaccatattttgggaattgaaaatggtcccccaaaatcactatttgctagtatcatttgtaaaatcctacaaaggagaaaaaaacatttagtgtgtgattaatatttggaaaaaagatgtctacggttttaatgtttgacttgtatattagttaaaacagctcaacatgttgtttgtccgaattttgaattttagaaactatataatggttttttatatttcagtctagattattgaacatctaaaaaatcaagggtataaaagtataaaaatcttgtctgaacatttccggtcatagaatatgtagccctagccaccccaatctctatatcttctctattattataaaaatcaaagatatttccgctgaaattttggtacgtcatccgtgtttgagttggtttttagtttcgtacgtcatttgtgtttgcgttgatttttagttggttcactacaagaaataaatatgaccttctgtgacgaattcctcgtgacgtcggagctattcgtcactagcacattccattttatgacgattaattagtatgagatgtggtcgcttagtgacgaaaaaaggatgttcgtcgttaatactacctagaaatcgtcataaagtatttcactgggacatcgtgacgaatattaatttgtcataaggggcacaaagcaaacgtcataaatttatataatgcatttatggaaaaatatattaaaagctaaagcaatttaatcaagtgaattaatgaggaaactaaatttttccttcaaaaatcatggccggaaatatttttttaatattctacgtggtctaaataattctctgaaattttctgtgaatttcggtgcttaataactatttttaattccacaaagtttatttaaccaattaaaataaatggaaaacaaattaaaattcttctctctgtccttgggcttttttcggcccaagtattactctctccctcccttagcccgcagcctctctctctcgtcctccctcttcgggctgccggcccagcccttttgttcctccttcaccaggaagtctaattttcctccctcttcttaattcaaataatttttcggatagtaaatgatttcaaatgaaaaaaaaataccaataacaaagttgtatattttaccaacaacaaagttacgtcgctcgtatccaattcgacatgagtttaaaataactattatacgccttcctcctagcgcaacctaacccaatcggccacaccatcctgtgcgcttccactcgaagctgcacgtacccctccccacgttttttttgctcttttttcccttttctcctttccttttgtcctggtctttctgaccctctcctctccttccaatttcctttatttttgcatccttttctgtttcgctattggtatctctactattataaaaattgaagatgtttcccctgatattttggtacgttgtccgtatttgaggtagttttaaagttcattcgctttttggaaatacaaaaggagtcgtataagaaatccttttaaaaatcctgcgtgctaagttaggacgagagtcggactcctaattgcttcagaattctcgccaggccataataaagcaatgtatatgatgtgaccgtcatctcaataaagattccgaattagatatcaatactatcaaaataaaaatcccatatactttttactttttagaaaaaaaatctaacaataatacggttaaaatagtcttcacccgttacaacgcacgggtatttttttagtataaataaatagataaaacaccctaattggaggcccaaacattttaatttaaagcccacgtcgatgtaaagatagacccaggtaagctcacagtgggccataaaggcccaaaatggccagcctacgaggacgccacaataaggaaaaagtacaccgaagatccctcaacttgtcatcgagttacaaaatcgtcccctaaccacaaagccgaatacaacgtatcccccaatttacaaaaccagtgtagattaggtccctcggtggttttgcactaggttttgtccaatgtggcggctgagtcagcgtgggacccacatgtcaggatgccacttcagcaggctggcctctccctccctctcctttcctctcttctctctctttctctctctcactcctctctggacttggcaggacggtcgacggtggggaggagccgaggaggtcgccggcgatgcggcggcggagacacgggagaatgggaggacggcggcaagccgaggcggcgtcggcgggcgagcgcggtggcggagagtaggcggtggcggctcccacgcgggaagccgaaggcgacggcgtgggcgagcatggaggcaaagtgaagaaagctcacctcctcttggatctaggcacgccgcctggcacctgcctcgcgaccgccagcttcgccttcgcaggagaggccgtcgtcggggctagcagattctcctacaccaccaccaccaccggtttctgctgctctggctgcggctgcgtcggcggcggcgtaggcgtcggtagagacgacgacgacgaagaagaaggaaaggcagcgcagaacgccttgagaagctcgtcggcgtaggagaatctgccagccccgcgtctctggactgggcagggctctacgagttcaggtccagcagctcgatgtatagctacaatgagaattgtactggagtatgagatagtcaatccgtgatgagataaatgatagctcactagtagctgcattcaatcacctccatcaacacctccacctcatagcattcgttcattagcagcattaacctgagaaatatgaataactgtcatcttcttcatcgtcatatccagatagttaagagttagagattattgctttaacaattttgcaaatatttctagaaagattgccaaatccacacgagcagcatcagattcgaaacgcaccatagccacgaacacaagcatcggcaaggatcgaggaagggaacgaattaacaaggaaggaaggacgtacgatggcgacagtggcgccgtcgacggaccagagggtgatgtcgcccttgtgcagcttgagtgcgcccgcgcccgcatccgccgacagccggaacgcctcgccgctgctgagcccaggtgccaccgccatggcgaacgatgccctcgtcgcgccgctgctcggtggccgccgccgccgctgcttggggaggagtgggagccgcgacggcgtcgttgccgccaccgcctctccgccaccgcgctcgcctgccgacgccgcctcgccctgctgctgccctcccattctcccgtgtctccgccgccgcatcgccggccgaccgtcggacctcctcacccggcgacctcctccccactgtcggcctccctgcccagtccagagaggagtgagagagagagaggaggaaaggataggaagggtgaggctagcctactgacgtggcatcctgacatgtggggttcatgtgggtctcacgctgaatcagccaccacgttggacaaaaccgagtgcaaaaccacgagggatctaatctacgctggttttgtaagttaggggatgcgttgtatccggttttacgtttaggggacgattctgtaactcgaaaacaagttgagggaccttaggtgtactttttccccacaataagtctcaatcccgttcttgggcctcacataagcgaaattccgttccggccgaaaattgttcaggccgcacgtaacttacaaggaataagttcatccgaggtcccttaacttgtcaacgaatccaatttttattcaaccggaaaaccagatacaacgggtcccttaactatcaaaaccagtgcagatgaggtcacttggcagttttgatggcggttttgactgacgtggcacctacgtggctaatgaggcagagcaggaggttgtcggcgagcgcgacagctccactccgtcggccgctccgccccgcccctccgccgcgatgctctctctcgagcgacgcgagcacaacagcgacggccgacggaggatggcggcggagggagatcatctatcaactccggcggagggagctcctcgcctggccgccgcgccgcaaccgaagcgccaccactctactgaggaggcagcagccatggcgcattggcgccagtgccacgaagcagacgctgcacgccgcgttgtcgtggtcgacttcgtcgtagtggcggaatatttgtgtcttggcgctgcgttcgggcgtcacgccggcaatggttgtgctgctgctgctggctcgcttgagggacgagacgagctacctcaacaagccgccaggatggagcctgaggaggaggttccccggtgcgttcacgggttcgggggcgactgcatccaacgcaccaacaaaacaccacacgaatgaacaaacccagtcaccaccaagcaacctaacacataaatacataatcaagagagtagagagagcacgtatggtgaattggtgactccggatctctcttccatcgccggcaggcacgcctgcgtgtatgcaccaacaaaaactaatccatagaacggattatgcaccattcctcaatagcgcaacaaaaactaatccgtcttccgccttgcgctcccccacgccacggccaccgtcgtgtcgtcgtcacgcggcggtggcggaggcgcgagcaggaggagggagtacgcgtgctcacccaccacgcacccgggcttcttccggtgcgcgctgcaatggagcggcgcgtcgccgtcgcgtccctcctcggccggcggagaggacagatgagaggggagagagatgaacacacggagttggggggagagaggaggaagatgatgagggtgagaatgacatgtggggcctacgtgggtctcaacatttttaatttatttttttgtgcaaactagcatgtggcccacaatttttaatatttttcaaatcaaattgccacgtaagcgccacgtcattgccatgtcatgtgaagaccgagtcaaatagccacgtaggcgccacgtcagtgaaaaccgccatccaaaccgctatgggacctatattgtatctgtttttggacccgttatatctgattttctggttgaaggatgaaaatcggattcgttgacaagttaagggacctcaaatgaacttattccaacttacaatatcatgggcctcacctaacaaagatgggccatgatccggcccaagtaaaatgggccgcacgcaagtcgaatcgctttccggcccatgaaacgggagagccgagagcccgagatgtatagctggtcacctctgcttcggtgcttcgtgcatgtttggtgagatcttttttctggatttctgtgtctttttgaaccagtggcgtgcagttccatgaacacctagtggaatttgatctctgaatcgatgtcttacatgcagagatggaaaggaagcttgttgtgagtgagcaagatcagaatcagaagcagaccccacgaaatctgcacttccatcaacaactgcctgatagctgaaaaggaagtgttctctctgtacttttttttttaaaaaaaaaatcttacctgcattttgggcaatgtcaactttacactggagtttatatgatactgttattatctgaaaagaaacatagtgaggtataattgactgtttacattctatttttttaccgaacaacacatcagagtatcagaccacacattgcttaagcatcagttctttgctcgctacctgcctccagcttcctctcaccactgcatctttgactccatccacaagtaaagcaaagaatctgagtttatatgtacatcctcagttacaaattgtttgtttctttgtgaccaaaattgaagctgcagcctgcatggtctcagtctaagagagcaaaataagggtgttaggaaagtctactggtgacaacctactcatggatcgatacaggtaatttaacaaggtcaagctgttagattttgagtaattattttcttcattctttttgtatcaacactggaagtttggaaccaacatatgcgaatgtgctactactttatatgtacaatttctgttttgtaccattatacgcaacatacactgagtatacttaactagttatccagccacatctcaagaaagaaaaaaaaagaatcattagtattttctgaagtctatagctgtagtgtttatcagtttgacagctatggaatgaatgggagatacaagtgttggtgctggtgagcttttccctgcaagtgttcctcctcttgctctcgggcatcaggaagcgtacaacctccaatgtcttgagcatattcatatggctcgcatatgtgtcggctgactccctcgccatcttcgtccttggccatcttgcgctccacatcaatggccggcgccatggtctggtgctcttctgggcgccgtttatgcttcttcaccttggtggccaggagacaatcacagccttctccatggaggacaacatgctgtggaagcgtcaccttctgaccctcgccacccaggtgggtttggccgcctatgtggttggcaagcagtggcagggagacaagcagctgctggctcccatggtgctcatattcatctcaggtaccatcaagtatgcttgcagaacatcggcactcatgtttactgctgaacaaacaacacctgggagtaatcttggcatgcaggcaaagggttggtcagctaattggaaacattattcgactaataattggatgatgaatgaggtgcacacttacaacgaacttttgtgggaagccaacgcaggctggaccttatacatggccttcctgatggatatgacaccgctgatatctaggcctgaaacctattcactgaaagggctcctgtcgaaggaacaccgagtctatgtctcttataagctagctgagctccagctctcgattgtgtatgactacttctacaccaagcttggagtgtattttgagcccgaggaacgactaaatggtcgcttcgcccagcttgctacattgggctccacctttgcagccttgtttctatttgccaggggtaatttcagctacgatagagccgatattgttgtgtcttacatattgctaagtggagctttcattctagagatactctctgtttttattgttgtctcatcattctgggcatacttcatggcaactgtatctgatttcctttgtactagatgtcatgatgtgatcttcagcatcgtcaagcttgtccatccagagagcaaaccacaatggtcccaaaagttggcacagtacaacctcatcatcggatgtataaagcagaagagagcagcagctggcagttgtttactgaaatgcatgaagcgtgtgatcggcatccagcccagcactatgactcatgtcgacatctctcatgagctgaagaagctcgtccttgataagctactacaggttggaagcagattgcatccagatgatgtgtggggacatcagcaaattcaccggccaatgggcaaagttggagctcatgaggagcaaactgcacattgaaagttcatcaagagctcggctgcaggtgctgatcagcgatagcattcagcgtgccggtttcatgtctgctgtccttgcttggcatattgcgacggacatatccttcttccatgaagatgagctaggctgcagctctccatccagaggtccaagcagagaactatctaaatatgtcatgtacctttctgcaaagcatggcatcctatctggcaatgatgggcacatgcggcttagaaatgctcaggaattcatcgttgaatgtctggaagaccgccaggaagctctagatcaagatgctgttgtcagaagtgtagctgcaaagatagataatctaactgaggatttcgagcacccaagaatactgacggcagttgagcctgtgttaatccaaagtggccaacttgccaaggagctgcttaagatgaaagaagcaaatgatcgatgggatatcatcatgaatgtttggatggagatgctttgctacatggcatttcactgcggacctggtttccacattaagcaggtaagcaagggtggagagttcatcagccatgcatgtgaaggttgtgatatataatctaggctttccatattcaacatattcacctgaaaccgaagaacccgctgcaggccattcttgacaagcttctcaatcgatgtttggctggggcatatattcctttcagaagccaatatcagtgctaccgttctactattatgtttgatctctctctctcaatgtatatatgctgaacaatataattcagagtgggatgtgaaactctgaagatatctgcagcaggacggagagcaagggtagaatggagtgaactgaaacaggagtttggtggggttcagacttcagaggggcacaacaagatctgtttgactgttttttgcaaagagaacacttcaaaaccatcaaagatcagtactagccagcagtatcctacactacatatactacctctgctccataggaccataataataagttcatttttggctcaaaaaaaatcatttttaaagtaacctttgtattgtagtttgtgaaagtagagaataattgtattggaagtagataaagtaagaaataattacatggggatttgataaagtagagatattttaatcttttaggttttgtatcagtatgtgtgggatgggtgaaagatgaacttattttggaatggaggtagtaatatacatgagctcatatttgaagatttgacattcgttaatttcaaccaacatgtaagctaagtagtaagtacgtctagattgctgtgatcagtgtagattctcggttcatctcacgtcttgtttgtgaggagtaacatattcctttttccccgaaaaataaaatgtagattctcggttgggtttgtccatcgttgcccatgagcacgattgtcgaaaccattaaacggtgttgatttttcatgaaaaaaatttatatatagaagttctcctacaaaaccaaataagtccaaacggaactggaagtaacacaaaagtaataccactgtattcatatttcaatggaaaaaaaacatattttacaaggcaaaaatattcccaaagttcaacatatacatatatagaagacctaataattgaaatacagtcacgcttcattagaagaaaactaattaaacagagaggatgtagatggagtgtattgtatccttgagcgaacttggatgagtgtatgcatcttggtcgtccttgtagacgaaatccagcacgcgtgtggcgttgacgacggcctccagcagcggcggcggttgagccgccgccggccggagacactccccggcgatgtccatccatgactcctccacgagctccctcagcttcgcgtaggcttcctccttcgtgatgccgccgtgctccctcatgcaggcttccaccgtcgacgacgacgacgacgaagacccttgctctctcttcaataataaggaaattaattggccgatccaagttagcgaacagattaattaagagaaatatttagcaactagttaactactccattcgtcctaaaatataacaacttagaatcggatgtgacattttctatttttcagattcatattactagaaaatgtcacatccgaacataagttcttatattttggggacaaaataagtaattaattagcagatgctatatagagcttgtttttttttattgattcaatcatgtctcttcggcttataagatgtaaaaaagtttcaaaaaagagaaatttacgatctttaagaaagtacctcgaggtacctaaatttacatcaaaatttccgataccttaaatattactcctttcgtcctaaaaaataacaacttttagctctcaagatttgtcccaaaatataacaacttctccatcaacattctcttcccaaccaatcacaactctccaccattcacttttcccacctaccttcactatttaatcaattacaaccctccaccattcacttctacttgctttcttaataaccgtgtctaactctaaaaatgcttatattttggaacggagggagtaagtatctagaggtaccaatacataaaaaatatgatacctcctggtaagatggtaaaattacccaaaaaaaacactcaaacatacctcatgtgaagctatgtcattgagtaatcggccaacgatgcaggaagatgtgatgatcttggggtaggccatgccccagttgatagcatcatcggttgtgacatcgtttcccatggcgacgaaggcgtagacagggacgtgcatgcagcagctgcttggcactgaaatcttgaggtgctcctccaccgtagcagctacctgatctgcaccttcagagcgccatttcacctcgttgtaaaagcatctcgtagcgtcgattaactgcaagattaaccaagcagttaaagttgtgatcaatgagatcagctgcctgcctgcctgcaggtagttgatgagactagctacttactaggtttttgacatagtcgacatgcttgttcccttggagtttaagatcagtttctatggatttcatggtggtcagtactttcttgtagaagaacttcatgtagcctggaagttcttcagcggcttcctcatcccatctattatatttttatggttcaatcattgataaaaattaaattcaagttaaagacaagaattttggctccatgcagcttctttgaaacaaattaagttcggaatgaatttcattattaaaagaagaaacttaatcaattgacctttcaattgcttctgtgaacagcttgctttcttccaaggtgctgtagttgtcgtagatgtcatcgaaaatcgagacaaagatgaacaatttagtgagcatggttctcccatatgagtactgaggctcgaagagaactccaagcatccaaaagtgcatctccaccatcctatctcgcgcaaagcttagatgatcctggagttggagctctttccaccaccttcaccacaccgaaataataaataaaaattcacattctaggtccagttcttgtatgtacatgcattaaattggacatctatatagatatataggtgaattttggtaactcccaataccttggcaaggacagtaaaattgagcctatgcatgttttgaattttagggttggttcaggtattatagctagcacgaaaagataataaggtattctcttgtggtgtagatgaagatgaagattaagtgttttacgtaaaataagatggtattaatgtataattaattgagttttaattattataaattttaaaaatagatttatctgatattttagaacaacttccatatagaaagttttcgcacgaaacatattgtttagtagtttgaaaagcatgtcaccaagatgataattttcatccaattcctatagcagaaacgataattggacctaatctagtgatttttagaacatacatggtgaggatattgagctcctcgcaatacagagattgcaaaatcccaaagtcgagcttggcgaactccaaaatggtctcatttcgtgtgggcaacttgtcgtaaactgagatgtagtgccttgcttcaactcttcttggcctcctgaaaagaggggtcctaagtgcactgcacacctcgtccgccattggcgactgcagatgttttaccacagactgcaaatagttcctagtgaagacgatagcatcgtcgagtatctcctccccatgaatcctgagatgggcagcattgtacaagctcagcatgcttcttgtgccgttattgttatcatcgcgtgtgaaatttccttcctcgtccctgaacctctggaacacatctacaacgaacatatttcattgcatatattcaattacctccgtttcaaattataagttattgtgtactttggtcaaaatcaaactgttccaaatgtaattgagtttgtaggaaaaagtagtaacatttttaacccaagacagatataatatgaaaatgtattcaattttagatctaatgaaactaatttggtattataaatagatattactatatttgactacaaacttggtcaaataaagagcaatttaagtttgaccaaactcaaaacgacttataatcttagttaactaagggagagtattagttcatgctaaaaatatggtatatcatcgtcaattacacacacacacccacctggagaggcatagtatccatgcttcctgagcagatagaaccggagagctgtagtgtggaggtcatagtgattgtcggtatcgtcttcttcctcatgaacccggcgcaacacattttcaatctccttctcgtagtggtagtcaatgcaaagacgttctaaggtgtcgacgagctcaagttttacgtgcaaattggggccagaagaacactcaagtatcatccttctcacttgttcctcggaaacatgagcttttctcttcatattcagaagctacatatacatatacatgcgaggacgattatgctacgaagtaattaattatttgttaggcatatttatatgtactatacgtactatatatctctaaatgaagaataatagatagataggaaaattgcatatgggtagtagtaaattatatataatttactgatttaattgtgctgttttaccattgatggagtgcagggtgagaaggtaagaaagtaatcgccccagacattaggatggtgatcaaagtggggtttacagtgcagcagatctcctccttctactggtgagactagcatatcggtgcaagtaggcacaggtagtagtagtacactcggaacagaggttgccatacttcaactccctcttgctctgcaagctctaggatgagttgttgctgagctacaaactaacttggtctttccctaacttacttggctgctatatatagagataggaatcttataaaccgacgtggcaccacaaataaagctccgttcggctagagaagcgtgccacatattcgtacaaaattacatatctaccatggattcgctaaaatgccattactcaatctacgctagaatgttatcctcgaccaatttacctctgaccttcttctttctccctcccacccctcattttccatcatcgtttagttcccacacaaaaattttacaccatattacattgaacgtttgaatacctgtatgaagtattgaatataagcttaaaaaataattaattgcacaaattgcgactaatttatgagataatttgacaatatagtgctacggtaaatatttgctaatgacggattaattaggcttaataaattcatctcactgtttattgagggattatgtaattagataccgacgtgacacgctaaaactttacatccctatacctaaccacccccttaatcccttaatcttcatgtttagaagattcgaacgggggatccagtcttcaacttggcacgcacacgtctcaatctgcctctccattaatagccaaacaagctgtgtggcttttctcttgcaacttgcagctgtgctgatgttgctgcattctggtgaactaggctaaaaggcattttgtggtcaggccctgtttagttttacggtgaaaagttttggcgtgtcacatcggatatacggacacacatttaaatattaaatatagtctaataacaaaataaattacatattccgtctgtaaattgcgagacgaatttattaagcctaattaatacttttatcaaatcatggcgcaattaggcttaaaagattcgtcttacaatttacacgcaatctgtgtaattagtttttttatttatatttaatactaaatacatgtgtccaaatattcgatgtgacatgatgaaaagtttttgcgtgaaaactaaacaggacctcatccacattgccatggatacatatcattcatgccatggctagctacctcttgataatagtagaattgtcacgccccgaactagtcccgaccggaactagcccgtgacgctccaatttaacctgttaatcgataccagtcccaggaaatagtgctggtatgacagggagacagaatatcacagcaacagaggtctctttattatagagtagaggtacagtcatgttgggctgcggacagatcccgagctcacaactgcattacagaagggaaacggaagccaggacttggaccaaacaacacaggcgcgacttgggaactaggccgaaaccctaaaactcatcatagccggcttgctcctggaagaactcctcatcagcaggatccgcttcatcttcttcagcaactgggggggggggatatttatatagagcaagggtgagtacgggagtactcagcaagccagggaaataagtgtttaatgtaggcttcaaggaaaggctgttgttttcgtaattgattttatttgaactcttttctaaaaacaactaagtgagtgcttctcaaacgacacggatgagacagtgcgtctcgtccggtcggagtatgtgcaatgtatcagtctttagaattgaaacaagattggcacccggccaacagcttttcaaacggccacccgggccaacaactttacaatcggccacccgggcctagctgatcccgtcagctgctgatttttcaaacatcgaaccccttttcacaacagcaatttcacaagcagtagtcaaacaaaactacgctaggaatcacctcacatccgcccatgaccgtgggcacggctgctcgaacagtttgttaacctctgcagagggggtacactttacccacacaacattactaacccggatcacccagcccgtggggatcagccacgtcgggagacctccaagctttcatgacaaggcatttccaaagccaacacaggtttaccatatgccgacgagaggggtcccagaccaacaacaggttaggtcccagaccatactgtgccaggaagcccaggggtcctccccgacaccaccccggcgaatccacatgtctctcggcatcaaggcccccctgataagctagttactcagccaggggtgtcccattccacccatgtggtcatacttgtcttatgttcggatgaaattccaaggaaacggtccttaagtgcgagagcgggaaaaccgtacacccggtacgttccccggtccgcggttttggaaattcatttagttcgcaagcactgacccaggtgtcgggttttccaagtcttttgtaaaacccaagttttacccaagttgttactcagattttaagtttgaaggcgaccgtcggtactcgcacagagtgcacgattcccgaggcgcaactgggtggttacaagggaacatggtataacaattaacaaaggaaggatcatatgcaacaaactaggtaggtccgccaatttgccttgcagacgggacaaacagattaagtgcgatcctatcaatgcataatatttttcaagcaacttaattaaatttcaaatataggctcaagatgttcaaaggtggcttgccttgctcgagatctggagcttgatcctcgaaatcctcgcgctgcgggtcttcgggctccgaaactacacgcgaaacgggacaactcaacaaacggcgaaaaaataaagccctattaatgtcctctaagcatgccattagatagatctcgagatttgaggaattttggaagttgaacggagtcaaacggatttacggttgggaagatattgaatttctaagattattggatttttggtctaaaggaaaaggatttaattaaatccttttggaaaagaaaagaattgaaaagaaaagagggagggattatagacttttcctcgggcggctaaggcgcggcccaagggaaatggggtggctcggccgagcttaacgggccggccggcccaagaaggccccatacgcgcgcgcgcgcggagggaggagagagagtccggtggaccgggctcaccacgcgcggtcccgggtgggacccgcttgtcagcggctcggctcaccgtgcggagggagtacgcggcttatgcgcgcgggcgggggagggatgcggtgcacgagcgcggctcgcagtggacgcggatgcggcgggcccacgcgcagcctcacggctcacggtggaacgcgcgcacggggagggactgaccggggtcggctcgaccctggtctaggctgagctggcgccgacgtggcgcctacgtggcggccacgtgggctggcgggagttagacgacaacccggccgcgaatggacggcgggcggcggcggcgagcggcggagcgaaccacggcgatacgggcaaaagcgagcacaccgggcggttgttcgtgatgaggggagacgagccaacggctcggattcgccggagggagcttgacggcggcgaatcgcggcggcgacaaccggcggggagggaagagggaaacggcgacgaggccacgaggggtcgattcccggcggttagagcatctacgcggcttcgggaactcgacgctagcgtcggattggacggagctacgccgagcgaggctggcgacgtgcgggtgctacggagctcgagcggcgacggcagcgagcacacagcgagcgacggcaacggtcggggcggcgccggctaactacggggaggctactcgagctactaccgaaatctaaggggggaagatgaagcgaggaggaagaacggagggaggcactaccgtgatgaggaggggcgttgtgacaagaggccgacggcgcgggagtaatctctccggcctcgggccggggaagaggaagaagagggcgcggccgaagtccccttccgcgtcctcgaacgcaccggctctcccggcgctcggcgaaggacggcggaggcgagactgagcacgggggcggcggcaatggcgcggagacgaatgggagaggaagggaaaggggaggctggggtttaaatgggcggcaatgtcggtttgggaaccgacttgcgcggtcaaggtcgcgagctggcgctcggcggtcgcggccaaagcggcgacagggaggatgacgccggcgaggaggaaaaggggaaaaggagggggagaaaggggggcttgcccctttgccgattcgggataaaggaggaggggagcgggggcgatgcggcatagagaggaggggcgctgcctccgtcccttggcggcttgcgcgcggagtggcgggggctgggcggtgacgaccgcgatgacggcgggcggtttggagcggcgcgacgacacgggcgacagacgctgacgacggcggcgaccaggcggtcggccaccacggcacgtgcgcgcggcttgcaacgggaggcgcggcggatggagcggcgcggctcggcacgcgcgctggctgcggggccgagcggctgcaggcgcggcagggcagcggggccgggcggcgcaaacgcgacgcgggcgaggaccacgcggacgcgcgcgcgatcaacgcgcggggagcggcagtgagggagcggaaaggagggcttggct

SEQ ID NO: 7364 - DNA, 1319 bp, Oryza sativa
acatggcactgatgtgggcgcttatatggcaatttgatccggaaaaataataaaccccgtgggacccatatgtcattttcacacaaattaataaaagaatggcgggcccacgtgggccccacatgtcagtctaactcacccccctcctcttctgcttcctctctccccatctcccctctttttctctctcttgcgacgacggcggcggcggaaatggagaagagtggccgccggccatctcgctcttgcacacgctcgccggtagagtagggagctcgcctagctccttcccaccggtcgtcgcccttgtccccgatggccgccgtctgccgcccttctccccgatgaccgccggcgggagaggagggagcggcgccaccaatttcaccagcgccccacagcgacggcttgccggcgccgctcgccgcggtgacgacgatgaccgtggatgtggcggcgccagcgctggcctcgacgtcctctgctggccggcgtcatcgtcgatgacgacgacgactcgtcggaggacgacgcgccgtcgacatacattccgatggcggccttcctgacctcgagcacgaacagcagcagcgtgaaccagacgatggcctggaagacagagagctggacaactgttagcattatttttgtgtggcagttagcttcgtgcatgcggctagctagtggctgccgaattaattggatcgcgcgcgtgctgcgtgcgcgtacgatgcgggcgaagtttgtttgcttagtggtgtgtctgttgggctataaaagtcatgtattctcatgagttaagtgccaagtgaatgagaaaaaactagataaggtgttcgttgtcgagaaattcttctgtgtttgtccacaaagattttcgctccagctagttgaagtgtgcgtgttgctgtaatccttggccagagctgacaacgacgagctgctgtgcccactcgccgtacatggcgcgcgccatgggcacgccgacgatgagcgagttggtcagcgtggacagcgagaagctggtgatggaccagcgacggcgcagccgcctttgctcattgtagcgcccgttctgtcgtggcgcctagtggaaaaattatctcttaaaaaccctaattgcgaaatttatttccttgcttgtggtctagtgtccgtgccatctcaagatctcaatccccgatctatcgtcgagttcaattccgaatccaaatccatccaaatcaaatttctccgcaaaagtctattttgcctcccccgaggtcgatgggccgaatctcgctcggcccatctcccccgggggtggcccgacgggctcc

SEQ ID NO: 7365 - DNA, 39085 bp, Oryza sativa
  unsure (1)..(39085): unsure at all n locations
cttcccccgatcgatttcttcccccatctcgccgccatttccgatcaggagcggcgcgatcgagatccgcgcgttttcgctgagccgagcaagcacggattcgcccacccgctgccccgtctcccgccgcattcgtacgtttcttggattcgtttttttttcttttctttttcttgtttgaaacaattgccatgactagttctctgttcatgttcggttcttggatttatttttcagtgttattgcatcggttctttttttttcttctgatttttctgttgtgggttcgtgctccttcggtgtaggatcgttgtcagtctgtctgaaggagttctttcttctcgagtttcttgagctcatgtgaggattccagggttgcgtatttccgatttgcgagtgaaagatatggcatctttgcattcgcgttgacgattttagtgtttgtggagacaaccagcgtcaggcctgtagtttgtagttcttccactatgatgatgcggtccatgactccatgaggattctgtgagtagtatgtaatgtgttccggagcctggttttaggttgccattttggagttcgtactatcaataagttccagtttttggtgttattgttctaaaactgcttgaaagacagtaatatggttccttgagagatatctgtgtgtctgattattttttttttcatcgcatcaaaagggaattctgatatgcattcagatatgtttctagtgataataatgccagattagttcaccagtaatatctgacttagttcctgtccaattagtagtgttcttttgtgcaagttggtcctagtttcgtgtattatcagtgttgtcggttgtcaccatactttgtgaatggtctgatcttctgatgtgacatgagttgggatggcaaagtttgaccaaagattgttttgacaaagcactaagcagtaagctgcttccatctactactactagtaattccatatctgtggtttgcatatacatatcaatcttgctgttgacccaaatacccaccacctaacgcatggagacacatgctcacacgttcaaagacttttggcaaattctgaattgtgtacttcttggcaggacaggcatagctgttagagcttccatgaggtggatgcaatatctcaattgctaagatctgcggcgaaatggggaggatgaaaggggtttctgagggcctgatcattggaataacagttggagtggtgataggggtgctgctggcagttgggatacttctgtgcttgaggtatcggcgatctcaggcacagataaggagtagtagctcaaggagggcatcgacgattcccatccgcgccaatggtgttaatgcttgcacgatactctcgaactccactacggggcaggaatcgccaagggaggttgaagatcgcggagcatctatgtggctggaagggcctggtaggaagagtgtgatatcagcttctgggatacccaaatatgcatacaagtatgtttccttgcactctcatggttgtttgtactaatttgtatgttgaacaattgatctagttttaggattagtgatgggcaatttgtttattactgaaacatttggtaatcgattcctgttaactttcaaagtttagtggttgtttatcctcctttgacttcccacatatttctttacctactaattcttttcttttagttttggactttttttttctgaatgtcacagtggaagtgtacattaggaaagtggaacctggagaacttatagagagggggttgtacaatgagattttgcaatatttatttctagcattctagatggggagaaaactggtgtgaggacaggaaaacatgtcaaatatgcatatctggatgtaatgatcgatgatatgtcgaattggacaaccatgttggaccttattgtggtcaatttcaatataattgagttatatattcgatgaaaatgtgcttcacttattaacagttgaccatagcatccagcctcactcaggtgttttggtgaatcaaactgaaggccgatgtctctcttttatttttcaagatcaatagtttttcatccaattaagaccaagttctttttagttgataagcaaatcttttgaaaccatgtattggttcatttttgttgacagaggttatctttctaaatcacatcgagaggaaacatttagttaattgtaggaattgtacttcccacgagatatgcatattttatatttgtaatttcttcttcaatgagtctgataatttataaatgtaaggagggtaaaattaaaccactaaatgtcagtaactattagacatcaaaggagacttttatatcttatgattttaagttcaacaagaacatagaatttgctgatataaacttctctcaaattttaccggtaattggtgcctcacatattgatacttccaacacaattattatcactaattttttgctttctacataattgtgtgccattaattttattttattttttgcaagacattcataaggtatcttgtactatacactttctgaagttcataattttctctttatagagagctgcagaaggccaccagcaatttcacaacactattgggtcaaggagcctttggtcctgtttataaagctgatttgtcatctggtgaaactcttgctgttaaagtgcttgctaacaattcaaagcaaggtgaaaaggagtttcaaactgaggtaagccaatctttatgcgccagaaactctgactgcttggtatttatttgatagactgttaatttcaggttttacttcttggacgattgcaccacaggaacctggtgaatttggttggctattgcgctgaaaaagggcagcatatgctattatatgcattcatgcctaatggaagccttgcatcgcacttatatggtattcattatctccatatgatagcatgctatactttcttgaaagaacctgtgccctcagttttttttttttttggctttcttaatatcctttttatggtttaggtgaaaacattgcacatctccggtgggatttgagggtaaacatagctctggatgttgctcggggcttggagtacctacatgatggggtaggctgttgtatttcataattggaagcatgatacactatgaaatgcaaccagattccttgatctcattcaactctagcgcaggcagttcctccagtagttcaccgtgacatcaaatcaccaaacattttgctggaccagtccatgcatgccagggtatgtgaagcatctctgctacccatcatgatatccatcagatattaagcacctattcatcaagtcagcgtctagtttagtgacatggtcaacgtagtacatattaatgcaattttttgaagaaattcgcaaaagtttagtttattaacctatgtgttggtagttcaaaatacagtacttcttggataacactggatatggtgtcttattgtactaaaatgttttattctcagactaatgagcactttctgttggccaggttgcagactttggattatcaagagaagaaatggttactcgaaatggagccaacatacgtggaacttatggatatcttgatccagagtatgtgtcctcacgatcgttcacaaagaagagtgatgtatacagctacggcgttttgctgtttgaaatgattgctggcagaaaccctcaacaaggtctaatggaatatgtagagcttgtaaggaagccccctacttagttccttactctttttgttcaagaatttgttccttactcttttttgttcaagaattgttttttctcagaacattaaggtttgtaattgctgacttacaatgcaatctatgatcaggctgcaatcaatgctgatggcaaaactggatgggaggagattgcagattctcggttagaaggcgcattcgatgtggaggagctcaacgacatggctgctgtggcctacagatgcgtaagccgagtttcccgcaagcgcccagcaatgagagatgttgtccaggctctgatccgtgtggcgaaacacagccagagcaagaagcatcacaaaaggaggcctccaccaggtagagcagacgatgaatctgtcgacttggaagcatccgaggttcaatcttcgctctccggccatcagagacaagaatcagttgggagtgtctctgatcttgcagatgtctgactgaaattgacaacacaacattttcggctgttcttgttcttggcactttcttcttttttgtctgtgcaattcttttgttttgttgatattaaaaatactaggatcaaggatgacacaattggatagagagaatgcagttttgagcattagtggtgactggtaactggtgtatggagagatgacaatttgtaagtgtgatgtatagacctgctttgtaaccactctgataatagaagctgattgttgccttaattgtcctttgctcatctctggatatgatgaacttctgaaagaaaacagtggtttcccttcacaataatgttgcgttcatgaagaaaattagctcagtaaccatatgggtgggcctaatactgtttggactggctggtgggcccgaggttgctttcttgtacagaatagtacaaagttgtaaagaaaaaggaaaatataatcaacctaaagattgttttgaaatggttaaaaattgaatgaaagtgtttgacaaaataaactgtatttacattcctctcgagctatgttttcttagataatttgataaaagaataacaattcacgctataccaactgttggtactatattctttgcaaacatataatagatggtataatttgtaaacatatagatagatggtaaactcatttctcccctaaatgagcatgtttccgtggcaaataacacaatgtcaagctcctagggcaaagaaaggtaactaaagcacaagtatatcaatttcccttttgacttcaacacaatacagaactcgatcgatgcttccatgatttgcaaaagctgaatcacaaactgaatggaaaaacaacaggttaagaaaaaaaaaagaaggaaagaatggttggtgatcaggtgatgatctcgtgtgtgataaagtatcagcttgctcgtagcatgatctctaaggaagttcgtatgctgcagcgttggcggtgacgtagtaggcgacggtgaccccggcatggacgaagcacaggatccctccgagatccagggtatggccttgcgcaaagctgcaatttctccgggggttggagttgcgcatggcaccggcgagcagcagcgagaatccggcaataagagcaagcctgttacaacatcgaacagtccatggtgatgtcagtctgcaagcacaaaaatttcgttccttctttttcttttttgaaaaggaagtttctttagtcaggatgtatacgttacatctgatactatgaccttaaaggagatgatttaacatccgagctatacaacttacaaaagggagggtttcaataaaagagaggggttggttaccaggagaggactatcagagtcgctgccagcttcctcttgatggaagcccggatgaactccatctgagagcagatgcaggcacagcctccgagaaagttagccactgcgtgggcagctacaaggagcactgcagccgcgaggcccaactggtatactttggaggatgattgctcacattcgatgaacaacatcctcaccgttttaacctgccaataagaaacaccaacgatcattcatttagagtggaaaattgacaaagaaatgcatgtcagctgtctttggctttttcacattaacaaccagtgaaccactattcaattagagtggaagatagagttgcaatagctgaaaacatccattacatgaaaccctttcattatatacattgaatacatctaaaaaagatattgtgtattgcgcaaaacttcgatgtcataaaatccctttgtgaaacctagaaaaatggaaaccaagatttgttttcataatatcttggaatagtaccttgttttgagcaatctgagcctgaagtcctagtatgccagcagtaacatccagcgctaaaatcaccacacagacaagaatagcagccccaattgttgctcttgccatcgcagcgtgttctcaaacgtatatcttctatcagccgagagaagttatggaagcaggataagctgagagcagttatgggaggaacaatcttgtttgcctgcttacaacgaaggaggtgtacccctttttattggtaatcggtgaataaagagctgagagcaaaagtagaacaggagaatttttctccaactatgatgtagttatgaactgagtagaaattagctgtcaatagatgctgaaagtattatactttcctttgatcctttgttacatatgagctttattccttccttaaaggacacaagtaaagattagcatctccagtgtgaaagcccatctgtcacatattcaggccacttttgcagattctgcttttacagaaggtctgtgaagcgtgtgaaaacatggggtaaatatagatctgatcatgctcagaaaaataactttctattgagggcatcacaaaagctagcttttcccccagtgataaaagcatatgatgttcttatcagcaagatatgcacagaaattttgccgacagtaaaatatctcatagaaagataagcatacaagcatatcggtgaaaatcaaacttgaattttactctctcaaagaaactaaaagtttccaaacttaccaattaccaagtagtccgcacaaacaattgagaaatcaacagactgctttgtcctcattaaaccatgctatttccagtccagaattggtttcagaacctctgcaaatgagcagctgccagcaaaatatatgttagcttacatacaatagaatagacaatattgattacgcagcatcaacataagcaacatataccacatctgacaaattatacaatcacatataacaaaaacgtgtaaaagaactgaagtttgctgatgggtcatatgataatggtgaaagaaaattttgcccaagaaatagtgctgcatatttatggcattcagcatagccattaaaaaggaaaacactcaagcctccattatagctctcctacctctagttatagtgccaagtcaagaacacatatgacaaggaaaaaaactgttcgatttaggaatacctcatacaacaatacaaagtctttgattaatacaaggataatacattgtcaggagtgagacccagttggatatacctagttaccagtagtcaccgcaagaacaggtcccgagtttgaagtggtgaaacctactaccatcccttatgacaatttccctcttggtaacttgtgttacaaacttcattaccttgtggcagtcatggcacaaccgatggcactgggtgaccctcaaggtagtagacaaagatgtgctgataaggccaaaagcaacggcaagtctttcgctatggtaaactttcgatgtcttttgttcatcaggaagaatatcagggagcaattcattctcctcagcaacataaccaagttgttttatctccttcaataatgaatctaacttcctatagatttcagaactttgtggatggagactatctttaaagaaaaacctgtgatcttttttcctaacagtaatccagctacaagcagcatgtatacataaacccctcctcttcaaagtattgacaacctttgagacctcagtctgtctcccagagttaatatacaagttaagaagctcaacataattatttattttctgaggttccatcgccaacagttgctcagcagataatctagcaagctgcaaattcctgtggatcctggaagcagtgagcaaggcaccccacatgttcgcggtagggatgaacggtgctttccttatcattgaataggcttcatctaatcgcccttgttgaccaaaaagctcgataatacaagcataatgcatcgcccgtggttttgttctttgattttgagtcatcaactggaaaattctcttcccttcctcaacaaagccagaaaatctgcatgcatttagtacagctagaaatgtaacatggtttggagcaattccctcagctattagctcctcgaacatctcaatagccttttgccccatgccatgatagccgtagcctgctattagagcattccaagagatcaaattcctgataggcatcctctcaaaaacattccttgcatcttccatcagaccccatttgcaatatagatccaccagtgccgtgttcccgacaatgtccagaggtaaccctgtctgaatcaggccagcatgagcttgctttgcatgctccagcaagcccagcctagaaaaaaccctgagcatcgtggagaacgtgaactggtctatgtcaacaccaccctcgcacatgctgtgatacaaatccaatgcctcctcactgcatccatgaagcgaatacgacgcgagcatggagttccacgctacgacactcttctgaggcaccccgtcaaacacccgcctcgcctcatcaagcttcccgcacttgttatacatgtcgatgagcgcacacgacaggtactggtcctcgtacatccctgtcttggcaacgcaacagtgcagctgctgcccggcacgcgccgaccccaatgccgtcacggcacggacggccaccaccaccacccttggcgcagcatccccgcccacctcctcccacagctcccggaacagcgcgagcgcgccgcgcgggcgcccagcgtcgatcagcccgcccatcatggtgccccaggtggcctcgctcctcgcgggcattccgtcgaacacctgccgcgcctcggcgagcatcccgcacgcgagctgcatccggagcacgcggttccacgcgcgctggccgggctcgaacccggagctctcgacgtgccacagcaccgccgcggcgaacccgggctcccgcagcgcggcggcggaggccaccagcgcgtcgtacgtggacgccggcagcggcgtgaacggggcgcccgcgcgcgccccgcggaacgcgtcgcgcgcctcgtcgtgccgcccctcggcggccagcgcctcgatccccgcgcagagggaggcgagcgcggcggcgcccagctccctccgccgccgcgtgtggtggtggtgggagacgccgggctgctgctgctgcggtggcgggagacgcgggcgaggcttgagggcttctccccccgccgccgccgacgacgacgacgaggaggtggaggtggaggtggaggtggccttggggaggaaggcatggggggagtggagaaggcgggggttgcaagagtgcggcgagctgcggctccatggatggggaggtgaggtcgaattcgacgggattatgaggaaatttgttcaaaaatggggggaatttgaggtgaagtttgcgggtttgggaggggttttggggtgggtttggtggattggagtctgaagaggaggaagccggtgaggccgtgaggggtttatctgccatcgcgggaggaagaaggttgggtaccttggccttgggctttgtctcactgacatgtgatgcggtaatgtggggccggacagtataaggatggcccatttccaggtattctttgtttgatcttaggtttattggcttagacttttaaatcagcttattggcttatgtgatttataagctggtggatttaatgttttaagtttaatggtggagtcatgcatctatctcacataagcaaaaaaaaaaaaaaacctagcttttggcttaacagtgttagagtggcttatggcttcaacaaagccaaacgaaaaagttgcttgtttgtttaggtttagactttttgacttataagttggtttataaacctaaacaaagagggcctcagtccatgatgttctctgtactccctccgcctcggaaaaacctaatggaaggggatgttgtccctcctatagacatataagtacaatccaaattcattatattaggagagatatctcctccttggtttgtatttttttaacggagggaatagtagattttgaaaagttgaatagatgttggtagcgagaaaaatctttattttgtttgtgttggctctaccgatagtttgtaatggtagatccaagaagtttcaagggacccttaaatcttcaaatagtttgaaggggaatgtttgtgctaagcttagttgcaactttttatcagctttttcttccttttgcataaaatctgatggattttttttgacatatttaacgggctgtatatcattcatgcatataggtggagaatcagtaccacatataaccacctctctcttttcacaatattgaaaataagagatatgtacatacctataatatagaatcgcaacatgatgactatttcgcttgcgacttgtgacagatttttcgtccatagaattttgcatcaagattatgttcttacagggcacttacactaagttccagtacactacacttagctacaacttttttttctctagatttaccattttgacatatttatcgttttattttgttttatttaaaataggttggatccattgatttaaagttctataagatttaaagttctaatctgatcgaatgatcagtaggtagttccattttaaataacatgttgatggaaacgccaagaccatagccaactcgatgaaattcaatccaactcatacatgctacctcagggcttacgttcatgccaccgggctagagtcatgcttagttgactcagatgcgtatatatgtaggtgataggtgacatgcacccaaagttaattgatgtaatacttaactatataatcatgcatgcatgctaatttaattagtcacctgacctaattaaaaaaccctattatagtcacatcacttaccgcaagatatatgtagggcagtcccatccataatgatcacttgcaattccaaattagccgataaaatctttttttaattagaaacaagtaggttatagttaatattaaataagaaaagatattatgacctttttacatgctcattccgtctgtttttctctgtgcataaacgcacaaagatttaattggcattattgtagagcaccttgaattagagatggcagagatagcaatagggacccgtgacccgacacctctaatcatgctcttgtacccatgggtctactgacgggcgaaaactcttactcatttagtatgtgggtatggatccgttctttacccacccgtatcactagcccgtgggcgaaaaaatccatagattaaacctaaaactatgagtaacataaaactcatttcacctcttaagcatttgttctagtccagtatttgatttcttgattatgttatgtgtataatttttttactcgtatttgaacattaatgttaatagcattgttgctagagaaaataatgatagtttatatgtctaatatggctaattacagtacaaaactataaatgctacaagtcaattatatgggtatccattatgtacccgttacccgcacactgtgggtatggggacgattttgtacccgcgatgggtgtgagtatggggcaaggaaacctggtggatatgtagtgtttccatctctcggatacattggtagaatgtgaaaattttacaggtacgacataccatgggctgctagtttgtacgtcccaatttagaaaacatcctgagtgaaaacgaaggctaatatactggattaattcatgtttgctactagcccccaaagtgcaattggcacataactaaataaataattccatgtcgattatgacacttgagttaaacaaacatatattactccttatcattactggctgtaaacatcaatacatcacactactcatggaggcatcactatatttttttaaagaaaataagtaatatagtctttaatcaacccacctaatatcaaatgtttcctccgatttctatataatttcgattaacgccacgccatgccacattcataataaattcgttttactaatttttgtaatttcgatttcataacatcaataccaattcaaacaccacattttgaaatgggattctctcaaagcaatggacaaacattaccaaacagtcactaattctactacaacatgttcgtatatatttttttgaggtttttttacagcaacatgtagccagcgaaccaggggatgtctgccatccggatctggaccaatcacgtggcgccacgtaagcgcaagccgcgccccacacgcccacctactcctctcccatccactcgcaaaaacaaaagggaggggaggagacgcgaatccacccacgcaagcgcggcggtgggccccacctgtcatccacccacccaccctcctaatctccacccaaaattctccaatcgcgaggcgaggcgaggcgaagctcctcgtcgtcagaatccgcgaaaacatcgccaccaccacgagaggaggaggaggagagcgcggcggcgatgtccggtaccccggcggacggcggcggcggaggcggcggaggcggcggagggagcggggacgactggttcctcgactgcggcattctcgaggacctcccggcggccgcgtgcggggccttcccgtgggacgcatccccgtcctgcttcaacccgaggtaatttagccgtcctctcccgtgggacgcatcccctccccgatgcatgcgtagatttctctagttcgtccagcgaatcgggttgagcgagtggggcgattggatttgtgtggaatcggtttgagcgagtggagcgattggatttgtgtgggattagtgagattattattcctggttttgtggagaggaggggaacataatattattattattattattatagtatgtaaaggcggatgcatcttagaacctatattggtctgtttgtgggatctgttcatctatattggttattatttcttttgtagataaggcaattagtacgcacagtaaaaaaaattatgctgcggctaacctggtcatcgagtttggcggatgctttttgtttttgatgcaagatgtacaacacatgccaggattggtaatctagatgtggttatttctagtgtatatggcatcaatttatcttttcttgtgtcgtgatagcacttcaattctacgattaactggctatcctgaataaattgtaagcggtgcggattttagtcatgtggcctttagtttctgaccagtatctctacgttgaacaacttaaagattcgctaattgattgcgggaaatttaacaggttgtgctcaagcaagtagctacgaggagtttaaatggtttttggtatcttattgtgccattttttgagattttcttaaatttccagcatttgtaggctagatttcctattgcgctatggttctcatgtcctttttattgtttttacagtgtggaagtaagcagctatgtgaacaccacctcttatgtcctcaaggaacctggcagtaataaacggtcaggctgctttttcactttgcgctaaagcatgcttgttcttataatagtttattgtgttcaaaagtcagttctttaaatggtgattctattgcaagttgcagtgtaaggtcagggtcttgtggtaggccaacatcaaaagcttccagggaaaagatcagaagagataagatgaatgataggtacatcatacttcctagtttttctaattctagagttcggaagaaagactgaccctgattttgtaacgttacttatgcttcctaggtttcttgaattggggactactttggagcctgggaagccagtaaaatctgacaaagctgctatcctaagtgatgccactcgcatggtaattcaacttcgtgctgaagcgaagcagctaaaggatactaacgagagtcttgaagataagattaaagaactgaaggtgatgcaacctaacttacatccatattccaaccttctgttatccaaaagcttgtgattggagtgcttcttaacaatttttagcttgcggctgatacatttcattttagctaagatgggaaattgggaacacattttgagtgacctagaatacaacttggttgggatgttgcgagcaatctatcatttggcttaaagctaaaattcttttatttgtcacatttagctgtttaataggacttctcatgcttgcgttgggctattgtttgccaatacggcaacacataaattagctaatcatatgatgatgctgcatagtagtgtggagcacaatgcatgtattgttcacatgatttccagcttttgtaagatgtggaagtggaactgtagggaacataagtgtcctatcctgctatgatctatgctccatgttttggagaacgcccaactagttattactcatgtttgaaatgatgatatctcatggctaatgtcttactttcttccaatttcaggcagagaaggacgagcttcgtgatgagaagcagaagctgaaagtagagaaggagacattagagcagcaggtgaagattctgactgcaactccagcctacatgcctcaccccacattgatgccagcaccgtacccacaagcaccacttgcccccttccaccatgcccaggggcaagccgcggggcagaagctgatgatgccttttgttggatacccggggtacccgatgtggcagttcatgccgccttccgaagtcgacacctccaaggacagcgaagcgtgcccgcctgtcgcgtaatgcttcatcggttgcgttatgtgaattaatcgtaacctgaaaccgcttagttgctcaatccattggttgggcatcgtcgtccctgattcacattcactattgttcttgtgttagtagttcgtttttgtatggaagtaagctgacatttgtggcgctctatagaggctactgcccccttttaatgtacaatacaatttttccggagaaaggaagaatgctcattcttgttctctgcagacacccggtgtcaaattcagtagcatcatatacaccatttcttatcacccaaattctgtttgtcttgtatgctgttttatgtaatttaaccaatcgatacaaatcttgttaaaagaaatgaggacatgtacaacactttgtgctaaagaaaccatgatttattttatcaattaaactatgatgagagatagcagcatcactgtagcagctgccatgatggcaagtgcagtggtggcactgcctgaagatcccggagctgaaccgtaggagacgacgccgggggtggagatgatcgtcggcggcgacgagccgtcgatgcagatgccgcccggcgtgccgttgccgtcgccgtcgctgcccggcggcggcggcgacgggattgagcagagtgtcctgacctccagcttcatgccggcgtcgcagtgccccggcacgccgcagatgaagtagcgcctcccgaggcggccgagctcgacggcgtcctcgccggtgcggtggacggcgatggggctcgacgccgagcatgagaggtagccgtccttggtcacctccaccacgtcgtgcgccgccgctgagtacttgaacactgtaatgtaaaaaaaaaaaaattcaattttgttgttttggatatcgacacggtcttaagaatacgtatttttgtagcaaattctagcagtataacctatatagtttttgtaagttgtaaaatctactaaatataaatagtttaatatcatttaggaggatatatgataaaatgcaaggtgattattaattagttaccaagcttgtcgtcgaggcggaaggtgatggaggaagcccaagaggtgtagttggtctgaagatcccacccgccgttgggcttgccgacgccgtagctggcgccggacgccgtcgagaacgccgccgccgccaccacaacgacggcgagcaatgccattctttccaagctcactatttgcagctaattaaatggatgtcgaatatattcgaactactcaattaatggcactgatcgatcaatgatcaatctaatcgagagctgatgggaattgttaagacgtgtgatgattcatatgtgtctcggtgcatatatagcgttgatttgattgcagattatggtcgctgaacgttgctggattctgtcggtcttaattagtcagcatgcgtgtaccacatggtcattagttagctagcgatctcaattagctttctcatgataaaaataagggagcactagtacttagtcgcatcgagcaggtgaaaattatcattgtcagattattttcagaggacccggtcactcgtgtgttgagtgtctcaaaagattttggaacttgtctcgtatatgaacttaatttaatcttgctttctttgacaagctaattctgctgctagaaacttccaaaattttaatttgcttagttaactttgaaaaaattgtcgctaggcctagctcccgctaatgtcgcggtctttccatacaggacttgcgactgtttcgttaattttaagcaaaacttgccctactaagtaatactgtaattggtaaaatttaacatcgctacattcgatatttaataggggacgttgtttacttttaaaaagtcttttacctttctttttattttttaaaaaatacacaatttttatttattttgttgtgctttagtttatcattaaaaatacttctttaatactttaagcatgacttacgttttcgtatttgtataatttttttaaataaaatgaataattaggtcaaaagttaacaaagtaatctaaaaccgattggagtattcccaagtctttaggttgaagccaacacttaccaaataattaaatccgtaaggttttggttttatgctcaaggtttcaaggtttgttactaccaataaattgaaatataaacagaaaacaaaaggtagagaatcaaacttatcccaaatataaagaagcactagtaatgtgatgataaagtaccagcgatatgatggtggtatcatggattaaattttagttctcacaaatattacgtacacgtggatacgtttatattaggattttagtgagactagtgagttgcttcaggtttagtgaggctatgtttgaacttgtgtaggactgtgtatctttttgagatcacggatttcgtgaggctattttcgagtgtgcgttagtggttttgtgtcagtttagggtgtgtcttttaatgatgaggaggaacaactaatttgcttagggcaagtactataagcatctgagtacaaactcctaagatgccacttaagcttaaataatgaggtggaggagaaaagaaagaagatagagcatgagccacctctcatgcaagggcaacctcttcacaaactttaagaaaaaaaagaaagaatgaggttgattggataagagtggataaaataaatagttatgttgcattgtgtcacaccccaatctggcatcgccgtacaacggcacctgacaggaacgtgtcgtaggaataacggcgcgaaccgcttcctacgaaaccgcgttctcagtaccagtcccaggacatagtgctggtacccacggtgataaatatgaatcattgcaaatccttaaaaaaattagaggacttatttaccttaacttaggttgcagctcaggacagcctgagaatacaaccgacgacgcggacggggaaacaccaacagcagtagcagcagcggaaccaacgaactaacacccaacaccacaggcaacggctgggaaccaggacaaaaccctaatcttcgcttcacttcatcttctcttcgagacagaggaactatatatatatatatatttatatagagcaagggtgagtactttcgtactcagcaagccatgggaattaagtgtttaatgcaggcttcaaaggaaaggctgttatttttgcaattgattttatttaaactcctttttgaaacaactaagtgagtgcttctcaaacgatacggatgagacagtgcgtctcgtccggtcggagtatgtgcaatgtatcggtctttgaattggtcaaggttggcatccggccaatagctttcaaacggccacccgggcctagctgatcccatcagccatagattttccaaacatcgatcccattccacaacagcaatttcacaaagcagtagtcaaacaaaactacgctaggaatcacctcacattcgcccatgactgtgggcacggctgttcgaacagtttaataacctctgcagagggggtacactttacccacatgatattactagccttggtcacctagcccgtgtggatcagacacgtttggtgacttggggctttcacgacaaggcatttcaaaagccgacacaggttcaccatatgccaacgagaggggtcccagaccgacaataggttaggtcccagaccatactgtgccaggaagcccgggggttctccccggcaccaccccgttgaatccacatgtctcttggcatcatggctcccccgattagctaattactcagctaggggtgtcctattccacccatgtggttgtacttatcttatgtttggatgaaattccaaggaaacggtccttaagtgcaagagcgggaaaccgtactcctggaacgtcctccggtccgcggttttggaaattcatttagtttgcaagcaccgacccaggtgtcgggttttccaattcttttgtaaaaccccaagttttacccatcgttggatattttaaatttgaagggaagtgttccgatgctcgagcccgaaggcccatgcatcgaagcacaacagtcgacaaaggaggtctaagtgttcaataattcaaggagggtaattgcagcaattaggattggggccggcaggctatctcgcaagccgcggccgaaatacttgtgttaaacctattcatgcaatatttgcggaaaagaaatacttagatttaaattataggtgcaagatgatcaaaggtgactttcctagctcaaggtcttcacggagcttcacgaatcttcgagaaaacctgcgatcgacgaaaatccggtaaccgcaactatacgcaaacaatcaaaaacctaaacaaaagaccaaaagaaagatcctatttagactaaataatagtgccattaaatagatctcaattttacggaaatactagaagtggaacaaagtcaatcggacgaatggatcgagaaatatgaatttggaagcttaactggaatttctggacaaggaaatgatttattggatttttctagaacacgagaaatggtttatggaataatattctcaagaatattattgatggtcgctgacatgcgggaccaaaggaaatgattcatggaatttttggaataaggaattgatttatgaaaaaggaaaaaggatttattaatccctttggataagaaaaggaaggagggataggaatcagactttcctgagcggcttggcgcggcccgagaggatttgcgtggctcggccgagcttattgggccggcacgggctacagggaggcggcccaagagaggggcgcggggagagagaggggaaggggagccgggtagaccgggctcacctcgcggggtcccgagcgggcccgcttgtcggtgaggcggtgcacgtggaagcggcgcacgcgggggcgggcgctagggtttcgggtgtgcgtggttcgggcgcggcgcgccgggtggacggatggtgacgggcccacgtgcagccgcacggcttgccgtggactgcgcgcacgggggggaagatggagggagggggcggctgataggcttggcccggtcaaagatgaggtggcgccgacgtggcgcctacgtggcagtcacgtgggccggcgggaggaggaaaaaggggaggccgagatggacggcggacggcggccaagttcaccggagctcgtcgcgacgattcgagagagagggagtacaccggaacgatgggacggacgagaggaagtgagccaccggatcggattcgccggagggaggccggcgacaacgaatcgcggcgacgcacgccggcggcgagaaaaggaggaaacttcaccggagcaacgggggttcgattaaaaggagggggagcatatccggggttcaaggaatccgtttccagcgccggatgggacgaaggagtaccaaggagggccggcgacgagcggcggcctccgggagcagacggcaatggcggcgaggccatgccgggcggcggcggggctcggggcggcgtccatgcgcgttcgggagtgccaccgagctatcacgcagactagagggggcgagggagagcgaggaaggggaacgggaggaggcactaccgagccgagacgggcgttgtgacgagcagccgacggcgcgggagcgagctctccggcctcgggccagggaaggggaagatgacggtgcccggagtcctcttctcgcgtccttcgcacgcaccggtctccctggtgcttcagcgacggacggcgtgggcgactgcagggcaggggcaacaaggcgcgattggcgacgagagaaacgagtgagggagatgggaggggctcgggtttttataggtggcgatgtcggtttgggagaaccgaccttaggacggtcaaggagaggagctggcggtcgggcgtggtcaaggtggtggcaggcggtgacgctgatggtggttgggcaaaacgaaaaaggaggaggagaaagggagctctgctccttgctgttttgggaaaagtttaaggagggagagggagtgagagaggggctgcctctctcggctttggaagctagcggcgtggagcggcagagcggcagcgcacgacgcaggcgacgccagggcttgacgcggcggcaaccgggcggtcggccacgcgcgagcgcgcgggaacgagcgaaggcggtggaggttttgggcggcgacggagggaagcggcgtcagcgcgagagagagaaaacgagagagagggagatccttctctcggcgacggctcgtgcagcgcatgtgagggagatggcaaaggggagagatgggctggggagtggatccggcccatccaaaacacggaggaggcaaaatagacttttacagagaagactgatttggagtggattcgaattgaggttttggatttggatttcgaatttgatgcttggtcttagggacacaaggtggagtcaaggaaggaactcaaatgggaatcgagaacaggtatttggcgaggattcaaggaggcgattgaatttcggagacttgaatcggaattggaattttgaggtgggcgattttgatggcaacgagggggaacaaagatggagattgaattgagatcttcacacaaagaacggaatttttgaaattaggattttgctgaattagtttttaacgtctcacgaaaagcggagcgttacacattggagctagcatattagagacaatatggtgtatgagctaccctctaaaaattaattgatgagatagataagtttagatgtgatagtcatatctatcataccacttgcccttaccatgacctagggcgaggatgctaccttcatggccgagcaacttaggaagctagggggtattcgtacaggggcagccggagctaggagaggagagaagatggggaaggagaagcccaagggttatttggtgccaaataatattttagcacatagccacgtatttagaatgaaattttatcgattctcatttggcatttggataaaaccacttttcagttttcacaattagtataatcccaatttcctttcaccactcagggacctaattgaaaatttccaatccagcaatgggcatgaaatccagcaatacgacgtatattgacatctctcatgagctgaagaagctcctccttgacaaattgttactgattggaagcataccaaattcagatggtgattgggtcatgggcaagttcaccggccgatgggcaaagttggagctccagagcaaaatgcaatcggaaagcagttcatctacagtttgtgctcaggaacagcactgagcatatgcagccaattttatgtcctccgtccatactccttatggcgagtatagttctaaacttttttttcaaacttccaactttttcatcacatcaaaacttttctacacacacaaatttttaacttttccgtcacatcgttccaatttcaaccaaacttctaattttagcgtgaactaaacacactggcatatagcaacggagatatgcttcttccgcgaagacgagacaggcagctcatcatcgtcatcatctgcatcatacagaggcccaagcagagaattatccaattatgtgatgcacctttctgcaaagtatatcatgtactccggaaatgggtcgggacgcagccaagagatatcacattattttcaacagaaaaaaattggcggctttgattttctggtatatattcagtcagtcatcctttcaacttgtgatatcccacatgttagggatgatcaattcaagaattctcatgaatatccatggcaatttcataattaccgtgttgctggtgtgattgaaaatataaatactagggaatgaactaatatcaaataaatataagggatgaggcttcaaacccaaaccggctagcccaccactttgtagagttagccggaagaaccctgggtgtttctcgttgctggtgtgattggctctgtatagtgatagttgtaggtgacatctctgaaattactcaagtgattctgaataattaaattaccttgacttccactactatctcataaattaaacaattgatgtggattcaagtgaaaaggatcacataatagaatccaacaatatatatactgaatcaaattacattcaacaaagaattgcataattaagtacaacaattcgagcagaattcatctcaggaaaaaaagaatataaagtatgatgaatctggtatctccaaaaagaacaaaaaaaagagagaacaaatcaagaactcatcatgcattcttgtcactctaataaaagaccatgagaccagcggccatggcgccaacgcccagaccaacaagagactcaacaacaccacccgacttgctcgccgagctcgatggcgtcaccggccggccaccgttcaccggcggcaacgccgccggcgacggcgacggcgacggcgtggtgctactaccgccaggggcggngggggcggncttaccttgacggcgagctttatcccggcggcgcaatgtccagggaagccgcagatgaagtaccgcgtgccaacggcggcgagcgggacggtgtcatcgccggagttgaaggtggtgatggggctcgccgccgagcaggcgtcgtaaccggccttggtcaccttcacgacgtcgtgcgccgccggcgagtacctgaacacgagccggtcaccggcgcggaaggtggcggcggacgcccactgcgcgtagttggtgcgcgtgtcccacgacccggccggtgctcccaccgtgtaggtggtggcgcccatcgccgtcgtcgcgagcaccgccgccgccgccgccacggccacgacgaggagagctctggctgatgctgccatggccgcgacgatcgacgatcgaggagatcgatggagcttggaattgggaggagatgatgcaagaaatgagatggcaaggagacgatgggaagtatgtgtatatataggtgatgggtgattaattagcttaagctaagaacatatataatacagattataaatcagctataatcacatatagaagagatgagagacgaaagaaaagagaagactatacagatttataactagctgtagtacagactttaaaatgttatatgtgtataacaggtggaccaattattaatgatgtattatatatttatagttaattattgtataaattaattattagattgatataatttagagttattaattagctatactattaaacttgctttaatgcattaagctaattaagcgcgtggattggcagggatgagtgaggtgaggtgaggtcaatgcaggggttggttggtcaatatgtgtttgactagactcgtgtgaaagtgtagttaattaattaattaattgatgggtaggtgtgttagaatagtcgtcgagttggctgctcgactttggtctgaatcacctgattgaaatgatcaaagctgcatggatgtagactgactggcttctagatgagaattttctctttctggatggtttttttttgtctttttataagaacaagatggggtcttaatttgattatctaccaatagttaggaggttttttccccctcgagataatgtagctgcataacatcggcgtagttacacacaccacatataaatatccacgaatgtatccactaacacacatctacaagctttgctataggcagaagaaaaaaaattcataatatgtcatatcataatattgtactattctataatatttaaaatattatgggggcaatttgtaaaaaaaataattcaaaagcactaatagggtggtagattcgctgccaccactactaaaggcttttaaaggagtataaatgatactccctccatacttgtaaaggaattcgtttaggataatgtttaagtcaaacattggaaatataaatcataaataatgctcaagttgttgagtttgaaaatgtaaaaattatatgaatagatttgttttgaaaaatactttcataaaaatatacatgtatcacttttgaataaatatttttatagaaataagatgtcaaagttgtgttttgaagaccgtgtcgctgtccaaaacgaatttctttacgagtacggagggagtacacaatatgctacgtggacaagtgtggggtgcccgactgtacgaggccctaattttggattgactccaacgcgttctaatatgttccatgacattctcattctgtttttgtacgttttacatcctctccttcagtgatctagcttgaacaaacttgtttttcttccctttgatgatcgttcgatggtaattatagccacctaaaatatccgttgctcatgacggcgatgcgaacacacgtttgaggtgttgaaattatgtttttatacttcgtaaagaaatcagagtaattcatcaggatgcatgcaatgatttcgtaagtttaaacacacaatatatagttacaatgttagcttcctcgatcatccacatgtttatattgtaccatataactacagctgttattagtcatttaatgttctttttttttaatttagaggagcacattagatctatgggtagttgatagttcttctgatgtggataggggatcatcatccacagcgtgaataaggataattttacaataaattgtaaaatatgttgcattaagtgaaaagtggctatagccttggcctatacacagtataatgtaaaacatactctttgcttaattaatcctattttctaaacagagaatttattattggttagcaccagggcatcggatttataggtacggatatttgaaggtttagctagcatatcccccgtttcggtaaaatatggctataggtatttatatttatgttcatatgagccagaggcttttgaaatggaattctcccccttttgtttaattgcaactgactaattaaggtgtacattttaggtgaaaagacaaaattgaagtcaaacaatagtgatgatggtcaaaaacatatatatatagcaataaagaatcaaaatataagcaagctcaataacatgtaaccaaaaattacataagtaacaatatgagctggactaatcacaaacaaatcaatacatatgaacatgatcaatcgatcgccaatgaagagagaacaaaaaatattcttcctctaatttagaaggacatgaggccagcaactatggcgcccaaactaagcccaaccagagatgcaacaccagtggacttgctcgccgagctcgatggagacacaggccgaccaccagccataggtggcatcgcgttcggtgccattgctgtaggcgtgcgcggacgaggcgccattggcgacagtgcagtgccactaccgccggtggcagtggcggcctcgaccttgactgcgatcttcatcccggcggcgcaatggccagggaagccgcacatgaagtatcgggtgccggtagctgtcaatggcacggtgtcatcgccggagttgaaggtggcgacggggccggagctcgagcaggagtcgtagccagccttggtcacctccacgacgtcgtgcgccgccggcgagtacttgaacacaagctggtcgccgacacggaaggtgacggcggacacccactgcgcgtagttggtgcgcgtgtcccacgacccggccggtgctcctaccgtgtaggtggtggcgcccgtcgccgtcgtcgtgagcaccgccgccgccatggccacgacgaggagagccgatctgttggcagctgccatgatcgccttaggatcaattagcagagcagatgagagatcgatcgagcttgcaactaggtggatcagatcgatcgatggaagggtgatgatttgcaagaatcgatgatggttttgagtatatttataggtgattgtttgcattgcattgcagagacagtggaggtgatgtcagtccaggattataggggttggtgggtcaaatgcgtttgactccatcgctcaaagacgtgtgtgtgtgaacgtgtataataattagtaataacaatctaactaagtctgctcgactaagtctgaaacacctgattgatttttttattgttaaatggaccaagtgctcacgcatacaccacacacaaacacccgtttgacacagctctagctactaactccaacttacctagaaaagacacgaatattagggaatgacttaatatcaataaggggtgaggcttcaaacaagatcatctagcctaccatcttgtggagctagctggaatacccctaagcgtttctcaactccaacttacctagagctggagctgtaccaaatggtatagattctccattttttttagagcggagctagcagagctgctccacaaatttgtactacgggggtggagctgggtttttctgccccacagcttcacttcattccaaaagacccactaccctttaaattttcatgtaattacgtgatatgccattgaactacctattcatatcccctctcttcccgttctctctcctcatcttcctccccatcctcctgacggccatcctcctctcgacgacggcgggctgcgcgtgggcagcggcgtcgacaggcggcggctgaggtggcgagtttgtggcgcagcgcgggcggagaagcgacgtttgcgtcggcgacgacatgtagtggtggtgggctggtcgcgtcggcggcggtggctaggacagcaggatgacggcgtcggtaggcggcgtgtggcgtcggcgagcggtggcgtcgacaggcacgagccaaacggcggcggcaacagcagggaaacgcatgtgcggcgacggcagcaatggcagggaaacacatgtgcggcgacggcgacgccctctatgtgttcaacgaaatggctacaaggcacgtggtgacatggagctggtaaatctagccaaacactttttacccacctcaacttctatatgagctagctcccactagagttgaagtttataattgggagttagagtttgtagctctaccaaatgaggcctaatatatacactaataagcgcataccaacaacaaattaatttctaatcctatgaaaattctattgaaattgtacccgcgaatatatatataaccggatgtatgtactaccaatataaacaccaatataaacgatccaacagatccaacagttgagattgatttatctttctacttaaatacttttcagtacaaggatatgccacatcttgtattttttttaattttattttttatgggacgaaggcaatagataacaatatcaaatttaaaaggataaaattatttttgtattataatgtcttaattttagccgatagtgaaacatcattaattggatctttttctctgcttgaacccttcccccattccccatcgacctcttccctaaaggaattataaggtccggctatcagaacggggacatgatgacttgatatgatgggaggctgggagcctagatcactactacaaaacccctaatagggatcggcttatagttaccggattatttaaaaccgacacctattaactgcccacctccgtaggtcaaaaatatagaaccggtacctttggaactataggtaccagtagtacttttccatgccattataaaaaaagtgtcattgattcattcacactccacatatgtttcacataaatcaaactaactattttgcttgccgaccctcaaaataataatactaataaaaagaaaacaatttcaagcatggttatatatatgtgatacagctctaggatagtacttacgcgaagttgtgaacaaaaaactaccaattcaaatacataagttaaattatcaagatactttattgaaatatatgtatgacgccgttgactttttattcaacgtttgactattcgtcttattcaaaaaatttatgtaattatcatttattttattgtgacttaattcatcatcaaatgttctttaagcatgacataaatattttcatatttgcacaaaaaatttgaataaaacgaatggtcaaacgttggttaaaaagtcaacggcgtcatacattaaaatacgtagggagtacatgttagtattcagttacatgttctagaaggtagagctttatgctaaatttctttggagtgtaatatatgtatcctttggcttgaaaccaccaactagtttctctcatcatataggtggaagctggctgtttggtattggttgaaaaaaaagcgagtatttgctttatgttggactctatgactaagtaaaaatgatatggtttttgacaaaacttcatctaaattttatttacagatactttttaggtaacatataggtttcggtttttgacacgactacaaatgtctgtcatggacaaaaacctatacatctctcttttacatgccagaaactactatgcacattttcatcaactttcgatcgagatttactagtaggattgctacttgagtaagttgttcatatcttttttgagtttggtgtctcatttttattatctgctcatcttttgttgtctatttctattgaagcaaaaggcagatttccaatgtttatccattattttaaaaaagaatattgttgagctttagatatggtctatgctttatatgttgttttgtgttgtttaattgctattgatttgtttctaactaaaatagggatatacatatttatgttcacatgagccacatgcttaggagatggaattctccattttaggtggagatacaaaattgaggtcaaacactagcaatgggtcaaaagaacatttatataatattggaatcaaatcgtaatgagctaaattacatgtagcaaaaaaaatgagtaacaatatgagccgaactcatcacaaacaatcaatacatatgaacacgatcaatagatcaactttgaagagagaaaaaaaatattttttccctctaatttaaaagaccatgagaccagcaacgattgcactcaaactcagaccaaccagagatgcaacaccaacaggcttgcttgctgagcttgacggaggggtgggccggccaccgttcgtagggggcatcgcatttggtgccattactgtaggagtgcgtggaagaggggccaatggtgacggggtagggttgctgccggtggcggcctccaccttgacggcgaccttcatccctgcggtgcaatggccagggaagccgcagatgaaatagcgggtgccgatagcagcgagagggatggtgtcatcgccagagttgaaggtggagatggggctggagctagagcaggagtcgtagtcggccttgttcacctccaccacatcgtgcgccgctggggagtacttgaagacaagctggtcaccgacacggaaggtgatagcagagacccactgcgcgtagttggttcgtgtgtcccatgaaccggccggagctcccaccgtgtaggtggtgacgcccatcgctgtcccgagcaccgcggccgccatggccacaacgaggagagctctggctgccatggttgggaagagaggttgaaattggaagcaagagtataattggagatgcaagaaatgaaatggaacttggttgatttggggaggaggtatgataggaggtgtatatataggtgcttgttagttaattaggtgtaagctaagcgcgttaagtgaggtcagtctaaggctttggttggtcaaatgtgtatgactcgatccgctcacactgacacgcgcgtatatataggaaaatgtataattaattaatgataggtgcacgtgagaaaagtcgtgatcgactgctgctgctcgaccgagtctgaattaatttaatgatcacctgattgaaactatcaaattgacagagtctgaaattagttatctaattgaatttgtgtacgtaatacatataatcatcatctgatgtgtagtgcaagaattcgtgggtggtgggtgggggttgttcgatttggcgactaaattttattccttttgttttttaatatgtaactatttttactttaatttggatacgatatctaaccattcattttatttaaaaatttaatttaaatatataaaatataagttatatatccttgaattgtctttaaggataacacaaaacacaataaactaaacaatactataattaattttattaagaggattgtcaaacgtcatatatataaaagtaaataataacatcatatgtttaaaaagatgcagtaatataagtatatataccatgaaattaatttgcacatcagatgggggccctggtgtttgatgtattttattattatctaaaagccaaatttctagaaattaagcttgaccaagatctaaatcggttagttgggtgaaaaaatcacatatacacacgcgagctggtgtgttgaattcacgcgatgatgacttggctcatgctttcaaatttcaaattaaatcgcaatagactagtagcctgttcaagcgtcggttcaaattaaattagttgttagtggaaaatatcagaactaagggcatgtttagatctatttggaatggcaaatggcaaatggcaaatggcaaaagttttggtggtaaaagttttggcattgcaaaagtactagttggtgtttagatgcgtgttaaagttttgccattctagcactaaagtgagagagagaaagagagagggagtggtcccaaagcactttttggcacaatatgctactatggactagcaaatgataaatgccaaattgacaacttttgctactagtgtttagatctaaaatggcaaaaagtgctacaaaatggcaaaacttttgccattttagaggatctagactaggcctaaagacttttccatgccattggttcccacgtatacgcattctgcacatatatcaaattaaccattcaagcatggatatatgattagttatgcaaatatgagctttattcggaaagcacttccgtcaacaaaaagaaaaatgctacatacgtgttcaaacttcaaatacagaacttgacaaaatatagtaattaaagtgttgtgagaactgactttgtcaaatctcctcatgtctctacttttatctatttcagaaaacatgcatgggcccaacttagaccatgtgggtttctaaaaacaaatttaaaaatacgtttggataaaacaaaaatacaaagggacaataattatgtttaacaatattgatgtgtataaactttatacattatgtgtagaaactttttatatagcatcattctatctatataatatttgaatctgaatccaaattcaaattcgaatcggacatataaattttcaatgtataaactttgggtatacaaactttaggtgtacaaacattgggtgtataaactttaagagtataaagtttagttgtacaaacttacttaaaaaggaaagttatgtggtgaaaaaatgaaaagaaaggcggagggcaccgatatccaattacgattttcgcaccattatactacatgcacaattccatcatgcatgtatactacatacacaattctgacatgtccatgcatccctttgtaacacaaaggatggataaatccatataatatttgatatagagaaagctgattaattaatactttcccacaaagctactactacatccacgtcatcaacaaaacatgggtggtctaatttttttccttaggatattgtaggcggttgaattcctcaattcgcaaaatattttattgatccttcaataaacttcttttgcaaaaaaagggtccttccacacccctacctttagggaaaaacatatttcacttgattatgtatatgtggataatcttgttggtgtggttatgcaactattactcgacaccactatatatacatgtctctttaaaaataaagtagaaaccccaacaaagtggttgatttgtttgaccaatgatggttggattagaactatgaaatgaatgttgcatcgactaggtggctaggttagagatattttgcttagaggttgctaagttgaattaatcgagggtagtggagaggtaggtgttggaagaggcaacactagtgcgggagtttgagggatatcttcatggtttggataccccctctctatatatagctcaaccgatacaggggtatcttggtcccttcacctgcaagagagacaacaaatctgtaaaagggaagaagatgaatctggcatgaatcctctatttgataatagtgttttggtgaaactcaattgaaggatggcattatagtgtaactcacttttgatgatagcataatctgaaatttcttgtttgatgggggcggaaaagatggagcactgggattagggtggacaactggatatatgtacatattgattgtcaagatattattaaaataattcatttatgttagtactatttatttacatgttctagaaggtaaagctttaggtatggtctacggtttctatgttgttgtgttgtttaattcctattgatttgtttctatctagctacaatagggttatagatatttatgccacaggcttttgagatggaattgtccccccccttttgtttaatttcaatggattaaggaaagttttaggtgaaatgacaaaattgaagtcaaacgctagtcatgatgggccaaaacacatatataacaatagaatcaaatcataattaatgagctgatgaattacatataacaaaaaatatattacatataaataacaatatgagccggactctaccagagaaaatactcaaagcaatcaatatatacgaacacaatcaatcgatcgccttcgaagagatacacaaagtatcttcttactctaatttagaaggccatgagaccaacaactatggcacccaaactaagaccaactagagatgcaacaccagcgggctggcttgctgagttagatggaggcacgggccggccaccagccgttggcggcattgcgttcggtgccattgctgtcggtgtgcgtggacgaggggtcatcggtgatggggccgggttgctgccggtggcggcctcaaccttgacagcgaccttcatccctccggtgcaatggccattgaagccacatatgaagtagcgggtgccggtagcggtgagagggatggtgtcatcgccggagttgaaggtggcgatagggctggagctggagcatgagtcgtagtcggccttgttcacctccaccacatcatgcgccgctggagaatacttgaacactgcacattacacatgcatatcattagctcggttagatattatactaaagttgccacatgtatcgatcagttcaactcaaacatttaagctggtgagcaaacacggacaatcacctatctgatctccggcacgaaagttgatgttggaaacccactggtcatagttagtcctcaagtcccatgagccgctcggagctccgacggtgtaggtggcgccgagcgccgttccgagcaccgctgctgccatggcgacgacgagtagagctctggctgccatgatcgccatggaatatggtccaattagctatatatcgacttcgaggatcgatggagatgatggtcgatcaatctccaagcaattggcagtagaagctaagctagaaatcgatggatgattgaatgaaatgagatgtgctgggaaggtgtgtatatataggcgttggttggaggtgtgaaattgtgaactgaagcagtagaagtagaacgcgtagaaggtcaaagactctgaagagtaggtcggtcaaatgtatgtaacgttgactcattctctcatagtaagaaaagtactatgtgttgactcactcgttggatgcattgcagacgtgtatggtgagatctagctgctactgatcttgcctggtcagttcttaaaaaaaaggaaaaaaaatgtttggtcgaccaagtctgttgcgttagattaattaatgaaaaaaacacacctgtgaaatgatccaacatgcaaaggacatctatactaatataaaaaggaggagttgtcttcttgcaatcctacagatgaaatcaacatagttaatcccatccgtccatctgcatatctgatctaatctcatccgtccatcgctatctcatcaatcccacctgattcctctcccatgctacagtcaaatcatcaataccccacaccctaacgtcgctcggcattccctcggtcccactcccacctcccaccaaaatcaatcgcgtgatttcctcccaacccccaccacgcgattttctgatttcctccgccttcatcgccgcctccttcccactccgccactccgggtggtgcctccctcacatcggctcctgtggccgctcccgtcttcgccgccgccgcccgccggtgcctccctccaccaccacctgggccccgcctccttgccattcacgaacaggagtttcggcaggttcgtgcgggcgccgtcacgccgccacatatcgagactcgctgtccgttcgccgggtagcccgcctcctccacggccgtccagtctgccgccctcaacgccgatcgcgccgtccagtccgcccgcaccctctgccgccatcttcaaaaggtatagatcccctcctcctaccccttctctctcttcctccatctctaatatgttctctctatccattagtagccctgccgccgccacgagatccaggcgagcatgatggaagacgtggatgcggctccagtggttgattgggtggcaacgaggatgaaccgcagctgactgcacccatgcacaaccgcaaccaactagctaaaggtacgactacgagtccttcgagcagctaaccaccatgacgcaattccgtttgagcggtgctccatgtggctttccagtagatttgacccccaaatcgatatgatgtagcatcaaatgatgtgaatacacttcatgagttttgcctttgatcaagacgaactcctgattatagcgtcctaagctccatatggtgcgtgtcagcatccctttgtctgttctaggccagaaattggtgaaaggtttgtcaagcggtctacttttgattgaaaacatggctacttaattacttatattaatgttgtttatatgtatgactgatgttctacagctacattttgtgttatctaatataactattttttcttttagtttggatagatttggagatgaagcttattaatttttatattttggttccgaaaaagaaatagaaataatacatgttgtttttcacgatcattttacattgaaacagtaataaattgacgacatcctttgtttacatcagatggcatctttctaaaagattatgtgtttatgctgttattgcacttgtcatacatgttagaataagactaaaatcaggcctcaaattttgacatccaactatttgttttgtctgtatagcaacgaagcctattctcttcaaaaaaaaaaaaaatggcataaatatgctgaaaatgagcttatgctaatcctgagataaaaaggggctgcagggatgttggggctttggtccttgagatcatgcatattgcaagagaaacctaatctgagtttcaaaagtggatggtgcagctgttccgtttgattgcaaaatgcccgaatagctttgactttcaagtaagtttctttccaaattcagaactctaatttgatatatgccttgattaatatttgttcatgatcctctatgtatcatgctctgcatttatgtttgcaactatccagtattcgcttcatgatttaacaaagggtttgattatgattggttactatcaggtgtttggggtcaagtctgtagtttgcaaggagtgaacctcattgtccgttcgttggggagacctcctcctccaccgctgtccagtccgctgcccccagttcgcacgttcgagggggaacattgatttgttctttagaaattcaataaataggcattcgtacatgtggcatccgatggttatatgctatggtcatttttcattaaatgttgactcaactttgtggtatgttttcagtttcatttagccattaaactctggaggaactacagaataaacttgtagatgcagaggccagaatggatttgtaagaggcaatggattttagtattcagtaatctttgatttcaggtaaattaaagatcattgcacaatcaagaaatatattttgtgaatgtttgcaataacttgcatggtggtaaccttctgtttcagcttgtcaatttgatgcgtaaccttctgtttcaatttgtcaattttttgttcatccttgtttttattatgatcccaaagatcaccactttgtctggcatttgagatggaataaagttaacattaggattatcattttgtatgttgtcctaaactgagcacaatggctgatttcagatagaaacaacaccttttgtcagttgccaagctgaagcattagaaggggtttgtcttatttttaatattgaagcccaacgggtagatcctggaagattatttggggctttccaaaaagaactgtttgaaaaatattttgatttttagattagagacatgaagctgtcttgatcagaggcaattctccaagcagtttagattaagatgctttgataacctgcctgcaaatctctaataccgaagccaccttcagaaattggctctagctaccaatgtcattccaatatttaatatgcatacctccatccttttgaatgccagtccagaattttctaacgatagctgtgagctttgaaataagggttttggaatgaagaaatgtcaacatgttataggtaggaatggaggaaaagacatattttctgagagctaaccttccaatacgacgtctagagcatgttgttctataaggacttattggtggattgctataaagttgtacattacaaactaggttactgggcgggtgatgtactccctccgtttcccaatgtaagtcattctagtattttccacatccatattgatgctaatgaatctagacatggaggaagtatatacttatgtcgtgagcattaatatgaagaaaaaatgtgttatttgaaactttccaaactcttaatttggcatattccaaacattttttacttccaccagtgtatatataaaaattttacatgatataaacacaaaatatttgaaaacacttgtgctaaaagtaaaaaaaaatcagaaaaaagagaaaaaaaaagaaaaaaatcacgaaaaaaccaaaaaaccaaaaaaaaggctccccgccagctggcgcgtgcacgccaattagctctcacggtaagatgcagggtcaatccacaatcccattttatccgtccggttactcacttatttaactatttaattaaacatggacttacggatctatccatttatacctagatgattaatacctgaattgcaattcgaataatgaaccatgatatgcatccatatataatttaatcaagtgagatgtgatatatatgtatcgatgcctgaattgcaaatcgaataacaggctgtgatatgcatccatatataattaatcagccgatagatgtgatatatatgtgccatattggtggctgatttccaattaattaaagcactgtcgtctgatatgttgtggtgtcaattctcaattcaagcctatttagtactctctccatttcgaaatatttgacgccgttgactttttagcacatgtttgaccgttcgtcttattcaaaaaatttaagtaattattaattcttttcctatcatttgattcattgttaaatatatttttatgtaggcatataattttacatatttcacacaagattttgaataagacgaacggtcaaacatgtgctaaaaaatcaacggtgtcaaacatttcgaatcggagggagtagcagataacatcaaacagtaatgcttgatactatttcatcaaccgtccgattcacatgcagcactccggccgccacgagtcaaattaacacgcatggattgtgctgcctccggtttttaaatagaagacgctattgattttttttttgagtggagattgctattgattttcgatcataggtttgaacacacgtcttattaagaaattatataattattatttattttgttgtgatttagtttattattaaattaatggtacttgcactacgccagatcctcacacctctgacgggatacctgtgacgggcaaacgaattggtcagtattgaccattacctttgacgggttatacgggatgccgtcaccggtgaggcatctggccgcggcccgtcacaggtatcccctcacctgtgacgggccgaaaggaaaacccgtcagaggtataccagtgacgagtttttcttccaacccgtcactggtatcccctc

SEQ ID NO: 7366 - DNA, 63110 bp, Oryza sativa
  unsure (1)..(63110): unsure at all n locations
gggtggggggcgaaaatttctaaaattttgacccgaaattttcatccatgttcagatgtacccggaggccagagacaaatccattcccggtccataggaccaacaccagttgatgcctgctccatctagaataggaatattttgactaagcttatgcatatcacctcacttatgctgtcccccttgccctcggctcaccctagccccgggtacatactattgagggatgaggttaattaggggtagtaagaaagctcaaagttagtggaacgagcttagttccgatcggcttgaactcaaactctaatgatttatgattcaaaccatgctatatttttaggctcatgagttaatcagtcagttcacgatcgtcttgtttaactcgttagtagaagagatcgtcatatttttatatacttagtgcatctttacgagtgtttaaacttctagttatatccaaactatttgtacatttgtatgtatagtaagttattcataagttagttttaattattatgttaacatataatataataaaatagtaaatttaaaattacaaagctaagctagacttaacaaagttaacgagtcaactcacgagcaaagctaagctacgatttcagctcattatgctcaatgagccgagtcaagatggctcgtcgagataagaagatcaaatgaaccaagtcttagcgagccaagctgacttgttatccaccatatagatgaggtgatgggtggatgaagcctatccttattaaatcagactaaccatctagaattaagtgctcaattgcctattacagtactcaatctatccaaacaaaacaacctattagtgaataaagttgaaaagctaaaaatctattcggtttgcacaggagtaccgtataaccttcttgccttcgagatccgattggaattgagttttattgaagttgttttcggtgaatttggttggatgaaaggcaaatgcactatccaaaattttgccagttagtcattttagtggtactcctaaggcaaaacatagaaggaaggtacaattaatctcatgtttccgcaaccaagtgcccaaaacccggtagcccatgagaatcgtattgtgcaaacgtgcaaccaagtacccaatgccccgtgcaagcattgggcttgtttgggggagcttctagctgctgcagcttctcccaaaatcagaagctccctcaaacaatcaacttttgatccagattctgagaagaagatgtagttgtagaatctagaagataaactagaacccagaagttggctaccaatcagttgtttcttaaaattttaagctccccaaatagaattattttcatccacacctccacctccacctccatattcacatccacatctatgtcaaactcaaacatacacattcacattactgtggcgctcattaagaatggccgctaaacttgcccaattaatttattgcgagaaaatatgagaacataagtttctgatattgtacaacatgcccaatacacatctttattaatttattccaaacaaactgcagctagcatgataaataagggtgatacaactttatacatatataaccttttacatatgatttattcgttgcatacatattcctgaaattaaacataaacataaatactattattgggattgatctcacatctgcatatactgctacacggtacgacgtatatatgtatgtatgcattatcgcattgtacgcatagcctatgtatatgctagatttatttagtgcatggtgaccttggtgtacttggacatgtcgatagtggcacgactgcctgcctcgagtgggaagtagaaggggtagatctcgtagcgcgcccaacagctgctgtaatcaatctggcatccttgagcgctgttgcaagttttgtcaaacttggacactatctccgataggcaccgtgcgcacgctggcggcgctaggtctcgcgtgcactgtgctaacgcgtaaacactcacaaacggcgtgtactgctccttcgccctgcctagcccactcctacccactgcaacagcttgtgctgtcgcctttcccatagctttccccgctgccttctggaatgccttggggttgtccatgttctgccaatttatcatggtcacgcttgcatccctcctcgtatccacttccccgatgaagtcgtagttgtagtaccgcatgaagcagtattcgtacctgtaagtacatatgcacatcacccgcgcgcacaagcacataaataaggagaaaattaaacaatcgacgtgaaatcatgtgtactctcttatgttccatcattcttaatgtttgggacaataatatggtccttaatacgacttctacaatgatttttacatattataatataaaaaaaagtaaaattttaatttttttaaaagtaattttaaagaataatgtatatatcatgttctaatatttgctttcaaactaaatattataaaaatcatagatagttaaagtttcaattattagcttgtcaaaccgttggaactagatcgagatacaatatactagcatgtagaattaggatccataataatagcataccatattctggagtctgatgtgtagttgcagttggagacaatctgcttggcggcttgagcgaggcaggcgtcgcagtcgccgccggagacgtcgccgcggcactgcgcgaggtcgaacaaggcgtcgtaccccctgccggctctggaggtggcgaatccgtcgccggtgcgcgccttggcgacgaggtcggagaccaccaatttaagtctgcgccggctgacaacggcctaactgctgttaagatcgccgtagttcatcccggactccgagcagaagctcccgatgggatacgtcgtcgccgccatgcccagtgggagcaatgcagcggccaaaaaggctgtaactagtaccagctggcttaatgccgccatggatggcgccaaattactctcactggtcacttgtatgtagagatgtgatgagctatagaagatgtgtgtttaatcgggaagaatggttggagcttataaagacgagaatttgatgggaaggagagtgagatcgatcgatgtgcttgcatgcatttcaggggaacagagtatcaaaatccttgttcttgcttgcagactattttgactattctagtggtttgcatgcagtgatcagactatgggcaaactattccatgcagtgtagaaaaagggggccgtacgtccagttgagtacttcaaatttcttgctcgttctttccaggctagtaggattagattctcctcgttttccgttagcacgtttttcaaactactaaacggtatatttttttacgaaaagtttctatacgaaagttgcttaaaaaatcatattgatccatttttgaaaaaaaaaaattaacagatacttaattaattatgtgctaatggaccgctccgttttccgtgaacactgttgagagtggggagaatctgaaaagaacgcagcctaagataaggctaataaaattggagccatattttttttgcatgatattgcatgcttgtatgaggttaaatatgtactaactattattagtggatgaactttatacgaagtatatatagatatgattctcggccggctactagtttctgggctgtttggctgcagaaacaggagatcgactacattcctgctggtttttgcctaggaatgaatcaattagtatttgctaattggcaaaattattggatagtttatttgcccttcatatccaaccagattcagcgaacgcaaactcaatcaaactatatatgcagtgctcctgcaaccgaatagcttttcatcttcactcatcactaatgtgctgttttgtttggattgagcaatgtcgtaataatgaattgaccacttaatccatgatggcttgcttggtttccgtccatcaccagggttttcaatttcgtttggaccaatattttaaatagcgggccaaggcatttagcggttagcttctcaaacagctatagcggcagctatagcgggctaaatagagctatagcgactaaattgtacatgtgaacaaatagctagaacccttctcaaacaactagagcgggagatttaaaactctggtttagaccgaaagtttcgggattttggtgtcactgtaatttccgaaaatttcaggaattttcatactttttgcatgaaattatttagaaaataaactgaatttaaataattttttaccaaattaaccaaaattttggaaaaactgaattttcggtcgatacatttgcttgttggagggggtgaaattgcggaaatttcgaaccgaaatcgtaaaccctgtccatcacctatcgatcacctcatccctcaaaactagtcatagccccccggaagcccacaagaaatggtagaaagcaggtagttagccactagccagctagctagtccgtgatatccgcaagagtatcattcattcataggtgcaaatgcaatagctttgcccacagtctgactcgatctgatcatcactgcatgcaaaccattagaacagtcaaaacaaatctgcaagcaagaacaagggttgtgatactatgtctgtctactatgttcccctgcaatatactgcaagcacatcgatctctctctcctttccttccaatcctcgcctttataagctccagccattgctcccgatcgaacacacaacccagctatagccacctacatctgctgatcgacatcgatcgatctctactactccagtagctagcaagaattgaatctaggtgaagtgagagtgtgagagtacataattggcgccatccatggcggcattaagccagctggtactggtcgccgtcgtctcattggttgccttgctcccactgggcatggcggcgacgacgtatgatcccatcggcagcttctgctcggagacgtggatgaactacggcgatnncnncagnagagaggnngtcanaacgattgcgcnccnncccctggnngtaagggacccnnncactaanncgcgcnccgncgccgnactcgccactcacaagagcggcaagaggctcnnaggtttttnnacggcctcgcgcagttgccgcggcgacgttctccggcggcgactgcgacgcctgcctcgcccaatccgccaaaaagggggccccccccaaaaaaggggaaaaaattttgggggggggttttcccccttncccccaaaaatcctggccaaactacccaccatccagaacttcccagaatttggtatctatggattctaattctacatgtcatctacacacatgagtgacactgtatcattctagtagatttcaggccggttgtttaatatatttctttcgtttatgtgtgcttgtggcatgtaggtacgagtactgcttcatgcggtactacagcagctacaacttcatcggggatgtggacacgagggaggacgcaagcgtgaccttgaggagatggccggacatggacaacccaaaggcgttccaaaaggtggtggggaaggcgatggtaaaagcaacaacacaggctgtctcggtgggtggcaacggtctgggcagggcgaaggagcagtacacgccgttcgtgagcgtctacgcgctggcccagtgcacacgagaccttgcaccgcctgcgtgtgctcagtgcctatcttcgacagtgtccaagtttgacaaggcttgtggcgctgcgcaggggtgccaaatcgactatagcagctgttgggcacgctacgaaatctaccccttctatttcccactcgaagccaacggccgtgccactattgatatgaacaagtacactaaagttaccatgcactgaataaatctagcatacatatgctacgcatatagtacggtaagcatgcgtacatacatcgcgtagcactttaatttcacgaatatgcactagctgcagtttgtttggaatgaataaagatgtgtactgagtatgttgtacacttaagtgaatcgaatatctctttatcattattttgccacaatatattaattggccaagttcgtcaaccattcataatgagcgccgcaatagtgtgaatgggaatatttggtcgagttaatttgatatagatgtgaacagtgacggacgtaggaattcatggccggatattcacactttaaaaaaatgttttatacaaaacacaaatgttgaggaggataatacatattaaattacaatagtgacataaatcatataggaataatatattataaaaatctcgagaatttgagcacactataaaataacaaaatggcccaatcttgagaacaaactcaagaacaggagacaaaaaaagcatacataaataacaatatatctatatataatttattttttcatgaaaaatgggtattcttgggagtactcaggacctactccccccatcacataaaaaaacaacctatagaataaaatgtgatagtacaataaatctagccaggaatatgggacagagagagtacgtgggatccatccatggatgtgaatatagaggtgaaggtggaggtggaggtgaatgagaatgtttgttgttgtgttagaatgtgaatgccagattcgcacgggcatttggtgcgaatgttcgcgcaatacgattcttgacgggctaccagccgggttttgggctgctagctgcagaaatcggagattgtcccttcctgatggtctttttgcctaggagtactccctccgttctaaaataaaccaacctcatattaggatgtgatatattctaatacagtaaatttggacagtatatccagattcgttgtactaggatgtgtcacgttttagtacaatgctagcttattttgggatggagggagtactactgaaatgaccaaattcacataattattggatagagtatttaatatgccttttttcagtgtaaaaataaatatttgccttccatccaaccagattcagcgaaaacaacgtcaatcaaactcaattccaatcggatactaattaggtttatacagtgctcctgcaaaccctataatatgataaatatttcaagacactaattagggatgagcgctatcctctcttaacaattagttaatgactaactagtaattaatagtccgaagccaatgacaggctaatctacgacaaccactacgacaagctctatacctccataaattattcaccagtaatccaccactagtccatcataatcttgatatattaattagtttattacatgccattgttgtttatagacctatgactttatccttttaaactctcttcaacacatcccttcatttcatatctaagttttatctacataatgcatggccttttattgttatcatctcgattcgtcttcatcctatcagccacatctaccctataccctatagttcaacaaatgattttactcatcactcattctctcgttcctcacgcaacggtctagattgcatatgcgaaatccaacgcaaggtcgtctccacctcccacccctgtatctgcttacgcgtcaaacgcccacagtccgctccacgttccacattgctcgcgatcttcctccacgcccgctgattccacccctctctttcaaccaccaccgccgaattccctcacagccgtcatcgtcgcgattgccaccgatcccccaccttgggttcgtcgtcgcggtgaccgagcccccgccgactgtcgtgccgcgccaccctgcctcgccctagcgccatcgctgattcgtttcatcgagatctagccgtcggcttcgtgccgcccgagagcaggaataacgcggggttggtgtgagggatcctcggctcgatcgaggcgcagcccgtgctgactaacggcgccgctgcagccatcttcatcatcaccggcctctaccctcagatgggaaaggaaatcttcatgttcatgtgttccttttctcctgattacaggtcatgtcgttgttttggcttatgtttgatcgtgcatcacggccttcataatttctgattgtatttgagctctatctccggataccctcatgttgttcgatgaaatgctcgtacacatacactgcaagaaatcatgtagtacatggagcatatgttcatgggtaatagatgtgttcatggcttttagggtaacatttttttttctaaaattaattgcactattgtgctgcacatacagcaattactgaattgggattgaacatcttaaatttttatgtgttacatgtaaacatgccattacatgatctggtggccgccactgccctttagctacaacatatatttggatcattcatatatttatatatttctgaaagtggtccaggtcatcaaggttgtctaaagatatcgaaactaattcacgaactaattcaaaaccaatattattttcttaagatcagacatttagactgtatatatgtgaattgatggcaactattgaataaatatggtcaaatatctcatgaacccgccttttttttcagaatccttttttttgtgaaaaatcaaaaccatctcattatggtagtacccgagttgtgaagttactgatgaaaacattcaaactgaatttggttgctgcatttaggatgtcataggtattttctttttaaatctctctcgctgatttggtttcattcatttagatgagtattgaaaacctttctcttgtgacaattttattcagttatgtatttcattcagctgatgaattatcctttgatcatagccattataaatgaaatataaactgaattgcactatctgcatgatataacttctacaattggattatgtttttcgattttggcatatattgtatatgaatttcatctacttggataaccgtgtttctggtttttttagggccttaggggggcatgtttctgaaatttaccgtctggaaaaaattctgacattgcttattatatactcagattttccaaaaaaatgcttatgtattgccagccttctagcacatgagtttggatgcttgttattgactgacataatgatagcttgcaatattaaatcggaatacaaacagtgagtataaaaacttttgtatgaatggaaccgtttgtgttattagagtgaggtttacatttggtcaatattatattcccgtttatgttcatgaaattcatcttgtttctgttcagtgcagtactcccttattgattccttcctcatttctgaacaaaaaggactcactaatcttagatggcatcatctacactattgacgcatcatctgcactattgacctccttatgttcatgcgacggatattttttcagatcagtgtggtacaatcctacttttgattagtgataaatagaagtttgattgttgaactgatcaatacaagatcctaatttgtaagtagcatctattgcacctaaaattttgtatatgcagtacatatatattagttaggatcatgtatattttggtattgctggcaaatataactctcaccttggatcacaaatgatttcagctaaacaccatctatataagtttaacagatatttatctaaactcaaaactgaaacaaaaaatgtgtttaatgtctgaaacttgcaaggtgctactatgatctctgaacaaataaacgttctgagtttcctagcagcaaattgatttgttcagagatttaggtgggggcacgccataataaatcgttgagactaggtcatataacaaattaatatgattttttaaagcaacttttctttatatttttttacataaaatacacagatcggaaaagcgtgcgtataaaaagaagtgagtataagtaaggaagatggagtaaaaagcacacccttaacccactaacatatgttttgcctcattgtaccccttgaactactaaaattggtttgctcgagcatttatcttcttcgtctctttttatacgagtcatattctaaagctgatattttgtagggccagacataacaccattatcaaagctctaaaatatttttaaaaattttcatgactattgtttgaaatttaaaaccacgatgtttaaatcatgcttactgctttgaaatatatgtatacggtggtaaaaaaaatatgaaaaatgttgagaggtaggttataatgtatctatatatcaatcctaccaaatttgcttgcaaaatacgacgtatatagttgtatatctttatctacttaaaacattcatagtgtttttgccgtgcatcgtagaatagtgtgtctcacacaatttttcatccgacatgtgaattgttggtccgtttccatgtcccccgcaaacgtccgactctttcgcccacgtgaaacggaaacaatcacatataaaaattcagtttccaatccgagcacgacaacatcacgcacccgctgcatgtagcctcaagcagtgacatgtgcctcccctatcacaaaaacgagactcatggcggtcagttgtcttttgagctgatagagattttttgctggtgggtctcacgaatctgtcttcaagtgtatagaaatcttgtgaccgccaacagttcatagaatatactttactcccttcgtttcatattatttttttcactcaaccagttttagctattaattatttggcaaaatttgctacaggacacgcaaaaaacgtgtaattagctgagagacaccgtgaaaacgtgacacggctgatggacactacaaaaaaatgtgtaattggccgtaggacaccggtcgcattattttattatttccgggtcaaaagaggtgagaaaattttcaaaatgacaagattgcccctggagccatattcccccgcgccaggagcggcagacggcgagagatcctgtgatggcggcgatggctgctgccccgcccctggggttttggacacgtacggctccatcttaccgtagagccctctgatccagcccatgtacttctccgccgctgccgcccgctcttcgaccagaacccatagtactggatgttgtagagcgcctgccggtgcgggaacggcgtcaccgccggcacgacgcggaccatctcgccaccgtaggggtcgaggatgagcagcccagcaccgtccttgaggagccagctccaggtggtctcccagacttggctgggcatgttcttggacgtacggagtcggacttggccttcaagtacttgtccggcttgctggtgtccatgtccaggagcatctccaatggcttccccgtgccgtagaacgtgaagtagagcacggactagatccacatcatctcgatgcagtcgctcgcggtcacaccgagctccaggaaggtgtcggccatcgcggcgacgaggccatggcgtgtgccgactaccgaggtacagggactcgaactacgcgttctggttctgcactacgacgcggagaagttcctgccgccgccgcctcggatggcccagaagaggtcctcccccatggcggccctatcgaggagcctccccctcggcgttcaccatggtggcacgacgacgaggtcggaggtgaggccatgcttccgcagcatcaggctgaagccgccgccgctgaggaacccgtcgacaccgaccgtcccactcgggccgtcgcgctgcccgcgcgtcgttcctccgctccgccgcgtgtgtgaggaagaagaaggatatgagagcaatgtgggcctgttgacaaaaaaaatcgaacacaccggcctgggagatctgcttagctcctgtgcaggtccaaaggttggtgagatgcgggcgtgtcagtcagtttgatcctgcaaccgacaagatttgtaaacagtagatcaaatagccgatcggctaaacagccaatggagcaatcccagccgattccgataccagccgatagcgatagggtttaagcaatcggctatatgtccaatgtagatgatgatataaaggcaatcagctgatgatgatgtaataaactaacaataatataatccaatagaaaccaatcggctaataataacatggtagaattagcactgatccgaaggttaaaacatacatcggctggaggtccgatgtcataaaatccacaagattagattaaacagtgaaaccttcgttgtcatcggctaaatctaacttatatatacaattcttataagccgatgcaacgtccagataattcattggctgaaaccccgatgaaacccttattggcagtcaacaagcaggctagggattatggttctaagcacgacttagtagatcaaacttaactgatgcagcactaagtatgaaaagaaacacaatatctagacaatcaagcccttgactgattttgaggatggtagatgcctaagctaatctaatctagcaacacgatttagccgatatcggcagaaaccctaaagcgagaagcagccgatagagctaaattaatatgctaagattagattaatagagacatatgataaataggtaggcaaatatatcatccaaaccagagcaatccaagaggtcgaatgtactgatgcagccttgaacgacaccgacgtagatgacagattcaccagggcccgacggaacgtaggacttactccttcgccggagatcgaactgaaccgatgcagccccgcgtcaggtgcccaaattccgctgaaagataagtaaaaacctcggtaaagagggtggcgatgcgccgagagtagttgtattgatcgatagataaaaattacagggacccctggtacacaatttatacccttgggtctatagagtccttgtcgaacaagaaacaaactttctaaaagataaaaggaaaacataaagtccttatcggacactaaacacactttcctaaagataaaaggaaactaacaaactattcctaattaatagataaattgccatgccgcatcctctttgaactcggtcgtttatggataagcttcctttagtagattgatttccttaaccgaatatagtaggaatccaactattggtgacttgataacttccatcgaccgattccgaaatgatgtagccgataatgactctaagccgatgatgactttaggcttaccaaatttcactgttaacaggggcccacttatgattagcaaatagtaatcaccctactaattaggtacaaattagtccatgacgcgtggggccaggtggttaaatacctattaaaaattagattaaacatacactgtctatgacatttgggacccactggtgtttaaagaaggaaagagaaggggcaatctgggcatttagaaaaatatctcacctcttttgaaccagaaataagaaaataatgcaaccagtgttctatagccaattacacgttttttttagtgtctatcagccgtgccacattttaacggtgtctctcagccgattacatgcttttttgtatgtcctgtggcaaattttacctaattatttttgtttcacggattcaccagttgcatatataatactacctccatattttaatgtatgacgccgttgactttttatccatcgtttgaccattcgtcttattcaaaaaaattatgtaattatcatttattttattgtgacttgattcatcatcaaatgttctttaagcataacataaatatttccatatttgcacaaaatttttgaataaaatgaatggtcaaacgttggttaaaaagtcaacggcgtcatacattaaaatacggagggagtagttcattttcttaaaaaattgctaccatatcatccatatgtgtcatacattaaaatacggagggagtagggttttcgcatgtggtttgtgctgcccatatggaaagatactaaaaaatattttttatagtgataagcgtcgttatagcaaaaaaaaaatatttagacctagcagcctgcaagaacaggttttagccaaaggcgaaaatcattttttatagtgataagtgcccttgcagcaaaaaataaaatctttataccacactaataaataattacaccttcaactattgattatctctacgtgaaacccacatctctatcatatgttccatccacgacatgcctgagacccacccaggttcataagaaagccccccaaatatccatcatctaactctccgccaacgtccacgaaaaaaaataacatatgtaatttggatttcctatcacaatgcacgagcatctttgctatttttttttaaaaaaagagaaatgagagagatgaaaggaaaaggttcacttgaggtcccttatcttgtcatcgagtttcttaattgtccctgaactaaaataccagatataacaaatccctaatcttacaataccgggtcacgttaggtcccaaggcagtattgctcctcggttttggtgacgtggtggctgagtcagcgtgggacccatgtgggtcccacatgccagccgataatcttctcccacctatctcccctttcttcccgtctcaacccaaacctccagggcagtcagcaacaggtggggagaagagtggcgactgacggctgcgtcatggacctacacggcaaagagcgcgaagaagcgaagtaggaagggctcccgacacgtcgtcccctcgggttacaccaccacatcgttgcgtggcagctcgccgcgcatctgcgccgcgtccgcatcatggttgcatatcagccacaccgtcgggattggcgggaggatctccaagagttgggagatggagtacgttgcgacgcctgagcatactcgcgagcaccactgactgcatgagtgcccgtgcatgcaagcgaaaaggacgccagacgctgaatcgcgggaaaggtgtgtggtggccggtgaccagcagggaaaatggtggtggttgttgggcggcggcgataaataaaagcccgacgacggcgcttggcgatgggtggggagaaggctagcaacgaacaaaaagctttgcgatggccagcgttggggaaaagggcgcatgcatcgaggaccatgctaccgcaacgtggagtagatggagtcgacatcgaagaccatgcggcggaaccgcgtgtttgcctctgcgaagaagagctaaacctcggggacacgtgaacacatcggcttttgagcagctcgatgggggcgactatgagcttgggggataggagcttggccagcgtgacaaggcggaagccccagccctcacgcgtgcccgtgaagacgacattgcagttgtagttgggacccgtgccacaccccgcacgtgcgcaagtccatgacgtgagcgctcctggtcattgggagccacgtcagctggcggcctccgccgtcgagcttttccccgccgaccgacacccttctccccacccatcgacgaatgccctggaggtttgggttgagatgggagtagaggggagtgaggtggaataagattgctggttggcttgtagggtccacgtggggccctacactgactcagccaccacgtcaacaaaaccggaaagcaattctaccttgggattaaaagtgatccgttttgcaagattaggggttcaaggccgtttaaaattcaacgacaagaaaagggaccttagatgaacttttttgggagatgaaaaaactccagcctcatgggcctgtgcatatgacccataggcaggcgacaccgcggcagcagagcgctgcacgacctccgcctcccccaatccgtcccgtctcctcgcccgccgccctcgactcccgtctcctcgcctgccgctggcgccgatctccatcctgctagcagaggtggcgccggcgtcctcctgctcccgccgcattcgctcaccggtgagcatcctaatccatcccatccggtctcggtctcggcctcggcctcgaatttcgtctcctcgcccgccgcttgcgccgatccccatcctgcgagcagaggtggcgcccggcgtcctccttcttccaccgcatcgtcgctcgccggtgagcatccctccctacccacacctcatcagttattctgcgttatccctcaaaaagtttgggggttcaaccgaaacagggttagatctccctctgcctagctccacctactttcaagttgttaattttgatttccgtttttagcagatgtaatttggttactgaatctcatccaaacacccttagaacgaaaaatgtaagctcacataatttgtactcatccaaactcacataaatttcttaagaagaatctagaccacaaactacccatagtcacacaaaatatctttttatcaaggtatattcttataagtaatttttattccacaaaattttctaaaggacatactgtgacacttggcattaatctaatttaactttttttctttatcaggttataaattttctaagacatttgtgccacttggcatgaatctaatttaacattctttctttatcaggttataaattgaaaccattgaatgtactttgtcttcccgtctctaaaacattgtgatatatctataatattttaatatttttaagtttaaaaataatttagactaataatatagatatttaaattaggtaattaataaattcaaatcaactatagtttagaataaaaaaacaaaataatatatgccaagtacaatctaataacaatagaatgttagaaacaatatgaattcaatatttttataaattttaagtacgattcatacataaaattaaagaaaaatataaatttatatataagtgagaacataataaaatgcaagttaaaattattaaaggaaaaatattattaataaacaatgatgttgatgtatttctaaatattttcacgtattatttattaagtgtcaatgattgaaatggatgatttaccatgtaacagattaattattaaaattatattgttttcatccgttacaatgcacgggcattttactagtctatataattgatcgctctatcaataaaccttaatatcgacaagtaaccacaacgttaagccattgatcgacaacctaaaagctacaactgaccataaatttcactggcttagatgagatgtaaacacataaataaaccataaaaaacgagaattcggagatgatggcaccccaagtccccaactccaaaccattttccggacaaaaaaaaaacattcaactctaaaccacagactcatgagaccatgtaactcaagcaaatctgactaacaaagataactcgaaatcaaatcgagaaataaatgcagatttgctaaaaagacgtgtgtgaaccggtcccaaattctcacaaatctgatccatgaaaatctgcagccgttatgaacttccaaatttggttccaaactctgaacttttgctcgccctactaacccccctcacaaatcgcccaaaatccgaacgacgccgccgccggaatccgccaccgccgccgacggaagcaagggcaggtcaggccgtcgtcgggagggggggagaggagaggcgcatggcgaagctggggccggggcaggggctggggtgcgaggcggcggtggggttgctggcgccaagcaggaagagggagtacaaggcgtgcaacaagctcaccgaggggaagcggccgctctacgccatcggattcaacttcctcgacttccactactacgaggtcttcgccaccgtcggcggcaaccgcgtaagcatccccttcttgttttgtttttcttttcttttccccgtttagagttgttcttattagtgatgaataatgatatatatagagagagagaggaaatagggttttgatttagcaggctgtggattttgggggaacaacggattttggtttgaaatttggtggaaaccgcgctaagcatcccatcttgtttttagggtggtctttgccatttggagttgttcttgtgaatgaatgatagtaaatgataagtgtagtaaatgataagagagagagaaactagggttttgttttagaagattgtggatttggggaagattacgcagattttggttcgacatttgatggaaatcaaaagctagtaaaatttccttggaatttgaggtttctaccattttccttttgcatcgaacaatctgcgatttggcatacatttcggcagatttgatgaaaattgtggtttttctgggatcaatcatatactagacaaactcttttaatggcaaatatgatgaaagatggttgtctttagtgggctcgtgtgaccaattgtgttttcttgatcttgcaggtgacaacctacagctgcctcaaggatggtaattttgctatcctgcaagcatatattgatgaggatgtaagctccgcaacaatctccagtgtgtgcagttactttttttttaaaaaaaaaaaaactttgattgtgacattgtgtgacacttctaactctttttaaaaaaaactttgattgtgacattgtgtgacacttctaactcttgaggtctgcattcttttctcagaaggatgaatcgttctacacactgagttgggcttgtgatcttgatggcacaccgctgttagtggctgcaggaagcaatgggatcattcgggtcatcaactgtgccactgagaagttactcaaggttcgatagtgccatattctcatatgcttctatagttcttggcaaacttcaatgaaaattcatttttgagaatctatgctcttttgttatccgacatacccatgattgaagctatgcttcagataatagttgcttctttggtaaatgttgatctgtctatcttatccatttaagaaggtcacttgatatttgcgttgattaagagttgcattgctatagaattgtttttctttttgggtctacaaaagtgtaatttttgggtacactcctgcttgctacgtggctgatatgacactatctgttgattatgcattatacgtggaaagttttgataatactatgatacatatttagaacaccacaaaatagggcacatcaacaatttactcttaggcataaaattactatagttcagatctattttgtgctcattgactcttgtgcgtgtattttatggcctttcatttggctatgaatgagattaatctgctgaattggcttttgtccacaaggtttgctttgtagtcttatataggagagaagaatggtggaagatgtagaacctagtggatcttttccagtgggacagtcagaaaattgggcatatcaattatttactgtcatatactggtgtgagggatttagggtgaatgtcttatttctgtatatttgttcagacttttgttggccatggcgattcaataaacgagataagaactcaagcattaaagccttcgctcatcatttctgcaagcaaggtttgaagatagccttttctggagctggatctttctatgtttaattatttctgattctgtttcacatggcattgcataggatgaatctgttaggctgtggaatgttcacacagggatctgcattttgatttttgctggagcaggaggtcaccggaatgaagtattgagtgttgtaagttgattctatttcccagtatgatgttatttagaataatactcactacaaaccacacttccagcttctgatatcatctttttcattgagctgaacatgttttagttgattccatcagtaataaaataaaaattaggttccacaatgacagtcattttatttgtagtccgattacattaggagaaatgttgatcaactatgctttgctgcaggacttccacccatctgatatctaccgcatagcaagttgtggcatggataacactgttaaaatatggtcaatgaagggttagcaagccatctcaacatagcttttttatttgcattcactttatgcttatcattgacactgttagttaatattatcatagaattctggccatatgttgagcaatcctttacatggactgaccttccatcaaaatttccaacaaaatatgtgcaatttccggtatgctaaatatcttttgatcatctttgaactattattttgcaagattttgttatttcatccatgtggcatcataccaatctttctctgcttccaggtcttggttgctgtagtacattctaactatgttgattgtactagatggcttggtgacttcattctgtcaaaggtcaaacttcatcttctttgaatggatttatggattggtagagatacagtgctcataatgcatccatactactgatgcaaaacttcagtaggattctcatcaatgctaacttcaatttgcagagtgttgacaatgaaattgtgctgtgggagccaaaaacaaaagaacaaagtcccggggaggtgttataattcaacttctctagaactacagaccttaattcattttacttgtcttctgatctgatcatctcaacagttttctgtcatgttactttagttttcactatccctttccatacgtctccctctcaagtaaaattactttttttttttcaaatgtagggtagcattgatattcttcagaagtatcctgtgccagaatgtgatatctggtttatcaaattctcatgcgattttcacttcaatcaattggcaataggtaatatctcccaaattgtgttgttactttggaaaatttgtgacaatattgaaaatgttttgtttgtgggaaacggtcatactcagtactcacaagtcaaaagattacattcaataaaaagaattgtggaatgttgcccagcacccttaatgttgtgacaaaaaagaaactaattcacatatttaaactcattgggtttagattattatttttaaacaaatactacactgaatactcaaagataaccatgtgcttatttaaacaggcaaccgtgaaggaaaagtctttgtctgggaagtacagtccagtcctcctgttttaactgctcggtaagttccaagaacttcagttgtttcccatcctttatatgcacttggttttggacgccactaaatcttgtatttctgcatgccaacacattatttttacaggctgactaatccgcaatgcaaatctgcgataaggcagactgccgtgtcatttgatggaaggtgcttcactaaattctaatatccaatcctcataaagtgcatattccagcttttacttgcccacaattcattttggtgaagatcctgtgcattaagtggatgcatcgttttctgcttgtgtccttgtttggtcttcaatgccccgacatgtgtgacattttttctctcttgttcagcacaatccttgcctgcagcgaggatggcagcatatggcgatgggatgaagtggaccatccaaaagcatgaaaagtacccttatagacagaccatggcaatgccagattaagattgacttgggaattcctgcatgtgtactttgttgtgggggttatagtaatcagtcttactgttgaaaaaaagtgcaatctgatactctgaaattagaaggattgacagctgaatgctggggttaccaacttgaatgttgcaaataggatactgcttctgttatatgctgaatgtttcaagttagggcctttttgtaaatgggaagattcggctatgccagatttttggaaaagttgccatttgctttgttaccaaagttgcatggcaaagattggcccagctcaaatttctatagttataaatgagttgccaaatattttggcttcaaacaaatgggtgccactttttattttttggtattgccaagtgccaactactagaatggtttctatcaaaaaaaaaaaaaaaacctactagaatggttcagtttggctgtaaaccaaacaaaccctatatgccctatgcctctatgtatttgcttgtattgaccattattgttctaattttgaccatcggtaacattttaatgattagattacgagtaaattgcacccacagtgcatcagcttggcaggtgggtgtaatttagtgtaagaacttgagaaatgagcgttctagtataacaacttggcatgtaggtgcaatttagtataagaactttataagtgatcgtataaatgcaacaacttgcaagatatgtacgattttaataaaataaattaagaagttatgtggcagtttaattattgagagcatttttttatacatacaatttttaagtacttatgttgacaatatactagcgtggatttggatataaagaaaacaaaaattcttaaaggtaattggatgtgcagtataattcttaaaagattaaattcaatattataaggtgatatccataggattgctatgtaatgacatattaacatcgtgagaaaaacttacctagcatatgcctagctattcttgtactaaaacgcaaccacttgtcaaattgttgcactcgagcgttcaattctcgagttcttgcactatattgcacctacccgctaagttgttgtatcgtgtgtaatttacttttagattacgataaataaaaaagagctaaattgtacttgtttttatgcagaagttgatttttgttaggacggtggagactgtagtttagtgaaaatctagaatgaacgtagctcaactggttaagttccttgtgatgaaaccagcacactcgggttcaaatcctaaatgtgacatgtgtgttcgtatttacgcctaatcattcttttagtggtaagcgacataccagttgatagcgaggcacctgtggtgatttcatcaatctcaattctcaagatttgctagctcagtttactagaggtgctcgtagaggtagtttgtgtgcgtgttgtcggcgtatgcattttaactatgtttcaaagaagaaaagaaaactgtgatgaaggttgtgaaacggagggaacattggttgaggtctgagggccgtatcggacggctaggataagctccagttaagacgatccgacgcggggggcaatttcggtacaagaaaaaaaaatccttcattttctctcctcctctcttccctttcacttggccgtcgtctcctccccccgaccccgccgccgccgacctctctcctccgcgccgccgacgaaccaccgccgccgaatccccctcgccggcggccacccggatctccccagccatgtacggcggcggtaagttcccccctctctcgcccccgtccatccccgagctaaaccctaaaccctagagatctgtggcactggcgctgcttggtttttttcgcagatgaggtctcggccatcgtcatcgacgtggggtcctacagctgcaaggcggggtacgccggtgatgacacccccaaggccgtcttcccctcggtgaggcagaatgcttcttcttcttcttcttcttctcccctcctgggttggctcgctgtaattctgtctcggagttggaactgtgtggtctgtgttttgttggtgagagttcgtgcgggtggtgtcatggaaatgatagggctctgtgcgcaatgcaatcccactggcaattttgtgtgttttctccccataattttgagctgttttaggtcgttgactttgaattctgatttgaaaaaaaaaagaatgatgtgttagtgtgtggcgtcatgatatacagacatatgtttattatttaggtcaagctgtgaattttgctgcgtgcattagttcctcctaggtccccagccacctgattaatggttttattcgagcactggatcttagtctgggaacatgaataacagcagttttttttttaaaaaaaatgttagtagcaggctaactcagatattggatagtaccacagataagacctgcacttaccttttgattttgacatatgcgtgcaaaattatgatgtattgactgcattgttagtttacctttcagctttgtcttagctgcaaacctgtgccattgctcgcataggtagtagttagcagtgttgcatatgtgcactgagagtcaaatgccaaactgaatttttaaagtgctaaaagaatctgcattgtggtttctgtggaattgctacatgttggtactagacgttaacttcaaatgctatgacaggtgaacttctggttactgtgtttgtaacgggaagtacttttcttgtgtattatgtcaaataggattgtactctttctgtcccaaaatataagtatttctagagttttgcacgggtattaaggaagtaggtggaattaaatgggggatatgatttttttgattggttgagatgaggaagtagggggtgaagttactatattttgggatgcggtatttttttgtcttaggttctacagtattattttttaaaatttttttcttcctttagttaacagacttatattggggtaatttgaattcttggagtagattgctaatttctctttgttgccgaggaagtgagaaaacatataatttagtgacatatagcaaaacaatcagctgtaaggtactaaaaagtggtgtgtgaatcacacagaaaaagtgtttttgagtttcactatttgatgtcgctgctaatagattagcatattttcttctcctttttctacataacgtggcagtagttgcaagatatgtcattggttcatgggattatgcatctgagctacctaatgggtaatttggttttagaagttcttactgtggttggtgcacattctgttgtgttaaggttgttggttcaattgagcaaacgggagaaactgatgaagcaaaggcagacaaggaggctgaagctgcatcagattctaagaatggagccaaacctatggatgtggacaaagccaagacaaagcgcaaattgtatgttggtcaagaattggagttcaggagggatcatatggaggttagtttatgcagattctcaagtatcaatattgatgctcatgattttgttaactattgtttactgattctcttcctacccaataggtgatttcaccaatgaaagatggaacagttactgattgggatattgttgacaatatatggaatcatgctttcaggtgagtttaactatctatttgatgtagatctgagtaatgtcgtgccaaaagtgcgcgctgaaagagctggccacacttgtggcaaaacttgactagaaaataaatatctgacatgcggggcacttgagtaacaaggtttggcacattgcttgtgtggtttgccaaacacttgccagttgctgcaaaaggccaaacatgccttccttgattctggggaagtttgggatgaaccatactctctatttaacatagtttgcttagaatctgcaacaaagttcatcttctaggcctctagggcatcttttggatgtcaacatggttactgctttatgccattgcccaccatctttttaccttacatattaatattgtgcttttcaaatatactgatagtgaaattccttcttacgtgtacaaactggataaggctttccttcttgggttatttacttttattggattctgtggcatctctattagctaacattgattaaatactaggatttcctctatatggtgtggatatgcaactattgaagtttctgctttgttagcttttatcttcacactgacttgctctacatttcaggcagcggctattgatcaatcctgaggagcatcctatgttgatagctgaaccatctacaaacacaggacagcaaagagagaagtatgcctatatgttctgtatttaaattaattgtgttgctaagttgcgtcaaacctgaaaaacattgcttgttatatgaactagctgatttatagcacatttatcttccatgactcttatcagtcatgagaactgtattggtaccaggatttactgcatgcttttctacttctccatttaatgtcagaaatgttagtttttctgtgtttctgtacttcaggaatggacaaatatggaattgttgatcaccctgtaaaacttataaataccaataagcacaagctgagatgatatgaatccgagttatatctattcattgcctattatttttgtatggttctatgaaaaagacctgactgtttttctcatgttccatagagcagcagaacttatgtttgagaagtacaaagtgccggcactgttcctagcgaaaaatgcagtatgtatttgtcaaaagtgataattcgtgtaattagtttattagttctaattgttgatttggttgtcaggttctcacatcttttgcatctggacgtgctacatcgttggtagttgacaggtgagcatgtccttaattaaattttatttctgcagctgtaacttactgtctccttgtagataaaatgtttcatttagccttaacttataaacaaatgcattataacttttgaattctgaaatatttttccaccagtaagtgttagggcgttaggcacagtgcacaaatattgggtgtatcttaccttgtcaatcctccttagaatatgatgacaaatgtccatggaagtagaaaatggctgttatatcaaagtcaatctgtcatgcacagtatttcaaatataaaaccaaactacacatagacaaacaagacaaatcctgttgaaactgaacttagaaatcaaaaagcaatttttaatgaccatctgcatcattttttatgaaggatgcgcttgcatccaagggtggaaagcgagaaacactatccttgtctgttctgtcaatcccacttcccacaccattcaagaatcaggacatcaatattttctttactggtcatcaatattgtacttgagttgattgatgctcttctttccccctttactgtatcataaattcctaacatcatcttggtatagggtgtaagcataaccatctaaattctttcagcatgttttaagccatagtatctgattgtctcaaatttgatgcctgacatgtccaccgatgtctctattggactttaatggtgtcaagcattttatgacttatttcatttttgttctcatggcttttgggctttgttatgagaaacattactggaatgagacaatgttgtcattttttgtgcagcggtggtgggtctactgtggttgctgctgttcacgatggttatgtattgcaaaaggtatgatctactatttaatactgattgtcaaggcaaagtgcataatgcactacttgcatgtgtctaattagttatttttaccctttttattctctactttctcatctgaaaactgggaataagggaatcttcttttaagacaataagtttctttttcttgttttacatggacgcttgctcacataacatggacagcactctcaccttgcctctcaggaagtatactttttttcccctacttgttgctaacttatttcatgttgcagtctgtggcgacttctccaattggtggtgaatttttaactgactgtatgatgaaaagcttggagagcaagggcgttgttgtaagcatctctcttgcttaagatagcatactagtcttcttgtatgttcatatccaatttgttcaatgttcaatttgcagataaggcccaggtattcattcaagaagaaggaagtcggccctggcgaatataaggtctagtttatttaacacttcgttgatattcatattttttccctgagagctacaaagttgactgtttaagcttacctttttgttgaaaatcaactataacaatatatgcttagctattggtatgttcgaaattagttcacttgataaaaatatgaaacagtgaaagcagcaaacataaactacaaaaatagttaactacctatggagtgacttcacagtccacacattggcatttgattactggcagaaaaggtggaagatcctgaggggcagtctgtttttttgctgaccttgttttcggcaccgaattaagtcttctccatgccacatctctcaaaatatactttcgtgtccttcctctgaaagataaatttaatcaccaattccttgtatccccaagtgtggatggcatccaaagcatccaaaaagtgaaattagtcaactactacaacacctttagtctcaaacaagttggggtaggctagagatgaaattcaaactgaagcacccaaaccaatgtaccacttaaaagtgcatgcttttggcacatggatagctactctccacaaactcctatcaaaaccaaatccacacacacactgtgagttaccttgagtatgtctatgtctattcatggagaggaatactatggtcattatttcttagcatttatgtgggggcctatttcttggtggtcaaactcatttagtctattattaagggtctgcattattgtgttacttgatcatgattatggttccactttgatacatgtggataccatgatttttgctaatccctggcttctacaagattttgctgccattacactgtatgattgtaagggaaccaacaccatatggattatttgacggcatgcttgtcttttcaggttgtagatcttgatcttccaaacacaacggagagttacaagttatactgcatggtattttcattgacagatcatttatttttgttctctgttgtttaattttgtctgaatgccttcaatggtgatgcttcatatgttcacagagagctattgctagtgatatcaaggagtcagtttgcagggttccagatactgccttcgatggtataatataaacacatttaatttatgaatggggcatttgcaaatttgccaccggttttttcaattttgcaaggatgccactcgagtgacagttctagtggcatttttgcaattttctagtggcagtcttgcaataacgattcaaagtagtggtaaatttgcaattgtccctgccgtacacgcactagttggctattttttattattatctgaagtcctgtaacataaattatctttgttgcagggactgttttaacctgtccttttatgttcttttttttatgttctgctgtttacttttccctgttttattttcatgcagaagtggcatatgcaaacgttcctacaacttcatatgagcttccagatggacagtaagttgtatatcaaaattatttatgcgcatattttttttccagtaggtttagtggtttaattttgtaatggcttattgacgtgttccaatacagttagattatgagctacttttctgcatgtgcatctgctgcatctgtgcatgatacctcagtacaccacaatgattgtttataaaattgatataccacaatgaaaatcaacaatatattgacataaaattaatactccctccatcccaaattataaggcatatatattttttacatggtcttcaatgacatactttgaccattaatttattccatgtcatcttcccaatgaatatgaaattagcatcacatgaaagtacttcaaaatatgaatctggtgatataacatgcataatacttagcattgatatggttagtattattattagtaaaaagttaccgagtttgattttccttaaaaataagggcgtcctataatttgggacagactacagagggagtataccacaatttgaactagttcagtgaaatggaagtcaaatagaagggagaacttgagtgcagcactaagatttattgtcctttaaccttcccatgtaccttcagcttctatatgttgtgactttgcagattggtaggtcatctcatgaacccaacttctttaaattgtcatggtcatttgcatgttattttgagagtggcgcatgatgcaccaagagggtgttgagatgcaccgatatagctgaacttttccttgctattttctacaacattatggttaagattttgtttgtgcaatgtacctttcaagcatctttaacttgctgtctgatatctggacagaaccattgaagttggtgcagacagattcaagattcctgatattctgtttaatccatctctttctcaggtgaggtttgatgaagagaataatacttgctgtacacttgtatttcaggcaggatttgtaactggtgctggtactagattaccttgttccagaacaaaaccagcttgctgttttcttcttcagtagatgctgttgatggcttgaaaaattcttttgaaccatgttgaattgctgactctcacatgcacacgaattttgtgatgcatagactattcctggagttgatggatttgcagattcaatgtcagttcgtggccttccacgaatggtgagttaaatgagagctagacttgcatttactgttgcgcatccctggcagttcttcatattactgaagttgctattgctgttactttctcaggtcattgatagtgtaaataggtgcgatgttgacattcgcaaggaactgctaagcagtattctggtaaatgcctataaattcttcaaccacattttactagctctcttggtgttgccatccatgagcttagtgatatctttcccaaaattctcttgtgaagttctgttaatacaattctaacatctgcaaacatgcattgtggatagctttcaggtggttcatcatcaattctgcagttgaaggagaggctagaaaaagaagtacttgaggtatattttttcttcagaacaaactaggactgccctggcctcatcctgtttatacttcccatttttaaatgtgcaccattttatagcctgtgcagccaaacttttaaatttttaactactaaagtacattgaaaatattccggggttgctacatggagaagtagtggtaggtttgcctttttcatgaaaaagtatattttatcattatatgaataacatataattataaatgcagaacttagaaacagttaaagatttgtggttggagtcctttgatgtctctaatgccatctgttttcaaacagaggaaacaacatataggagtcaagcctatgatctttttctttgttcttgtccaatatggaaatacaagaataaatgaatctcattttttttcttgggatagttaataacgggccagagtgcaagttaatagaactctattctgttttcaggctattgaaaatgtttccttagaccttgtgcaaggcttgttcttatatatacctcaaaatattgcaggaatcttctggtaatactcgtgtaaaggttttggcaagtggaaattcagtagagaggcgattcaggtattcccttttatctttgtagtctttatccttcccaaattcaattgaacattttgctctactgctcactggagaagtttgaatgagtgccttttggctctgcaaagtgcaactctgttgcttgtttttattgcttgaaaagcttaacacatgaactaccaaaatatactgatcactttgttctagtcatacataccttaagtcattttattctgcagtgtttggattggagggagcattctagcatcccttgggtcgttccagcaaatgtggttctccaaagcagagtaagcacaacacagtattttaggttatgtttcccctatctcgtcacggacagctcacaagttaatgtgatttatctcactatagatacgaagaacatggagtatcctacatccaaaggaagtgcccatgaagttgtggagcatcgctacgatttgtgaccaaatttggtgcatgtgggcaatcgtattacagccaccctgttgttgatctatatcgactattatccgacgatatttatcattatattatgactagttagtttgtagattttgagagggcaacataagaagcaatccagcttaacctgttatgttcttgatggtagattctagttcatgtgttgaatctgttctccctgctgtagaatgtatcgagttgctgctctctactctgtacttttagaataccttttcaatcatttggagtcagctgattgttgtactacttatacgccacctgattagtcatgtcaacaattaaacttgagcactggttaagttaagagtggcctgattgtagttgataatcacattttattcgtagacattgtatgctggatctttatcagccaccgtcagatcatcctctgtaataaatcttcatcagacgtgtgtgccaatcgcaaggaacacgaaatgcatccgaaatgttactctgagttaatcaatactataattcttggtcaaattaattatttatatctataaagtttaaattaaatttaggaaaatgaattcatgcaaatcttgtggtaagttgtcaatttcataaaaaatccagcttactactccctttttaggagtgtgttgtggctgcacacttctgccttttgatatatacggttctattctcggtgtactcctttattattattaaaacaatcccagttacttggtaagtgctaatcacgaatcaaagtcaacataacaaatcatgtgcgtacagctataactcgattacacaaacaacaaaattcatatttgaacataaatccagttgtagcatatctggtagtataaagttttttttttgtatagaagagttttaatttctgtaagttttggaaagcatttaatcctagaaattgtagtgtagctcaactaaaaaataaatgaacttgaatcgaaattgggttgtatcataaatctttaccactcaaacgaatatttatcctaaaccacaaatgactcttttcatcaaggaatgttttgttttcagcattttaaaaaaaaacttttctaatatggttttcatgtttcgttcttttgaaatttaacatctatttaatttgcacggctccataaattcaacggatacatattctgaataattactaaggaggcatatatcggctctcttaatacaaccgcttgtttctcaaaatttattttgagttttgtctacacattctcaaggacggtacaaacacactatagatgttcacaattttttttttctaaagttgattgatggacaaatgtttgaacatataaacatataagcactgaatatttgcttatgcaggaggtatttatatcaagttcgatactttactaccatagtccctaggacactaaaatgccttcaatgatctgatgaagcctaagagagaatattgatcagtggagcgacttgcaactacacatggcacaagtagactagacacggtatatattcatattaacttgttaaaattttactacttaacagttcacttgtggtgcatccatatcaattcttacttacacaatatttgtaaaaacaacctaacactataggatgacctagacaacctttatgtcaatcacacttagaagatgatcgtctttttaataaataatgtgtactacacaccatgctctccatatagatcaagatctacaaacccttccacttataaaccttaccaccaaaaactcattaagttgcttcatttatctatgctattaagaaaaaaacttatttcgtttatgccatttctagaaatggctagtcacactattcacaatattatataataaataaaagtttcaaatattcatccaccaaaaatcatcaagtcgtgggacttatatgttaattagagaagtccctttgggtgcaatcgattttggaaaccctaaattttttctatacatagaagagagagatgtctagttgcaattgcttttgcgatgtgccaaccacccttctagctttcatccacgtctacttaattgccattcttcttcttctttttcttcactattactacctcctatcttagcgaatcttcttcttcttcactattactacctcccaccttagtgaattcatcctcattgttcacaatgacattgctaagttaactaggtatgctaagtacacaattagaatataacctagagcctttgtttccatcatacttaaaagatgacatttttatatagataaagtgtgctactcacaaggcttactatatatatgtatgatacacacaaactccacaacccaaaactctttcaagttgtgtggcccatctatgctattaaaaagcccatttagcccatccaacatgagaaaccctagggttttttccctataaaagatacctaggttattgttgcttttccaccccgcccgccgccgctccctattcctatttaatcccatctctcttcctcatcaccgctctcctctctccaggcaagaggtacgcactttttgtttcggatttgaaatctttgcttcgttttactatcattggtcataagttcttttttgaagatgtttgagaataagtttatcattgagattatcgtcacttgtgataggaagtacgcaacctcaagccggacaagacgtgagcaaagatgggccccactagtaggaaccataaatcatctcaaaaagagtaagtggtattcttatatagcacacattttttaaggatatatacatgtttcccacaaatgtttcaaacacatatagtgatatatttaaatccgacaacatttgaattgaagtgtggcaccgaatgaagccaaaccaccccgatatccacagcgcaaccgctccatcactgcctctgcctctgcctctgcctttgcctctcccgctgttgccaactccagagttgccaaggaaaggccatcttcatcaactgctggtgaaggtgaaccacaggaaacggtgctaaagcttccaagcatcccaacacttcctgcacggatggcaaagttggtgccattagaggggttgggatgcgaggcagcggtgggatcgctaacaccgagtcgggagcgagaatacaaggtgaccaacaagcacactgagggaaggcgccctgtctacgccattgtcttcaatttcctcgatgttcgctactacgacatcttcgccaccgcctgtggccctcgtgtaagatttcttacgaggcgccatattgatcttactagggaagtagtagcgcttcatgtttctataaatagatcaaaatctagtatttaccttattatcctattcgcattagatgtttttaatctgactttgtgtcacgtcccttttttcatgtttcttaatttgcctattttgaaaattcacattcgtgttcattcacctaaaatagcttaatgaaaatttcataaatatttttgtttaaaatttgactaaataaaataatcatgctgccatttattttattgtttgttaattggagttatggttttttattcgagtttggaagtggagctcaactctgtgaattattatcaatctagaaatattcctcaaaattatttttgttttatatttattaatgtaatcgtgatgtggttatgatattaccttttgttattgtgtgtgctagagttgatctgggactaacacattatacacagagggatcctagttggggtcccgacactttgcgaatgcgctttacactttaaaagtgcattaaaaaatataattttgttgaatattttgataaaaatataattaggggaaggaattataagatcatagatttcattgatcataaaattaaattttaaggatggagttatgcacatatgttattttcaatgtgtttatgctaacacgttgcgccctcgtgacctttgcagctttcaacctaccgctgcctcatgaatggcaaatttgctcttctgcaaagctatcttgatgacgatgtaagctctgccaataattttgagtgttcagtttattatctacaccctctgttccaaaataaaccaattccttgctatggatctagagatagcctatgttcagagctgtccagatccgtagtcaggaattgatttattttagatgaagaagggtttgatggcatgcctttttctaaccatggtggggtctccattgccttgcagatgaatgagtcattcttcactgtgagctgggcttgcgacattgatggcaatccattgttagtagctgcaggaagcactggaatcattcgagtcatcaactgtgccactgagaagatatataaggtctagtagtgctagtgccattttttcttctttgccactactgcaaccttggataaactttgctctgtatcagtctatatatgtttttttttcagtaatatatgccaagctatggttctgttgcttatatattggaaaataatttcttatttgatagattctgatttatctgtgttatccattccaggaggtcacatgtaattcgcttcgattaagaactatagcaatcttttgactttctatatagctactaaattgtgccttttctcttctaaacatttgtggtttcagtgggtctttagcatgtctagtcagaaaattggcatataaattatgaaccattctatatcaagtacataactgatgtgcggccagtgttttatttctgtttatgaaaaataaaataaaattacagagtcttgttggccatggtggttcagtaaacgaaataaagtctcaaccatcgaatccttcactcatcatttctgcaagcaaggttagaagattacattgcctaatctgatatctacatctatttcatttttactgatgttctttcatacggcattgtgtaggatgaatctattaagctgtggaatgtgcagacagggatcttaattttggtttttggtggagtaggaggtcaccgacacgaagtacttggtgttgtaagttgcttaagctccactgtagcattttttataaaaaaaattgtaatgctactaattaacttgaaattgtccttaaaaataggactcatccagcttctgatgtcactttttttattgagcagattcaattttattcatttcaccaggagtgaaataatccttagtcactgaaattttgcgcattctttctttacattacgagtgcaaatattaatcataattaattaatattattgcttcaggacttccacacatctgatatctaccgctttttaagttgtggaatggacaacactgtgagaatctggtcaatgaaaggttagtgaaccatctcatgataaaaagaaaaggcaattgcatgatgcttatcggtgaaagtgtgtgaatgctgtagaattctgggaatatgttgagaaatcctattcatggactgatgctacatcaaaatttccaacaaaatttgtccaatttccggtatgcttatagtatctgccaatcatatctgaatctgttctttaatctgtaatttattagtatgtataaccaatatggtatcatctctctcctttcaggtcctgtgtgctgaaatacattctaactatgtagactgtactaaatggcttggggactttgtcctgtcaaaggtaaaattgttattgctcttttgaagtcaatatttatagtgcttacaaattattatatcttggttttatcctattcataaagggctatacatactgaattactgatactgcaaatttccaggctgtaccaggaacagccttttcaatcattagattagtgttacagattggttttcccatgacaattgggttacaaaaaggacaaattcattagagtaaaatttttattactcttttgaagccaatatttctagtgcttaaaaaattattatactgtgtttttatgctagtcataaaggacaaatttattttctactgctagtgcaagttttccaatccttagactagtgctacaaattgggttttctagtgaaaattcggttatttctgaaggatgaatacatctgatgtctgctaaacttgaattttcagagtgttgaaaatgaaatcttgctgtgggaatcgatcacaaaagaagaaaaccctggcgaggtaatataatttaatttatctctagaattacaaaatcttactcgtctacttatatccaaactaatctggctatgtttattttcttaaagaaaccatgttactttctttctccatgtccctatacatactacaatacatactatgtcttcctctaaggaaaatggttcttttgatttgtagggtcacattgatgttcttcagaagtaccctgtgccagaatgtaacatctggttcatgaaattctcatgtgattttcaccacaatcagttggcaataggtaataactaatgttgcactgttctctcaagaatcattttttttgtaaggcttgacgaatcattttgttgttatcgttctaaattattacacaatatacctttttcttggaagacaatgaatatgctagtatttctttagataatggatatgcaatattgattttgatattctttaaaacaaaatgtgaagtgctgaaggataaccatgtgcttattcaaacaggaaaccgtgatggtaaagtctatgtctggaaagtacagaccagccctcctgttctaattgctcggtaatgttaacctcaagaactcaacttattaagtttcatcgtctgcatttaatttggtatataggtgttgcctgttgggtgttaatttctaccaattctcatgtcttctacatgtgtgcttatcatcatcatgatcatctacaggctcaataatccacaagtgaaatcagccataaggcagactgcagtgtcctttgatggaaggtacattactacattcatcctgttcatactataaatttatccctgcttattcattctgatggagctagcctatcatttgcactgtgtttatgcttctgttttattttttatttttgttgtttgttttcttcttggaagattaaaaaaatgttttattgtgtttccattttcttcagcacaatccttgcctgcacagaggatggcaacatatggcgttgggatgaagtggatcacccaaccgccccagtcccaagcaagaaacaaaagtgaagcaaggattatattaattgaaattaataaggctgaattggcgatttgttcttggtatactttgttatactactttgccttagcgttcatcaaaactgccatttgattttccaacattcagaaaactctatagctggatgtaagatttattatcgcaagatattcaggatgttggtcggtgacttggttttatcaataatttgctgggaatatagtacttaatctcataatttgtttctctgtgaaatcgtcgtaaaaaagtgtttatcattttttcaatgttaagcacgggtgatttggtgttggagtcatgcatgattccaccactatgatttaaatcctagtgtccaaaaatatcaaaaaaatcctagtgttcaaaaatatcaaacacatgtgttgtgctatcaataaaaaaaattattagtgagattagggatttgttgttggcttagtctctttgagtcacgggtgtgcatttcccttatggagtaataaaaaaaagaattgtttatcctgcattctcgttaacactctaaagcaccagcaaagcatgcctacattttaattacctgatgccttgtacgttttattggtaattaatttattccaaatgtccaaaataaacgattcatcatcagtccaaatcattttatcgtaattaattataagcttctgaacatgaagccactgcaattaattagatttaagctgacctccggttctgtaaagagtcgtatgaggaagaccaagaccagccatggaaaatgtagacggtgacggcagcgatgggggatgtggttgccgtttggcgccaaaacgatggcgttttcatggccgtcggcttcttcctcgcgccattttcatggtgacttgaaggagacgtattgtttgaacagccaaagcatatatacgtgtgcaaaaaagagagaaaaaaaattatgaaaagcaactagattcacatgatactttgtttctctcttcttttttttttcttttgagggacactggacacatgatgctttattggtaaaagatgatacacaagggaatacactgctgaagcacggcagcgatcacagttcacatgggaactctttgtcttttttcttttttgagatttgactaattttcgtggagtctactactctactccctctgttttcaaatagctatcggcggtatctattgttatttcaaattgtccactaataaactcttaataatagttaggctatggtgaatagaagttttgtggttatgtttagtatacatttcactttgataatatatatcgtttttcttaagaactagtaaatatcttttaagaaaaaagaggtcaaattattaaaaatatagggaatactatgttaaggtttatgcttttcctgatcatctagtttaaaatacaagtcatctataaaaaaaatgtacaagaattaaagaaattgttgaatgactacattacattttttaacgaggaacatcattatcctttttactcaaacttagatccctaaaattacttagactcatttgatacagatacagaggattgaaatcctacataaaacaatcctgttaggtcatttggataaatgattaacctccttaaaatcctttggctcatttaatggtaattttggaggaaaacaaacatgcgatctagcctcatatattatgtttttgtgagacactttttggtactatgtattggttctactatgatgtattgtaccctatttgttttctaaggtcctaatggcctaatataatcgtattatagatatatagaatggttaaatggttattgtctatgtgatatgtaagattgttgcttcgacttgatatccgaataaatatttgtaaccgatagtgtacgtatccattttggtacgtatttgttccatattttttcccgccattatccaagtttgtatccgtattcggcactatccgtgttcgacccgatttcgattataaaatatgggttaggatatgggaagggtgatatccaaccgaacccgacccgttttcaccctaccgcacacgccgctcgcatgagtccagtgcttgcatattgggcctaccttttcaactgggtcaattaatacccaataaatagaagaaataagttcactttacatcccaaatcgaacgcccatctcccaactcacaatactccttcgacagtatagcggccagttttggctaacatggtgagtgagagccatgtgtcaacgtccaactcttttgccacatcacaatcggcgactgcaaggcgggggaggtcgtgccccgctcatcactgcgcgtgcaccgcggacgccagccgcacaggatcttcgcctaaaagtgatcagtgccgtcgccaagagatacaaaccactgcacgcctacatcacacactcgccatgagggacaccaccgcccgcaccttcgatcgatcactcgtggttgcactgttttcgggcgaagatgctcacctgcctcttctgtaacaccccaggtttacttacctagaatgctacacactacggtacagaaaccaccaagtcctaaattcattaagaatttcgacagagtctcacatgtaaattcggacatccacaacaggtaattgaagttaaactaataataatatcattcccacggagcgatccatccttataatccaaactattaactcggtaggtaagtgaatacctggggtgttacatctacgactatgatgtcgtcgacaacaccgatgacctggccacgcacgacatccctagggcgcggacccccttggctcctaaaggcgtagggccggcaattgtcacacctcaatctgataccgccgtacaacggcacctgacaggagcgtgtcgtagggaaaacggcgcgaacagcttcctacgaaaccgcgatctcggtaccagtcccaggacatagtgctggtacccacggtgacaaatatgaatcatagcaatccttaaaataaatagaggacttatttaccttaacttaggttgcagctcagacagcccgagaatacaaccgacgacgcggacgaggaaacaccaacagcagcagcagcagcggaaccaacggtctaacacccaacaccacaggcgacggctgggaaccaggacgaaaccctaatcttcacttcactttatcttctcttcagggtggaggaactatatatatatatatatatatatatatatatatatatatatatatatatatatatatatatatagcaagggtgagtactttcgtactcagcaagtcacgggaatttaggtgtttaatgcaagcttggaagagaggcaaggttgttttgcaaatcttttgtttgaaatcattttgaaatcactaagtgatttatttctttttaagtttgggccgaaaagagacttgcgtctcgattcgactttaagagatgtttttcaacagctcatttggtaatgtactgacctcccgggtcagatcattacttctcggctcccagagccattccacttgattaatcggctcccagagcctttttcattttctcggactcccagagtccagctgcccagcagcaaagcaatccgcttccactcgggaagcctagtctatgatgcccacagacatcccgaatcacacagattcgtttctgaccactcaggtcatccatctgccacataggctgattctggttacgattcccacaccacaacaacttttcacaaagcacaggcaaacaaatctacgcaacgggaaccacctcacatccgcccatgaccgtgggcacggctgttcgaacagttagttaacctctgcagaggggtacactttacccacaagacacgaacttactccagacactggccggtgtcagaggttcgcgacaaagcctttcccaagccgacccagggatacctcatgccacatagaaggatcaaatcctcacataaacataggccattttaggcgttcacaaatcaaactccaaccacctcgatcggtaattcagcaagcttctcgttcttgcattaccaggaacctggtttggctccaaccgaccccgccctggcgttcccaactattggcatgcgaggtttccctgaaccgactagttacttagccagggtgtcccattccaccttgtggttgcactttgattatgttcgatgagtttcccacaggaatcggtccttatatgtgaatacgggacagtgccacataggcacaacccccgcatcgcgagttttcacaattcattttattttcaaacacaccgacaccacatgtcgggttttgaaggcttcacaaacccatttcccaagttttcgacaaacaacggtgtatgtgggttatttggtatacgcgctcagagagcacgaataccgaggtaccacaagggtggagagacaaggaatcagggtagtacgacctacggaaattagtgcgactactgggtaggtccgtcggtttggcacgcaaaccgaggccaagcaagttaagtgtgtgattctaataatgcaagttgcaaacaaaataataatgacttttcaattataggggcaattgatcaagggtgacttgccttgctcaaggtcttcacaaagcttcacgaatcttcgagaaaacccgcgatcgacgaaaatccgataaccgcaactatacgcaaacaatcgaaaacctaaacaaaagaccaaaagaaagatcctatttagactaattagtagtgccattaaatagatctcaattttatgtgaatactggaagttgaacggagtcaatcggacgagcggttggggagatatggatttcctaagattatttggattttctgtctaaaggaaaaggatttatcaaatcctttggaaaagaaaaggaaggagggatgtcatttagacttactcggcggcttaggcgcggcccaaggggtcatgcgcagcgcggtcaggccattggccagcgcgggcgcgggtggtcggcccattaggggcgcgcggcagggggaggccgaccggtggatcgggtgcacctcgcggggtcccgggtggggcccgcttgtcggtgactgggttcactgagggaagggctcacgggaagggcagcgatagggtttggtggacgtggtttgggcgcgtgcgccgggtggagcgaggcgcgatgggcccacgtgcagccgcatggctcatcgtggtctgcgcgcgcacgtagggggaagcgaggctggccggtttgactcggtctagccgagttggcaccggtgtggcgcctacgcagcggccacgcgggccggcgagaggaggaagaaagggggcgcggccgaatggacggcggacggcggccgagttcaccggaggttgtcgcgacgattcgagagggagggagcacaccggaataatgagacggaggagatagagtgcgccaccggctcggattcacggaagggagaccggcgacgacgaatcgcggcagccctcgccggaggtgagaaaaggggcaaacggtagaggggcgacgaggattcaattcgaggcggtggaagcatctccggggttcaaggagtccgtttccggcgtcggatggggcggaagagcaccaaggagggctggtgacgagcggcggcctccgggagcgggcggcaacggcggtgaggccatgccgggcggcggcgggtctaggggcggcgtctacgcgtgttcgggagtgccaccgagctatcgcgcagactagagggggcgagggagagcgaggaaggggaacgggaggaggcactaccgagctaggcgggcagtgatgggcggtcgacggcgcggggcgagttcttcggccttgggccggggaaggggaagaagaagggtggccggagtcctcttcggctcctcgcgcacacgccggcttcaccagcacgcgcgacggcgaagggaggcgaggtcggcagctgcaaggcggcaacaaaggcgcggcggcggtggaagagagatgccgagagagaatgagatagggaggctcggcctaggctttatagatggaaaagaggcggtttgggagggggaactgacataggcggtcaagggtgcaaggacgacgagctggtgtggtcaaggtggtggcaggcggtgacgccgatggtggtcgggcaaaaggaaaaaggtggagaagaaagggagctctgctccttgctgtttcgggataaaggaaagggagagggagcgaggccgagggctctgtctccctcccttggacgcatgcgcacaggcggggctgggcgacgcgcggtcacgggcggcgtcagggctgacgcggcggcgaccgagcggctcggcgtcagggctgacgcggcggcgaccgagcggctggcctcgagcgagcgcgcgcgcgcgggaacgagcggcacggccgaaaatcgaatggcggcagcgggaaaaatcggcgatggcggcagcgctggcgtgggagagagagagagaaacatagagagagagaggaagaagacgagagagcgagagaactgagagagcgagcgacggctctctctcggctcgcatgcgtgcaacgcacgtgcgaggtggggggagaagatgatgggctgggaggggagatgggccgggggaggaaaatcggtccatccaaaaatacagggaggtaaagtagacctttttttaaggagatagatttggagagaatttgaatttgggggaaggaattcaaaataggaatttggttatttttggagtcagggcgaatatttggcaaggattcaaagagagggattgaatttcggaatttgatttggagatttgagtcgaaggaggaattttcgaggtggaggattttgatttcgatgagagggaacaacgggattaaattgagatccttggcacaacttagactctcacacaaagaacgaaaattttcacaattaggattttgccgaattagtttttaacgcctcacgaaaagcggagcgttacagcaatccaccggatttgggtgccagacagcagttgcggcaattcacatgggaacacaaatgctgaagcacggtagcgatcacaattcacccgggaactcttttcttttagagatttgactaactttcatggagtctactactctactccctctattttcaaatagctattgactgtatctagtactatttcaaattgtcaacgaataagtcttaataatagtcaggctataagttttgtgcttatgtttagtataaaattcactttggtaatatggtacttttttttaagaacttgtaactatttttaagaaaaaagaggtcttttttttaaaaaaatatagggaatactatgttaagatttatggtttatctgatcatctggttttaaaaagaaagccatttataaaaactgtacaagaattaaagagattgttaaaatgactttattacattatttaataacggacatcattgtcttttttactcaaacttagaccctaaaattacttagggattcattaaaataaaagaaaaatggagcaaatatagaggattgaaatcctacataaaacaatcatattacttcacctagtcttcgataagtaaaacgtttaaggtcattgggacaaatgaccggtctccttacaatcctttagaacttggaggaaaaaagatctagactcatttttctggtttgaatccgtatgtttttttgttacgtgttgttaaacaatttttgttgtaaattcctatatattcatttcctccagaattcaagaagacatgaaatcatattatcgaatcctacgttgcaaaggagacatatatttaggaagggaggcaatctaaattgttttagatttgtgcacaagaacaaaagagattgttaaatgactttattaccctcttttaaaactactaatgtatggtttgattagaagctgagacggttggttttcttcccaacctcactccaaaaagtccaaatacacattcccacgctcaacctcaacccccgcctccgctcgccgcggcgcgccatggcgccgacgccgccgtctcgcccgcgcctccctctccgcccactcctcctctccctccctctcctctcgctcctcctcctcctcctcatccaccgtccccacccctccccgccgcctcccctcctcgccaccgccaccgccacgcggcgcgacgacgagccggcgccgcggcgagcggcgtcgtctttggcgcccaaggcgacgacgacgacgacgctggcgcacgtggtgttcggcatcgcctcctcccgccgcacgctgccgctccgcctcccgctgctccgcctctggctccgcccgcccgcgcgcgcgttcctcttcctcgacggcccggcgccggccgccgccgccgcgtccgagccattgccgcccaacctccgcttctgcgtctcctccaccgacgcctcccgcttcccgtacacgcacccgcgcgggctcccctccgccgtccgcgtcgcgcgcatcgccaaggagctcctgcagctcgacgaccaccaccacgcgacgccgcccccgccgcggtggctcgtgctcgccgacgacgacaccgcgttcgtcctcccgaacctcctgcacacgctctccaggtacgactggcgcgagccgtggtacctcggcgcgcgctccgagtccgcggcgcagaacgcctggcacggcttcgccatggcctacggcggcggcggcatcgccgtgagctggccgctcgccgcgcgcctcgcccgcgtcctcgactcctgcctcctcaggtacccgcatctctacggcagcgacgccaggatccacgcctgcctcgccgagctcggcgtcgagctcacccacgagccaggattccaccaggtaacctttgcttcttattgtttacattttctcatcaacatgctactgccctaatggaatgttaggttagattgctgattgctcattaattcaattgtgttgatagatagaatgatagatagatagatactggtggattgataaagaatgaactttttaaaatcaaaatttggtactcttgacacctgactggtgagtagagcaggaattgtctcaggatatatctgaccatatttgataattgtattttgtgccgcgtaaccaccatcacgggcggtttgtataacaatgattgtattactgtaataattaaatcattatgtagtacaaccatgttgttcctcacaaaaaaaaaattgttgtaatctattcagccttgcttagtcacaccgtagttcagaggcatagctagtctttgatattaagttatcagttatggaagagaatcgttgggtgaaattttggattgtatcaggtcaaaagaaaaaaaaatagtattgagcttgcaaaatcattgcctagtatgaagggattatgttgttaatggtagaaaatcttaagctgtcagcactctaaactttttttttttttgcttccactataaatttttagtgtacattgttgtctgcaattctgcatacatttgtgccgtacattagacttttcaagaaaaagcttatcctttagaatgctctcaaggaatgcagaaccacaccacaccaatcctgtagaatgttgctaagttgtgtacacatggaaccatactgattacagaacataagcgatgggtactggctaacaactacaactacgaattgcggaaccaatacgaaatctttgctactgcccactggatttagtgatccatgcttgtgcatcgactgattttgatgtgagggcacttgaaagtgggtgctttggtccgcatgccacacatccctttcagattatcttaagcttcgccatcactatcttaatgctgtcaaaatgggcatcttccaagataatgatgttgtcaactagaactgttggctgttgctgaaataagtagtgcagtgggtcgctgtctgacagttaaatatggcagcagaaaatatttccttttgctccacctatgtgtttcacttactgaattgtatgacttacactatataaactgcaaggtattgctttcttcctcattttcagccactgaaaactatgagatgtcttcttcttgacgactctttagacgcgaaacattcccatggctttacttaatattatgcaacaaaaaaaatcttgattcttaacttgtgtgttgtgttgcatttgttatatccagatcgaccttcatggggacatatctggactcctaagagcgcatccgcttactcctttagtttcactgcaccaccttgatcatgtatatcctctttacccgggtatggaccgtgcaacagcggtgaagcatttcttcagagctgccaatgctgatccagcaaggatccttcagcagacagtgtgctatgaccattcgaaagcaattacagtgtcaatagcttgggggtattcagttcaggtgtacaaaggcaatgtgctgcttcctgacctccttgctgtgcagaaaacgtttgtgccgtggaaaaggggtcgcaatgctactgatgtttttatgtttgataccaagcattacccgagggatgagtgcaaaagagctgctcttttcttcctcaaaagtatttcttcaggtgaaggcaagatcaaaagcgattacactaggcagctgcctagaaaatgctcacctaacttgattccattgaggaatcttcaccaaataaaagtggcatctgagccattacatctggttcctgggaaggtatggctatgatggttgccttcatcaattgtgacacaaatttcagtgctcgaattaagattttgtgattgttcttttactgttgtgtgtttttaggctttaagacggcattgctgtgatgttgtgtcttcctcatctgaaaccaacatggatgttaacatcaggaaatgcaaagaagacgaactgattgcgatgcattcttagtcacatcttcaatcgaactggatgcaatgctcttcctctgtagtaagttcctcctcacatccctttgtattttcacagaattttcctggacacacgcctcaatgttttatcacatgaaacatgcgtttccattttattttgggtcccaccaggtctgacataacttttctcgtagcaatttataattttcgtatgatctttgcagtaattccattgtactagcttcctagtacagaaagtgacaagacaagttaagcagactagcattgtaatagattctccatgaagtctcacattctgccgtttactttggtcaactggaatctcctttacaaaggagtggaggcaccataatctgtttgtgctatacaatgacctttttagcttgaagaaaaatgcatagtggacttgagtgcggccctccttttggtgatcaagacgacttctggtgacagtagtactactgaaactagaacagcatggatacatagatagatacttcctccgtttcacaatgtaagtcattctagcatttcccagatttatattgatgctaatgaatctagacatatatatttatctagattcattagcatcaatatgaatgtggaaaatgctaaaatgacttatattatgaaacggaggaagtagttgagatgttgaacaacacacttcattattattattttttaactttacctagcaaatgctcatatttatatatgatattttaccttgagcactttttgttgtggaactttgagtgtacattgggactgtctgtacatctcaatatctcatacagcaggagaaataatttcaggtcctgcttaggattacattgcaatcctgttctgttgaactgcttctgatatgcatggtttttgggcctccatcctggcccatccgtatgtatgggccggttttttgaccttggatgtggcaggatttcggcctatccaaagaagggacgtttgttggattgggcctcttctgaagtgtcaatgtaatcttatgctggctaaacttggctggttcttggtctatgttgggcccttttggctgtgtttcttttgaatatttttttagattctattcatcgtttgccgcgcgcctgccttctaaactgttaaatgtgtgtttttaaaaaaaatatagaaaaatttctttagaaaatatattaatctactggggcaattgaaatctagattatttgtaagatttttagctaatatttaattaatcatgcgctgatgcatcgctcttatttatgtggcggtacggtggttcacattaccataccaactgtagtcttcacacatataagacccttaggttcaacatactcggcctgctccaaataagagtcatatatttataataatggtaatccaaacgaactcagccttaggttcacgttaccataagccccaagtatggtaatgtgaacggtcaatcaacttgctccaattaagatagtcatctttgtagtattcatacatataagacttaaataaaaagataaactaaatggttgatcggaacctgagtagtaatttcaatactccctccattttaaaatataaatatttttaaaatagtgccaagtcaaatatttttaactttgactattaatagaaaaaataaaaagatcaatcatgtaaaattaatgttgctagatttatcattaaacaaactatcataatatgtaactcttttaaagtaacaatatcttgaaaactgtgtcgaagtctaaaatgcttatgttttgggtcggtataattacaatataagtatactttaatcagtaataatatctaaaaggttctaaactagtaataaaattgttgtatagctactttcttcgatatttgtcatgtaaacagtgatgattatgtcgtgttatccagcagacaagatacttttcatatagctaggcaagtaggcatgaacacttgcgctagtaggcgatgcagagtggctaactttgtccttccaattgacaaatgcagccgcatgtggcccatcaaatttggtactagtactaatctctgtgtacctaacgcaaacttttgctgttcgaccagttgacctaatggtctgttcatccattggtgtctaatgtgtctccattcaactattcatggcaatgtctccaacatttatatatcggcagttgagctctcttttcccatcaagtacatgtacgtacatgccgccatgtattttggaataatggataaaatttaatggagcctaaggttaactacactcacaatcaatgtttatctcagtctataacatgttttaaatttgtgtctcgaatataatagtacagtttagtcctccccatatgatatgtgtgtttgcagatttttttttcccaatttgcttagtaccattaaaaaattacggagttaaaaaatacggttgtatgtaccattgatacgtacgtaggtctaggttccacatgtcattcttgatggtattttataacttatatatatctttctgatggtattttccaaattctctctcttttttttttgccagaacggtaaagtgacgctggccaagatatattaagatgtgtttgtgagttttctgaaatcaagatctcctcatctaccaaccatatactgtgccgggaccaacatatagtacaagctagagattattattgagtccttatcggttcatcagagtgtgctcatccgagtgtgcttttcagatcatagatagcctttggtgacaaacagttttagctaatattccttccgttatacgatatcatgttttgggtttgtcgattgtcaaatttatttaagttttgctatgtttatagataacgtagtaacatctaacttcaaattactttcattaataaagccactgtttgtatataattttatagcatatatccattttgtgtttgaaatattactatgttttttaatataaattaattagttaaacttgaagaagtttagtttagaacaaacctaacacgtgatatgaaacggtggaagtataccctgtacttgtaactctatcgtgaagaataatacatgtcgcaactataaatatatatcttccgaagcagtaaaacttgtactcctaaaagtgctctcaatctaaggctatccataatgtaatggaaaagtaggaaataataggcattaagacatccttactactgcattgtgaaagtggtaaatagctagtgccaagtcataggcttattattaggatataagcaatttaagttgagtctcaccttgtttattttattgtggcaattctcatgttagacataggttgaactttttttttaaaagatgggcccaccttattttccactctacacatgcatatggattgaaatcctctaacgtaactttcctctgacgtggtgactaacatatggggtccgagagtgatgaagtgaatagtaacgtcacgatgaatggtaacatcaaaggatttgcttctcatgggcacatcgtggtctttccaacctgctaacgccacttgacacggttcaccttactgcctagttggatcgtaaacattgaggatgcccgaaaggggtgagataaagcagtaaaacgacaaagatattttcatcaaaattaattaaaaccagcagatacttgtgcagatctgaacacggcgatctctttctgactcttcatccttgtgacaggaacaagcagctaattaagctagcgtcgtactccacagtagtggtagttaacagccggtctgaacacataggcaagaattcaacgacccggcccagcaatagcagcttattgatgcaccgaattaagcaacaattatatatatctggatccaacaataattcatccgatcaactaattactaatattgcgggccatccgatcctgaccgttgaatcgggcgatccgatggtcaggattcagtccagggtgatgatgatgatgatgatcctgatcctgatcttcctcctcgatcgacatcttcccgacattgtcaacatctctttcgatcggtcgatctgtagctgctcctgctgttacgcttgctagctactccctccgtttctaaacgtttgacaccgttgatttttttaagtacatgtttaaccgttcgtcttatttaaaaaaattatgaaatatataaaactatatgtataaatgaaagtatatttaacaatgaatcaaatgataggaaaagaattaataattatttaattttttgaataagacgaatggtcaaacatgttttaaaagttaatggtgttaaatatttagaaacggatagagtatatatcatcaacccccagtaccattaatggaggaccactagctagctgggtcttacattgcatgcagcagcagcttgctaggccattcgatcgatcgatcgatcatatatatatatggatgagctacctacactgatatgatccaccacaattaatgtgctcgagacgacgcagcaacaaccgccgcgccattgatgactaattgagatcgatcgatagatagtataagagatcgaccacgagctctcgatcagcctagctatagctatagatagatatacaatctctctctctctctctctctctctctctctctctctgattgttctcttctgcttgcctcttccatggagtgggctcgaggtccagccatggcggcagcggcagcggcagcggtggtgatggtcgccgccgttctggccggccaggcgatggccgccggcgcgacgacgtacacggtgggcgcgccggatgggctgtgggacatggagaccgactacaaagagtgggtcgctcgccggacattccaccccggcgacaagctcagtcagtaatccaaatccaaatcgagttttagttatctctgttttcttgggttttcttttgtactttttaaccatttgaatttttaatttcaaaaataaaccattctaaatctatttccagaatctgaacatttttggcacaccaaacccaccagacttgacaaaataacgtcaacacgccagccgtagccggcgtcatagtttagttttgtactatcataccaaccatatcgatcggagtgggcaaataatagcactgccacgctagttagacctgcgtcggtgttgtcttggtaaaagcttcaaatcttaattacatataagttttggaagagtttaattattttttaaattgaagattaaaaatgttctaaaaattaaaacaaattcttgcgatgagcttaatcctgttcttgatttggatcaatgcaagtgcagcgttcacgtactcgcgtgagctgcacgacgtggtggaggtgacgaaggcggggtacgacgcctgctccaacgccaacaacatctccgccttccgctccggcaacgacctcgtcgccctcaccgccgtcggcacccgctacttcctctgcggcctcaccggccactgcggcagcggcatgaagatccgcatcgacgtcgtcgccgccgcctcctccggccccgcagccgccgccgcgccgctgccgtcgacgtcgtccgtgaccgccgccgtcgccggaagccgcctagtcctcgtgctcttgtatgctcttctgccattgtggtagcattaattaattagtctcttgtgtgtatatttttgtaattgtaagtttaagtacacgtatatgctttgatttagttaatattttgtacttctggttttaatttgtggttattgatcggattttagatatgcatgcatgccttaatttggtttcatttgactgaggtttgtgttacgacttgcatggagagagaaatgattgttctcttctacaaagctaggatttttttttcaaggatttttatgaagttcaattgttcaaggattttttttgaagttcgactggtcaattttttcaaggatttttatgaagttcagaattgctctcaaactaaccataacgtattacaatatgcaagatgcatgaagctcattcatatatggtctatttgatgacgttctaattaacgtacctttctggtttttaatacatgatgttattcacttttaaacatatgttcaactatttgtcttactaaaaatttacaaacaacactacactggccaaggtcacctgtgacgggcccaaaccctcatctttgacggcttcgcgcatggtcagtgatcagtggtcactggtgagtccagtcacctttgacgggtggccggccgtcacaggtgacacccacctctgacgggcaagttactagaaggccgtcagaggtgttggtctccgctagccttgagcgagttaggacccgtcacaggtgactcatctctgacggccctttaaataaaggccgtcagaggttgaggtctccgtagttagaagctgtcacaggtgatctacctgtgacggccccaaaagtaaaggcccgtcacaggtaggtcacctctgacgggcctttatttgctagtccgtcacaggttatgttacctttgacggatttttgttccgacccgtcactgatgagttaattccagaaaaaaaataaatgctaaatattggctagcctcaggatttgctagccatgccctctgaaaaatagaaacatcacagatatattccagtcacagatccatcacagatacatcaccccccaatataacatcacagatccccaacaacacatatatgcagttcaaatgccacaattttgcacagcaaattcacaccccttgaaagccacaatttcggtcgttgctcatagaaccgcatatatacttaccaaatggattaaagccataatgtcatcgacctgcacaacctgtcaataaggaaaaaaaaaggagaaaacagatgaatagtacaacataaatcgtagttgatcaaatgtgatgacaatttagtaaagtaccataaatattgcacatatgaaagtaaattacattgcactctataaaaacataattttttacatcgccagaaattataaaaacatcttttttacatcacaataaattatctagccaagttcatgagtctatttggcatgaaaacgtcctttcttgttcattatttctgcaagaataaaagcgcacaattcgcctctgatagcgggggggttgatgggtgagatcttgaagccagctctacctttctgtttaataaataagaggttaattagcacgttttgaatagcaatgtagatattgaaatgagcttattcgccattagcaacaacctcagggtcgaaatctttcacctctcttagaagtgttgacatgttgtggcacacgtggaaaccacattggtctccgatctgttgtgcgcatgcaaacttggtgtcatgataaagttcattcttgccctccttgtgcctaccacccttttccacatatgggccccaagccatatttaaggccttggtgatttcactgaaatcataatctttggacttattggagttaaggtaggtaacccgactccacttaggtacgatgactaggagaatccaatgtcgcctgcgcagtggttatgtagcgttagtactaagaaccttaacttcaaaaacaatatacacgaagggtattgtcctcttactcttggttgtgtgcgcacatgatgtactccttgtcttgatgggcccataaacaccggttgacatagtcaaccacctcagtgaagctctgtcgtaaattaacctcattcaccatggatggatcaaggaacccaacctgattaccatggcgacgactctcgatccaacacaaccttaaaatatgtacgtattagaactaatttaattaggagatatagtccagtcatatcacaagtatagaaggtatgcacttacaaggagtagcatttaagaagaccagtgtccaacttccggatcctgaaaaggtcgaagaggtcatcaaagcctatagttatataggcaggcgacgataggaacggctggtggtcgtgatgtccaactatggatgactccctcattttccgcttggcattgcttagctccatgtattgcttatgtagctctcggcaagcaatacccatcacagctaacacattgtcctccaccaatggcatgcctagctcaaattgggctggcgccctcacgaccttccccgatttgctcaccggcatcgacgtcgcagccttgcccctttttggctccggcgccaactccccgaccttccccttgccgcgttcacgcttctggcccttgacaagtggtggggagctatcggcctttcttgtggtctttattggagccaagctttgagctatatctgccaagtccatatcagctccaccgggagaatgaggtactgacaatgccggtccacggggagcctcaattgatagcttagacttgggaggtgtaagctccgtcggtcgacttggacgaggagtcatcttcacaactatgtcttctttgggccattgtatgaacgtcttgcgcgcatcgccgaaagtcatgatttcatcatttgggggcacgggcagcagatagcctgaccaggtgtcctttactgtatcgatggacaccttggcatacctagctagcaggtctgcgccgtggaccttgtctgtaaccgagggcttgaaagccatgccctcagcgacttcaggagcgaaagttgggtggactctcgctagtaggacacactgtgctgcgccctgcataaggtgaaagtttgaatttaatattggaatgtgtacatgtcttttattagatatggatcggataacaacaattacctcgatgtggtccactgcagctagtggtgcgatcgggagaccaggggccggcacctctgtggatgcacaactactcctatgctgtgacggactcgcgtcgtgttgtacacgaggagttggttgcacagcaggtgttgtgactcggggtatattcatgtcggcgaggaccttgttaaccctttcttccacccttgcattcatgctagcttctagttcttgaatgacctcaaccttaagttcggccttcaaacgagcgtccctctcttccttggagactttccgtttcctgtattgggatctgtactgagggagtccatgcttccagggcacatcgctaccaattccccgagttcggccaggatgttctttggttccgagcgcctttgtgaggatgtcatcttcgcgcctcttcggcgcggactcaacctcgctttgtgaagcttgttcagtaaccaagcccaactagaaaagaagatagtcatttatacgaacttgtactttatacgaacggaaattagttaggttaagtagtgaactcaccagttcctgatagacgacggcatcacttttgttctcaaatgtgacagagccgttcgggttgaccttaccccttgcccgcgcccagttgcgagctctttgttcagggatgtctgaaaacggggcagggacattcgctgctgcagcggctgcatcttcttgggcccatattgcctccttgccgatgtaccctgcggtgcccagccgatgcgggtgctcattccgctgttgcagtaggcgatgtgcctcgcttgattccctaaactcttgggtggtcttgagagagcagaattcctcccaaaccgcttcggttatttgagggtattcatcgaacggcgtatgattgccgggcgggttgacaaactcggtgaagagcttcgacttccaattcttccaagctttgcccatcttttggaatgccttccgcttgagcctatcctttgcttcggctggaaatgtgaaccatttctccattgccgtccaagctcgctctttctcggcttctgtgaccttcccgatatctttatggaggatcccgaagttctcacgtgccgctatcccgcagcagttagaccatcttccaatgacagtcctgggcgccgtgggcctaccactagcgtcaacctctcttataacttgcactgtggtcggccatatattttgtgaccgcggatttctactagacctacttgcacttgtcccgcccgacatcgacgtatgttgttcatgcggcaattctgcagcacaaacagaaggcaatatttgctaaggggtgctagctaaaatttatgtggtcatgtggtgaaaatttatcctataaattaccatgaatttcgggttgttggaccgccgttgtcgcgggatgaccttcggcaactgcctctgtggctgggtttgcttcttcctggatcctcgcaggtgttggggagggcgggtttgcgccgggcgttgacatggtttaactttcgcgaaaaagattataaatttcctaccattagactaaatagcattagatccaatgtaatacggggtatactatgaaagatatggcctcagttttgctgagaaatatgcatcaattacaatcatttgcatgaagggataaaaagaggaaatcataacatcaaaagagcaagtgcagaaaatctgttcttatgcataaaaaaaagaacaagtgtagaggtatataaccactgaatcaatcatgcaaatttaaaaaacagcagcagcaagggtacagaatttgcatgattgacataaaacagcagcaggaggagtatatatgccacaggggtatcaacagcatgggtatataaatgaacaagtgtaggggcaaaaaaatgaacaagtgtagataatatgttcttattgagcaattcatcactggccatttaataaggaacacattgggcagcagcagcaagggtatataaatcatcaaagaatgacagaaaacaagtgtatatagtctcctcttatcaatccagaaaattcgatggcctcttcggtggtgtaactctcgatgatactcccctcggggtgtgaacggttccgtacataacccttaaggatccccaggtacctttcgcaaggatacatctgcgtcatgaatgctggaccacaacactttgtttgcctcacaaggtgcaccggaagatgttccattatgtcaaagaaagttggaggaaagtacatctcaagatgacatagggttctcacaagttctgcctgtagtttatctagtccctcgggatcaatgatcttctggccgattgcatggaagaaggaacacaaccgctggatcgggtgtcgcaccttaggaggcaaaatattccttattgcaacgggcaacagctgtgtgataagaacgtggcaatcatgcgacttcattccaaccaacttaagatcttgcagtgaaacgagcctactgattcttgatgagtaaccagatggaacctttataccactcaaacatgttagcaaatcaatcttctcttctttcgagagagtgtagcaggctggaggaaggtaaaccctgccggattccgtggttatgggatgtagctccgaccgaacacccatatcttccagatctcgtcgggcgttgagaccatcctttgtagtacctgggttaagcagtaatcccattaaactctcgcatacattcttctcgacatgcatcaaatctatgcagtggcgaacttcaagatccttccagtatggtagtctccagaatattgacttctttttccacatgctcctctcttttgtcttttgtttttccacatgctcctctgttttttccttcgatgtgctcttctcttttcgctttccaactttcctcttttttccaaactcgttggttattcccatcactaagttgtgcacctctgtccctgttagctctgtcgggggtccggctgtatctctgtgtccattgaaattctttctcatattcctatacgggtgataccttgggagaaatctcctgtgacccatgtagaccgtcttgtgtgaatgcttcaaccatttgcttcttgtttcctccatacactccgaacacgcccatttccctttcacagtttggccataaaggttgccaagggccggataatcgttgatggtacaaaacagcatcgcatggaggttgaaatactcttgtgcatatgcgtcccatgttcgtgtgccctcattccatagcctttcgaagtcatcgattatcggttcaaggaacacatcgatatcgttgccaggttgtctcggtccttgaatgagcatggcaagcataatgtactttcttttgaaacacaaccagggaggaaggttatagttaacaagcagaactggccatgtactgtgacgactgctcaaatcaccgaaaggattaatgccgtccgtacacattgcgaaacgcatgtttcttgggtcatttgagaattcctggtaaatcctatcgattgtccttcactgcactgaatctgctgggtgcctcagcatagtatcgactttccgttcttcggcatgccagcgcacaagcttagcttgttccttgttcgcaaacattctcttcatgcactccgcaattgggagataccacaccacctttgctgggcctcccctctttgacttacttccttcaccttcactctttgctcgtttgtatcttgatcccccacagatagggcagacatccaagtcagcgtattccttgtaatacaaaatgcagtcgtttggacatgcatgaattcttctgacctccaggcccaacggacataatacttgcttcgcttcatatgtcgtctgaggtaaattgttcccctctggcaacagatcctttaacagctcaaggagttctgtaaaactcttgtccgaccagccattaatagccttaagcttcatcagttccaacacgcatgacaacttgctgtgcttcgacttgcatccatcatacaacggcatctggcaatcttccaccaacttactaaacttctcataatctctgtcgttgtcctctgcgtcttcaatgtcatgcaacattgtagatagacattgagtgtccaaatctatggtctctccacctaaaggagaaggtacgaacatgccttctcgagctgcggcggtgttctgtacaccctgatccaacacttcttcagctgcgacatcaggcgcctcttgctctccatgcttggtccagcaggtatatttcttcatgaatccattcattatcaaatgagcatgcacttcatccttgtcttcgatcatctgttcattcttacagtccctacatgggcacaacatgtgcatgctcatcctactttttctgtcattatccgcaaatgtgacaaattcagtgaccccctctctatactcggtagacgaacgatgcgcatagtacatccatctacgatccatctgaaatcaacaacatacgaagaaaaataaatgatgatcgatatgttgagaatgaatggagaataatgtgttttttaccttgaattttagtaaaaaatcgccccccttgccctcccaaccgatttgtgaacagtacaatggtcgggatggaaagcagttggcagtttgggggtatttatagacccaacacacctcaaacgggttagataaaaaaagcccgtcaaaggtaatgctcatacctttgacgggc

SEQ ID NO: 7367 - DNA, 11533 bp, Oryza sativa
cctccctcctccctgtcgccgctttggccgcgaccgcggagcgccagctcgcgccttgaccgcccaaagacggtttccaaaccgacattgccgcccttaaagccccgggtgccctcccttcccctttcccccccattcctccccgtttctcgtccgcgccattgccgccgccttccgagctctgtctcgcctccgccgttcttcaccaagcgccgggagagccggtgcgttcgaggacgcggaaggggactccgggcgctcgtcttcctcctcttccccggcccgaggccggagagatcactcccgcgccgtcggcctctcgtcacagcgcccctcctcatctcggtagtgcctccctccgttcttcctcctcgctccatctctcccccttagttttcggtagtagcacaagtagcctccccgtagctagccggcgccgccccgaccgttgccgtcgctcgccgtgtgctcgccgccgtcgccacccgagctctgtagcacccgctcgtcgccggcctcgctcggcgtagctccgcccaatccgacgctagcaacggattcccgtagccgcgtagatgctctcaccgccgggagttggtccctcgtggcctcgtcgccatttccccctttgctctccgccggttgccgccgccgaaatccgccgtagacgggctccctccggcgaatccaagccgttggctcgctccctctccttcttcctcgtcatcccggtgtgctcgctttcgccggtatcgccgtggttcgctccgccgctcgccgctgtcgtccgccgtccgttccggccggcgtcgtcgtctacctcccgccggcccgcatggctgccacgtagacgccacgtcggcgccacctcggccgcgaccggatcatccgacccggccagcagctccctccgtttttcccccgtacgcatggtccgcggtgagccgtgaggctgcgcgtgggcccgccgcatccgttcctccgcgaaccgcgcgcgtgcactgcgtccctcccccgcccgcgcgcgtgagccgcgtgctccctccgcacggtgagccgagccgctgacaagcgggtcccacacgggaccgcgcacggtgagcccggtccaccggctccctctctcctctcctcccgcgcgccctactgggccgaatccttttgggccggccggcccattagctcggccgagccgcgctttttctctcgggccgcgccctagccgcccgagagaagtctacttctcctccctctttcttttctttttcaaaaaggatttaattaaatccttttcctttagacaaaaaatccaataatcttagaaattcaatatcttcccaaccgtaaatccgtttgactccgttcaacttccaaaattcctcaaatctctagatctatctaatggcatgcttagaggtcattaatagggccttattttcgccgtttgttgagttgtcccgtttcgcgtgtagtttcggagcccgaagacccgcagtgcgaggatttcgaggatcaagttccagatctcgagcaaggcaagccacctttgaacatcttgagcctatatttgaaatttaattatattgcttgcaaaatattatgcattgataggaccgcacttaatctgttaagtcccgtctgcaaggcagattggcggacctacctagtttgttgcatttgatccttcctatgttaattgatatatcatgtccccttgtaaccatctagattgcgcctcgatattcgtgcaccctgtgcgagtatcgacggttgccttcaaacttaaaatctgaaaaaaatttcttgggtaaaaattgggttttacaaaagacttggaaaacccgacacctgggtcggtgcttgcgaactaaatggatttccaaaaccgcggaccggggaacgtaccgggtgtacggtttcccgctctcgcacttaaggaccgattccttggaatttcatccaaacataagacaagtacgaccacatgggtggaatgggacacccctggctgagtaactagcttatcaggggagccttgatgccgagagacatgtggattcgccggggtggtgtcggggaggacccctgggcttcctggcacagtatggtctgggacctaacctgttgttggtctgggactcctctcgtcggcatatggtaaacctgtgtcggctttggaaatgccttgtcatgaaagcttggaggtctcccgatgtggctgatccccacgggctgggtgatccgggttagtaatgtcgtgtgggtaaagtgtaccccctctgcagaggttaacaaactgttcgaacaaccgtgcccacggtcatgggcggatgtgaggtggttcctagcgtagttttgtttgactactgcttgtgaaattgctgttgtggaaaggggttcgatgattgaaaaatctgcagctgatgggatcagctaggcccgggtggccgtttgaaagttgttggcccgggtggccgtttgaaaagctgttggccgggtgccaaccttgtttcaattctaaagactgatacattgcacatactccgaccggacaagacgcactgtctcatccgtgtcgtttgagaagcactcacttagttgttttcagaaaagggttcaaataaaatcaattgctaaaacaacagcctttctttgaagcctgcattaaacacttatttcccatggcttgctgagtactcccgtactcacccttgctctatataaataatcccccccagttgctgaagaagatgaagcggatcctgctgatgaggaggtcttccaggagcaagccggctacgatgagttttagggtttcggcctagttcccaagtcgcgcctgtgtcgtttggtccaactcctagcttccgtttcccttttgtagtgcagttgtgagctcgggatctgtccgcagcccaacatgactgtacatctactctataataaagagacctttgttgctgtgatattctgtctccctgtgataccagcactgtttcctgggactggtatcgattaacaggttaatttggagcgtcacgggctagttccggtcgggactagttcggggcgtgacactcatcatgaaccgtgtcgggttcgtcctgactagatccagatcccttgggatccaccaagagaggcttgagctcggcagcggcggcgagggggacgggtgaggcgcgggcagcacgaagtcgagcggtgaggtcggctatgaggaggcagcggtgaggtgctcctgccgctcgtggagctcatggcgggtggcgaggaggcggtcggagaggcctagggatgaggagagcggcgcgagcgccgaagcgagagaggaaaggggagagagatgaagagatgggagatggggagagagaggaggaagaagaggggtgaaatgacatgtggggcccagggccccgccattttttattaacttgtgtgtgaaactgacatgtgggtcccacagggtttattaattttccgaattgaattaccacgtaagcgccacgtcagtgccacgtcagatcgagaccgagtcaaattagccacgtaggcgccacgtcagtcaaaactgctatcgaaactgccgagggacctaattcgcaccggttttgatagttgagagactcgttgtatctggttttgtgattgaaggatgaaaatcggattcgttgataagttaagggaccttagatgaacttattcctgccaaatatactcaactggaccacgtacaggcctcaagagtcactgccggtgaagcccatgaagttcgttgctgtcaaaccaaaatacagagatattataattaaggattttccaccgaaccatatatcatataaacacaagggttcagatgttgtagactactagcgataaattcttaattaacacatcttataaatagcaattagttaaataccccaaatatcctagttggggtataactgtacaagtaataacactaggtaatatagtaccgctcaatcaaagagttagaaaatagttaacgtaaattagtgggagataattgtatagtaacaaaggatttcaatactattcaattcacttgctcatacaacgtgccctcagtacacatctttatttgtttatttattccaagctagctgaagctagcatgctaaggatcgatacaaatttatcatattactgaaattaaacgtcaacacaagtacttatttgaggaggtctcacaatgatcttatattcttatcaatgcacggtgaccttagtgtatttggtcatatcgatggtggcgcgaccggcagcagcaagggggaagtagaaggggtagatctcgtaacgcgcccagcagctgctatagtcgatctggcaccctggtccgctaccacaggccttatcaaacttggacactgctgccgacaggcattgcgcgcacgacggcggcgataagtctcgtgtgcactgcgccaatgcgtagacactcacgaatggggtgtattgctccttcgccctacctagcccgctgctgcccaccgcaacggcttgcgctgttgcttttcccattgccttccccgctgctttctggaaagccttggggttgtccatgtccggccattgtctcattgtcacgcttgcatcctccctcgtgtccacctccccaagaaagttatagttgtcgtaccgcatgaagcaatactcatacctacatgtacatatatacatcccgcataagtacataaacaactagaaaattaaacaaccaatgtgaaatctataatttatcacccatgtgtactctctggttccattattttgtcgctttggataataacacggtctcaaaaacatatgtttagctatgatttttattatagcatattatctccatcctaaaatataacaacttttacttataaatctaaacaaaacttatcccaacttatagctaaaaatatttatattttaaaacgaagtcagtacacacaaataagtaaaattttaatattattaaagtattttctaagactaatctatgtgttgcgttctagctagcattctcaaattaaactaaatattttgaaaagaatgacggtcaaagtttaaactgttttcaaatgttaagaattatgtaaccgaagagattacataacatgcagaattaggatccacagagtatacatgtgtaccatagcctggagtctgatgtatagttgcagtaggagaccatctgcttggcggcttgggcgaggcaggcgtcgcagtcgccgccggagacgtcgccgcggcactgcgcgaggccgtagaaggcgtcgtaccccctgccggccttggaggtggcgaatccgccgccggtgcgcgccttggcgacaaggtcggagacgacgaagttgatgctccgccgcctgacgacggcatcgctgccgttgagatcgccgtagttcatccccggctcccagcagaagctgccgatgggatacgtcgtcgtcgtcgccgccatggccagtgggagcaatgcagcggccaagaagactgtaagtagcagctggcttaatgccgccatggatggcgccaattgctctcaattcagcctcttgttgctactggagtagcagtagtagtagctagagatttcagtagaggaggatggctttagcttgtgtttgattgggatcgaatggttggagtttatatagagggaggattggatggggaaggagggattgatcgattgatcaatgtgcttgcagagttgcagtatgttaactgcaggcgaacaggtttcaaaatccttgttctaattgtttgcaaacttgtttttgactactactgttctaaaggtttgcatgcagacatgcagtgattagaactgtgggcgcgaagctatattattgcacgtacggatgacactcttgcagatatcgcggactagctaagctagctggctgagctggctgctggctgcctgcttgcttgctagtaccatttcttgtgggctggctgtcactagttttgacttttgagggatgaggtgatggattggataaacctatcatgtctcttcactcttcttcaaccaaacaaaccatgcatatatttaggattaagtggtcaatttacttatattacattgctcaatcaatccaaaactaaacagcccatatatattgagaaacacaacataaatgtaagcactcacaattagttcgcacgctcacccttataaagatacacacgcacatgctctaaaaaactagctattgttgtcgacgggttaatcgtctatactgaaagaataattagctgtaagtgcgagcacccacgtcaaatcgagaatttgaatccagatagcttagttccagcataagaaatctaaccagttgagttatactctcacttcactgaagagcccatatatatatatatatattagtgatgagtgaagatgaaaaagctgaaaaactattcggttgcagcgttgcaggacactgtatagtttgattgagtttgttttcgctgaatctggttggatgaaaagcaaatacactatccaatgattttgccaatttgcaaatactagttgattcttaggcaaaatccactgtatatagtctcctgtttctgcagccaaacagcccaaaacccagtagcccaccgatcgagaatctaattgcccccgcaaaaaaaaaaagagaatctaattgcgaacacgtgcatcgatccaattccaaacctcgtgcgaatttggcgccataccgtttttgtctaacgctaatgatgatttatctcctaaatgatatacatgcatccgtacactcagcttgcacgaatcctgcgcttgcatattgggcctatttcaattgccaatttaggcccagtaaacagaaagtgcatagaatatttctttttcctttctaacttgttttttcaattcaatgtaaaacatctataaaatgtattataatagaagttttttttcttaaagtcctttgcaaagtttgtaagtagaaagtttctttattattcataaattatctaggtgggaagtttactgcttacacaaagtttttgagtgaaacatttactatctatatacataatgtattctgatcaagtagaaagtctgctatttctgtggaaatttccctggtgtttagatgattatataccaaatattccttttgaaaacgaatgcataattaagcgtgatgggttcaatcgcgtgaaatgctagttgttcaagggagtggattctaactctcgacgagacatcccctcgttgtttacatgtcatccaaataattatgaaaaaaataaaacaagatagattaatatgtgataaatcactccacaaacatagttaaaatttaacttttacaagttgcaacgaaaaaacaaattaaactattgctaacttgtactcaaatttgttttttttttcattgcaacttgtagaagttaaatttaacctctcgctgcagccacatggcaaggggcggcgcttcacgactggattgggccttcacggccggatctggttatgcaatgcggtagtggccggatctagccgaggtcgagtaggaggtgtgtcgcggctggcagctgcaggatgtcggcctcgggcactggctaacggcagcaagaggccgatcacgggcgaggtcgcggtcggcacggccaacagcgataggagggaggccgcgggcatggcgtggagcggtgcgtctggccggtggcggcaggagggcggccgcgggcatggcgtggcgcggttgcgattgtggaggttagtgaggacgacggtgagcgcttaccgcccgcaccgacagctagggatgggcattcggtctaaccgaaaatttcggtctcggtcttcggtcttttggtctttgaaaagtgaagactgaatttcagcgaaaaaatgtcaggaccgacaaattcggtctcagtcttttcggtctcggtctcggtcctgaccgaaattcaacaacattttcatatatgaaaagaaataatagaaattttcaacacaaaaatcacaaaaaaaaaatcgtaagcacttatgagtaaagactcttattaggtttcatgcctagaagaagtagggatgtgaaaattagagtttaatcctattaaacatagtggattgtaggttgtatttagatattttttttgataattcagtctattcggttacccgaggagactaaccgaattaactgaacaaaattcggtctttcactgcctaggaccgaattgatgaccgaatttcttggtctcgatctcggtcttttcggttcggtctttttctgcccacccctaccgacagcgggggctagtagcaatgccgtggcaaatatgtgagcttccggagtcagttcgttcttgctagctagccatttccatctccttctccaggaaacacctccccggctatggtcgactcctttcgattgtggggagctcttttggtgagatgtcggcaatggcgtttggaggacgatgatggtgatggggcttttgtcgtgctggtcagcaatgggagccgcgaggttccccatgacctgctggcgaaccggtggtaatggcggctccatttcttaggggacgatggtggctacaatttaggatagaaggacaacttggcacgatgtggttaaaagtgcttgcttgcacacttgagagcgggcgcaacatcggtggtggaactgtcctcacagcacattggtggaggccaaggcgaaagcatggacgctacgggcatcgtcgtttactcgttggaggcgtcctttttgtctcctcgtcatgccgtgtttggattttgtgggtgtaaacctagcccaagatgatggtggcgtatagcttgacgtcgtgcctcctgaaggcatattaatccttggcaatttcataatcatgctccactttgttatggacggcctttgagaagtcggagctgctgcgtcgaggtggttgatgagtttggcaacaatataaatcggaagttggagctgctgtgcaggtgcgaatttggcaatgatgacccaagtaggacctcgccctttgagttttcgctctagtgtggggtagcaatgcaagcttgttggtcggcaagcctttcctggccttagcgtttcctagcgaagttggagtcgcctgtgatggtgtgatgacaataacgttgcgtatctgcctttgcgaggagccttgtttaatcttccaacttgctacttcattttgcaaggtttgtggtgaatagcatttgttgaacctggcttttctgtttttcatagccttgtagttaagatttgccattttctgtttggtacaatagttgtggttttcacatagtttttcctaattaacaatgtaatataaagtttggtctcgttttcttcttaaaatgagacaaatacttctttatataaatgtcggcaatggcatgacctttttttctaaaaaaaaaactatttgttcacacgcgcgtacatcatacctcagtacacatctttatttattccaaactagcagcatactaattaagaatcaatacagcttataaatatatagcctacaacacatgatttattattgaaataaaacatcattagaaatacttgttccgggacagatctcaggtacgcataacataactatactgctatgcgttacaacgtgtgtatgcttgcatgtatgcaatatcgtattgtactatacacgcagcctatatatatgcgagatttattcaatgcatcgtgaccttggtgtactttgtcaagtcggtgggggcctgcctgttggcctcgagtggaaaatagaacgggtagatctcgtagcgcacccaacagctactatagtcaatctggcacccctgcccactgccgcaggcctcggcaaacttggaaaccgtcgttgacaggcattgtgcgcacagtggtggtgccagatcccgcgtgcattgtgccaacgcatagacgttcacgaatgatgtgcactgctccttcgctctgcccagcccaccgctacccatcgtgacagcatgcgctaccgctttccccgtcgcctttcctactgccttctggaacgccatggggttgtccatatccggccattgcctcagggtcacacttgcgtctgtcctcgtgtccatctccccaaagaagttgaagtcaacgtaccgcatgaagcagtactcatacctgcaagtacatatgtacattgcccgcacaagcacataaacaaaagaacgttaaacaaccagcatgtaaaatctataatttttgccactcaagtttgctctccggttccttcaattttgatgttttggataataacacggtctaaaaaacatatctttcaactataatttattttattataatatacccaaaatataagtaaacttttaattttatttaagcacttcttaaaaaccgatctatacattatgttctagtgttctcaaactaaatattttaaagatcactaatagttaaagtttaaattgtttgaccttaattttatccaaaacgttgaaaattatagaaccgaagagactatatgacatgtagaattatgacacacgcataccatattctggagtctaatgtatagttgcagttggtgaccatctgtttggcggcttgggcgaggcaggcgtcgcagtcgccgccggagacgtcgccgcggcactgcgcgaggccgtagaaggcgtcgatgcccctgccggcggaggaggtggcgaatccgccgccggcgcgcgccttggcggcgaggtcggagacgacggagttgatgctgcgccgcctggcgatggcctcgccgctgctcatctcgttgtagctcggattccagcagaaggtgccaatgggagacatcgatatcgtagtagccatggccattgggagcaacattgcagccaacgagagagcaactagtaccaggcagcaatggtgcgatcttctgcttggtgacgccatggatgctagctccaattacttctcacactctcacttcaccttcttgccagctactggagtagtagctagagatgtgagcagatgtgtgtggctggcttgggttcaatcgggagcagtggttggagcttataaattaagacgatcgatcaagcgcgcgcactggattggatgggaaattaattaagagagatcgatatcatgtgcttgcgatgcagggaatagtacaggacatagtatcataatccttattgcagacttgttttgactattctaatggtttctaatgtcgagtcagccatgagccatgctcgtccatgcactggcagcgtgtgggcacgaatgttactcttgcagacttgcgtcgcggatatcgtggactagctcgctgccgacctgcttttcagggactacttttgccacagggttttgaatagaaatttcggatatttctaacgattattttttaaaaaaattaatacatttttactgaatttgaataaattatgatcaaattctcacaatatttgaaaaaaattgaatatttgccggaccgcggggggggggggggggggggg

SEQ ID NO: 7368 - DNA, 42243 bp, Oryza sativa
  unsure (1)..(42243): unsure at all n locations
aagcgcccacatcagtgccatgttagatcgagaccgagtcaaattagtcacgtagacgccacgttagccaaaaccgccatcgaaacagccgagggacctaatctgcaccggttttgatagttgagggacccgttgtatctggttttgtggttgaaggacgtaaatcggattcgttgacaagttaagggaccttagatgaacttattcctatttggcatggaatatgcggcctgtgatccagcttgttgggccaaatcgctgcgaaggcccagtcgctacgcacctacatttcgatcttatactttggcattttcttttttaaaaaaaaactacatttcgattccccactttgcaactacaggtagtcattgcgtgtttgatcactttgtcatcgtttttaaccctaccaaatttgagtattactaaattttgataagacaacaaaataaacatattcttgtcactactatcataccaaattttgtagaagtcgaaagcttccactcttaaaagctctattggtaacaccaaaacatatcgaaaattgataatgtcaaatattggtaggcttaaaaatgtaaacaaagtgaacatactctgtttctgtttttttcttattagacgaaaccttgacttgacatagagggtccaataaggcttacaaacactatgtaatctaataatctcagaataacacgtgtccaagataagtgacttgtaactagtagcatattgtcggttcgttgccataggattttaattgaaaaaaatatcattgtacatgtcatcttttaatttgtaaatatatttattattgagatgtggaccctttagccccatattatcatttttttcttctcacaaaagtagaaaagtaggtatgtagtggggggtgattgacatatgggcctcacaatttagttttttcttttcaaaaaaatagagttagtggtgagggtgttataacagattcaccaccaccctactcctttctaaaggagtatttgttaaagattcaccgccaccctccttaacattcaacagaaaatgcctctaaaaatttgtcgaatataacggtagtacaattacaatatactacaactaatatgtaatgtaagtaagatgtaagcagtggtgtgtacatcacaattcacaaaaggggtcataggttagtggattggcgtgcgcaagggttccatgtgctgcatccacgttgactatttaccccatccctgctagcacgcatcttcaagcccatctaacgatcagaaatttaacaaatattctcccaaagtttttgttggaagttaaaatagcaaatccgagagatatgtgaaccctttggctctcgtagtgttcttttttcttttcatagaaatagagagttgatggtggaaatcgttgacacatgttgctaactctctgatctcacaatgtcaatgtttttctttaaaaaaaacatatggagtttgtagtgagggtgttggcaaacttaccaccagtaccactgtccaatatccgctcatcacttattactatcttcgtcctataataatatactaacatagtacttactgaatatgacacatcttagtactataaatctaattagtctttctgtctagatttatgtcttattcaatattagattattttattttgggacggagagagtactagattaacaatgccactatctccacacaaagaaaatactctcttcatactcataaaggaagtcgtttaggacaatgtttaagtcaaaccttgagaatataaattatgaataactcttaagttgttgagtttgaaaatgtaaaaattatatgtatagatttgtcttgaaaaatacttttataaaagtatacatatatcacttttcaataaatatttttatagaaataagaagttaaagttgtgttttggagactatgtcgctgtcctaaacaactttctttataagtatgaagggaataatggacacatagggatattgatagtatttcacaatacaagctagggccggaattatgacgcatgcacgcaaggtggttgaccattcatcaataaatctgatattgatcaattgatgtacgtggccagccggaattaattggatgctgcaggagccttagtctctagcatgcattctattgtattgcaacgtctccggcccatcccgtgcatgaccacctgccaatataatggacccaaccaaattttgtgtagagaagatcagcatgcaataaatatttacttcagattttaggtccttcacatcatcttgtacatatagagagctgggtgcaaatgtatatagtccaaattaagcatagcacactgtttttttttttggccaagtctctctgttttccatatttaagcaattcaggataagtgactatttaagctagcaattcaagaatcaagataataagtgactaaagtgtcccattgtttggcctaaaaacggcttattagtaaaagaataatttataggtaaacttttatatctatgcccttagttgtttaattattaaaagccaatataaaaaagaaactacgacaaaaagaacataaaatcaactccaaatcaagttcacttaaattttgacaacggcatataagctatagagcaaataatgagaggttgaattgtattcacttttttgtgctattgatgacgcattttactctgtgaacagatcaattcacagctaggttcatatataaatttttagtgcatgtagctacggaaccaactccaaataaatctacatgtaaaataaaaaatttaacaaataaaccacatagatgtgaaaagtaatactataaacgtaagaaaattgcttgtcctttttttacttcattcaataaatcaccaacctcaaaagtgaacaagaaaataataaggttcttatgacattaaagttttgataatacatgtaactaccggagtagaatatatcctttaatccatccatcataatcagttgttacccagcttgcggccggtgtggaccacagcatttaagatttaagctgaccttcataacacataggccatgtgacttgaaatgtcgcctttcctaccttcatttcaaacaaaagcataatatgtagtgcacggtgcacccatcaaattataaatgatttcaattgaagttagtgtgtatcaaacctgaactctggatattgcatgcatattaagttggagccgatattgatacaataaaactctataataacagtaccctatatatagtaatacgtggaaaaaaccattgttgaacattccttttaaaaaaacccctggtaattaataaatatatgttttagtcacgaccactgtggtgtggtggtggagttgtatatccatagatatccacaaatatagttgtgtcatccttcgatgcagatcaagcgaccaaaatactttttctgaaataagattgattagatatttaaatataagtgactattacaagattaattatattaaatatgagattattgcaaccctactatctacatggtaaatctaaaacttctgaacaatttattggaaaaaaataaactagattccgtcaagcatattccgttttcttgtagtgaattgagattctccatctacaaagatatatgcatgcgcgccatatgtctggtcaaaattagagttacgtactcctacaattaaattatgtatataacgcacttagatatatgcatgccattttgctgttcattatactatttggtcaacactagtttccaaagtgctttatcaatcatttttaaacagtataataaaaagatcatttgaatttattgtcaatttcaaaactataaaatagttaaaattaattagttcatgttgatttggtttgtaattttttaataatacataaatcggccgttgctgcatccgagttggtttatatagaccaataatgattattctagctatatatttttcatatataccgatgcgtgttgtataaacgtagaactgtaaaagtttgcatgttttatacagtatacatataaacaggagtatatacgtacgtatacgtactccatcaatcggtgtagtagagagatcgaaagcaataaattctggacctaaaccacctattaattctttcaccacaagtcatgaacagctcacaaaaacggctctgtgcagtaccggccgctcctgttgctctgcctgctgttgctgataaaaaccaaacacaccacttaccggctgtgtgtttcttctccctctttttttttcaccctgtcttctcctgtatatataatatatacatgtgtccatttacctttaggcccggtttagttcctaaacaaaattttttcaccctatcacatcaaatgtttggacacatgcatatatatagtattaaatataaaaaaattaattacacaaattacgtgtaaattacgagacgaatattttaagtctaattgcgccataatttgacaatgtggtgctatattaaatattttgctaatgacggattaattaggctttataaatttatctcgtagtttacaggcagaatttgtaatattttttgttgttagaatatgtttaatacttttaaatatatatccgtatatctgatgtgacacacaaacatggccttaattagttctgaaagagcttgctactagtgtacgtacacgttcaccctccatctataatctgtttagtctttacagtatgctacgtacgttgacacgtacgtgcagtacgtgtatatacatatggtcgtgtgtttgacatagttctagatttacgaatattttttagagttgtgtatcttttgaatatttttttagagttgagtgtttctgttccacggatttatatatttaatttggagaagtgatcatattgataaacattttcatgaatagttttgttcctattttggagaaaatatagaattttaaattgttataatttaacttgcaaattctaaatttgacataccccaccacctcacctgttcatgccatgcaattgcgaggggttatattgggattattggaaattagtactgtaaatccctaattctatttttatgttcattgaaaaagtatatctctatcttatatatgcaactagatgttacccactactacataaatgatctttgcagataccccttttatttttacaagcagaccaaaagaacatccatatgcaaaatgattttagggtgtcgagaaaagacccgcttggaaaaaatgattttcgtaggtgggctccttaagagccccgcctgcaaaatatagttacttcgcacacggacttttttgatacctgggcaaaaatatagcatcggcttccctctcctttaatttctctcctacgtacctctccgcttctcttccactcctctcccttatcctcatttttctccactccgatctcctcatttctcttagtggcagcgacaagagacggaggcagcgatgacgatcttctggaggcggcgatagcgggtgcggcgctgggtgctcaacgatggaggtttgtgaaggcggcagcgacgatggcgggcgcggatctgggacctcggtggtggtggatctagtgctcgaaacctcagcgacaacggatctagtgcttgggacatcagtggcggcggagctggtgctgccggcttcgggagctgcaggacctctggcaatgatggcgaacgatgctcaggagctctgtgacaacgatgacggaggcaacaatgggctgcggtaaccacgacgactgcacttgtgaatcgaggctatctagggtttcaattttgggattttttgtgagttcttttcttttcgcatgtggacggcttaactgaccgccacgaaaatcgcttttcgtgcatggatgccctacctgactaggaaaataccaatttttacagacatgtatggggaggcggcccacccagctgcttgtgaaaataggttttagccgcttgcgaaaatcatttctgtactagtggtgtcgtttgttatacatgtgaccaatatatttacatattttgttgtagtatggattttcacaccaccaaccttgtatatggtttttcttcttcttccatcgatgtggtaattattatgtctccaaagtaaattatggtttatttgatggaactcacacattcgggtttaagtatccaactcagtatatgtacttgtgttacaactatattttttcagtggtaggtgatacactcatcaacagtgaggtacttagaccctgtttagatgggactaaaacttttaaatccctatcacatcagatgtttggatactaattataaatattaaacgtagattattaataaaacccatccataatcttggactaattcacgagacgaatcattgagcctaattaatccatgattagtctatgtgatgctacagtaaacattctctaattatagattaattaggcttaaaaaatttatcttgcaaattagctttcatttatgtaattagttttgtaagtagtctatatttaatactctaaattagtgtctaaatacagagactaaagttaagtccctgatccaaacaccaccttattgtgactccataaatcttaagttatggagaaaatcccctgtgtacccctgaaagttcacctaatctcttctatacccttgaattttgctcaatcccttggatacccctgaattttagtttggatcccttccatgccctttccgctagttgaccgttagttgaccgttaaattcttatgaaaaagtccattttgccctttggtataaagaagcatataaattaatatagtatattgttggagcatagaaatgtgttatatgagactattatgtttatgagatagttatgcaccatattatttgcgataaatatacttttagatatgacataaaaagttaattcttatttatttttttagcatatgtgttctgatagtaataaacaaatatgttatattactatgaaaacacatatgctacataaaagaacttttaataactaataaataagtattaaatttttatatcatatgtaaaagtaaatttgtcacaaataatatggtgcatcacagactcataaatataatagtctcatccagtaaatttttacattccaacaatgtacttcattaatttattatgtttcttcataggaaagggcaaaatggactttttcaaaagaatttaacggtcaactaactgtcaactagcggaaagggcatggaagagatccaaactaaaatttaggggtatgtaagggattgagcaaaattcagaggtatagaagggattaggtgaactttcatgtgtacgtaggggattttctctaagttatacgttcataaggatcaggtctgacctagtcgattagatcaactatgtgtcaacgtacgcttgtaccgtcaaatgagaactatggtttcttttagtcttactttaatataataatcttttgtacgcagttgcccctaccgctcgagatataaatgcatgtgagttgtatacaactaaattatatttattatatacatttcagtttcgactaaaaactttttaagttattattggctagtctctgtcgttcgtacaagcctcttattttattttagtaacccacttcttttttttcacaactgtactatactagagccatccccaatgcaacaaggtaattttaattgatgactaaaatagctaatatgataacacattgtttcatgtttgtggttttataggcaatacatataaggaaacagcgtatagaaggtttcatctaagatacaaacccatttcatctctcacttcattattattttttacacatcatccaaattactgatatggagtagtacctaatttaatagtagaacgaaacttgtattggaagtgtcctaattggcgactcttcattctgatctaaaccgcatgcacgtaacttaaaaagttatccaattccataaaaatggtccaaactttttttattaagatacaaaggtggtgtttgaatctcctgaaaatgaagatgaagatgaagatgaagattaagtattttacgcaaaatgaggtgataataacgtgtgattaattaacttttaattattacaaacttgaaaaatgaattaatctgatattttagaacaactttcatataaaaagttttcgcacgaaatacaccgtttagtagtttgaaaagcgtgccacgaaaatctaaaatttaatcaactccttgtagtaaaatctaaattttacttatttttttaactgctaaactgtacattttttaacttaaaaaactttatatatagaagttgctttaaaatataaaacaaatccattttaagtttaaaattattaaaacttaatgaccttcttgttttacgtgtccatacttaatcttcatctgtagtgaatccaaacaaactagagaagaaacaaaaaagagatcaaaaaactttgcatggtgtatgataaatactgagctagtatccgtgtagtgtaagagggccggtgtcagacgtcactgatgactttcagcaaaacgtacgataaaaccgcttatccatatatattattacactacgatctaacgactataaccagtatactactatatatcggtagatatacatattacgcaccaacgaaccaattttcccacgcgcgcgccaggccatgcatgacgtacgaactgccgtatacatctacgcgtatgtacgtacacacctactagacacgtagtctacatcgtataccaatctctctctaccactgctagctgcgagtacaggagagaagagagagagtagagagatgcaagaaggggcagtgcgtgtcatgcaataactccacgctacgcccgcaatgaatgcccattgcaccctctccgctactctccccgcaattactccccccctcttcaataccccgcaccctccaccctcctcacctcctccccctcttccttcttcctcctcccgccgccgccaccgccgcactcttcttcctcctcacatcactccactctgatctctctctttcagacagtagcaagagcagcagcagagagagagagatttttatgtgtgttcttgacgactgcgtgatcggctgtgccgccagatatagatagaccgtacaactgcagcgctagctatatatatgtttcgagtggggtgtgtgtttgtatatcgattgttgatttgttggtagatctgagctctgcgagtgttgcttcgtccatggtggatctctagctatttagggttgttggtctagctagatagctatatctttctctctctctagtactggtgtgtgcatatatttgtatatgctctgagggagagggagaggatgatgatccctggccggaacatgtcgccggcgatgatcggccggcccaacggcggcggcggcggcggcggcgtcgcctacgcttcttcttcctcggcgctctccctcggccaggtatagtagtagtgtcagatgtgttggtgaaggattatttgtgttcaaatccgtttgatttgatttgtttggtacttagctcttataatgctttgctttcttgttaatttgtgatgatccttctgaattaatcctttgcatatatgtggtaaatcctagaaattaattactgcctttgctgtgctgatttcctgcacttaagtgttctccaccagtaagtgctaagtacctcttgttatttggtgtgtgcctgtcaggcaggctgtcacactgtcatctatcactaattaactcacttcctatgatgaatgtattcaattgtacataccatttacatatatggagttaggccagagagagtgtttagttttcagaaagcgaatgcatttaagtagggattaataaataccaaaagggggatccattcatatacatgagctacttgagctacatacctgatgagaaaaatgtatacatggagcatgcatattaatattggctttgtgtgtctctctgcacttgctgcacttgtaaaggagtagtgatgatgtgcaaaattaaacagcttcagtagtacatatgcaccctactctcttgtgcatagcattaacttgtgccatcctttatttctcaagctgtgttcctccctaatttaggtgctcctttttctcaatcctattttgcaaaacatttattgctttgctacccctggatgaaccggatttttgcacactgtttcctagtcagactcagcactagtaccgctgttgttaatttctcttggtcctatctcatttcaaatgctcaatttcaaacttccccggttttattttacttcagaagctaaacagtgaaattattaagcaattttccctagataatatatccagaattataactctcccttgcattagcttgtttattttgatgtgtgcaagcgcaggagagataatgtgtgtctccctagttagtttctttttaatctttagaaaataaactttacctatcagatttttagtacaagttaattagaacagcaagaagtcaccaatgtcatactccacaactagatatagatcaaaatcacttgtctgcatctccaatataatacatatataatgtaatccaaattatattcacacctagtcttacttaagctgaattacagatatatatgctcgatcatatcatgaaactgcacacagtgcatattttctagaactctagctatatatgaacaattatttgctactctttctgcaatattatccttgactgttgcacagctcatgaatgttaaatcacaatgcagagcttgttggatggacaccaccatcagctgccatcactgctgcagcagcaccacaatggacaccatctgcttgatcagcaccagcagcatcagcatcagcttcccccacaggcgacgacgacgagcgagagcgacggccgtgcccctcgcgacgagctggagatgagcaagtccggtggcagcgacaacctggagagcggcggtggcggtggcggaggtggctccggtggtgatcaggaccccaaccagcgcccccgcaagaagcgctaccaccgccacacccagcaccagatccaggagctcgaggccttcttcaaggagtgcccccaccctgatgacaagcagcgcaaggagctcagccgcgagctcggcctcgagcccctccaggtcaagttctggttccagaacaagcgcacccagatgaaggtaatatactaatccgtgcatccatcgtatatcttacacgtcatgtgaacgtgcatcggttcataatgttgtgtttataaatgttaatggtatgtgtggttgcacgggtttgtatgttgcagacgcagcatgagagacacgagaacaatgcgctgcgcgcagagaacgagaagctgcgggcagagaacatgaggtacaaggaggcgcttgccaacgcgtcctgccccaactgcggcggtccggccgccatcggcgagatgtccttcgacgagcaccacctccgcctcgagaacgcgcgcctccgcgacgagattgacaggatctccgccatcgccgccaagtacgtcggcaagcccgccgcggccgtctcggccgcgtacccgccgctgccgccgtcgaacaggtcgccgctcgatcatatgggcattcccggcgctggcgccgacgtgttcggcgccgacttcgacaagccgctcgtcatcgagctcgccgtggccgccatggaggagctcgtcaggatggcgcagctcggcgagccgctctgggcgccggcgctcggcggcgaggcgctcggcgaggaggagtacgcgcgcacgttcccgcgcgggctagggcccaagtcgccggagctccggtcggaggcgtcgagggagacggcggtggtgatcatgaaccacgtcagcctcgtggagatgctcatggacgtcgggcagtggacggcgctcttctcgagcatcgtgtcgcgcgcggcgacgctggaggtgctctcgacgggcgtcgccggcaaccacaacggcgcgctgcagctcatgtccgccgagttccagatgccgtcgccgctggtgccgacgagggagacccagttcctgcgctactgcaagcagcaccccgacggcacgtgggccgtcgtcgacgtctccctcgacgggctccgcgccggcgccgggggcggatgccagccggcggcggcgcgcggccaccggcgccgcccctccggctgcctcatccaggagatgccgaacggctactccaaggtgacgtgggtggagcacgtggaggccgacgaccagatggtgcacaacctgtacaagccggtggtgaactccggcatggcgttcggcgctcgccggtgggtggcgacgctggagcggcagtgcgagcgcctggctagcgccatggcgagcaacgtggcgtcctcgggcgacgccggcgtgatcacgacgtcggaggggaggcggagcatgctgaagctggcggagcggatggtggcgagcttctgcggcggcgtgacggcgtcgacgacgcaccagtggacgacgctctccggcagcggcgccgaggacgtccgcgtcatgacgcgcaagagcgtcgacgaccccggccgccctcccggcatcatcctcaacgccgccacctccttctggctccccgtcccgccttcccgcgtcttcgacttcctccgcgacgactccacccgcagcgagtgggacatcctctccaatggcggcgtcgtccaagaaatggctcacatcgccaatggccgcgaccacggcaacgccgtctccctcctccgcgtcaacgtaagatagctcttcttcctataaaatggatgatgaatcgatccatcgccattgctgatgaagagaagaataaaataatttggtgcagaacgcgaactcgaaccagagcaacatgctgatactgcaggagtgctgcacggacgcgacggggtcgtacgtgatatacgcgccggtggacgtggtggcgatgaacgtggtgctcaacggcggcgacccggactacgtggcgctgctgccgtcggggttcgccatcctccccgacgggccggacggcggcggcgggtcgctgctgacggtggcgttccagatactggtcgactccgtgcccaccgccaagctgtcgctcggctccgtcgccaccgtcaacagcctcatcgcctgcaccgtcgagcgcatcaaggccgccatcaccggcgacaacggcgtcgcgccgccatgcccacggtgacctcgccggcgtgcccatctatctgtccatcatgtgcaatggtaagtgagatcccctgatcattacagaacgaaatttctaaaattctctcaatttagtaaaattgttcaaattcagtcaaattttgagccctattcagtgttttttcatctgcaaataccccttttcttatttcagcaagattgaactctgctttaactattcctacaaaattccagcaaaattactaagtgatcaatttcttgaaatggttttctctgacttaatttcataattcgcatttatgatggtttaaatttgatcgaattttgtgcaggggatcaagggagggatcaagagcgaattcggaggtttagcaatgtggggagtcaagaacgcaccgcagactactgtccttgcaaaagtgtagttgctgcttcagttagctagttcatttatcattttttttaatcactatcaccaccaccaaaaaacccccagaaaaattaatcatgagtaaaaaccttaattatccaacacagcagcaacacaacttaggtcctgtgatcatggctgatatatatacactacatatatttatacagtgatatgtcataggctctgagttgtgttgctctcaacaaattcctactcatcatccaaaattaaatttgcttcagagttcagacaaacacattgcatccaatccatgcatatgccccctcttatttgatttcagttaggttagtttcagttaagttattaatgatctgtcacctgcattacatggctcatcaacagttcatcagagttaattagttcggaagcaagcaacactttgcaaggttggttggttggttcgggtattgactcctctttctctctccgggttgccactctctctctagaactcctcttctgatgcaagatttgttaatttcatcatcagctggactaatgcatgcatatgtgtactgcatagtagtacctttaaattcagtttgcaaaaagagtgtgtatcatgtttgtgcttaatttgctctccttgtctattagattgggcttaaactttgcatgcatttggagatttgcagaagtctgtcttgtatcctctctgtgattctcatggacagttcgattaattggactacctttttgcatccatatctaaagtctggctgagttgatgcattttgttttggtgtatatctgcaggtgttcaatgatgtttttgtgtgtgatatgaatgatgcgatattttgatgttgcttcttgcacaaagtcagatatgaaatgatgttttcctagtatatattttccaaagctacatctcaaaaacctacacatgacacatcacccatggttagtcttgcaagaaaaggacattttctcttttttggttcagatgatgctgtcaaagcataggaaaccatgtgtatctcaaaaacccatacattacctattggttagtcttgcaagaaaaggatacgtctcttttattttattcagatcatcggatactgtcaaaacctaggaaatcatgtgttccaaacaaaacagatcaggagaatcaacaaccatggcggcggcagcttagctttaaagacagttaagccatctcaacttaaatgaaggccctaacacccaacaaatttgttggtttagtcagagcaggctgctgtcacagtgtcacctgtcgacatctctcactcctgtacaaggaaagatgttgttcaagcaatgcagcagctgcagacagacagtagcagcggtagtagtaggttgtacattttttttaagatgatgttagtacattttttactactagcaaaagataaaacttttaactaattactagcaaaggtagcgtagtgactcaaccactaaacaaatgtcacaattcacctcctctttgttcctttcatcatgttcttcacaaagtaacaagacaactgaagattcagagagaacacagcatactacggagcaaagctgaaaagatatgctgatagaatggagaaagattggtgtttatttagttatatttaccaactccgccaataacatcattcagatacaaagacaaacaaacaaagatactcttgtagctaatatgaacttccaagcattattggtacttttttatccaaataacaaagctctaatcaattgctgctgttgtattgcaccctttcaaaactgctcatggaaaagctatcattttttagcccctctagagttttttcagacatcaaggtacttgctggctgtgtggacatccttgtctcctcttccactgcagttcaccaccaccctcacgccgtcgggcagcgttgggcagagcttctccaggtaggcgagcgcatgggacgtctccagagcagggatgatgccctccagccgagagacgcgcttgaaagctgcatgtgaagatagcattcgaaaagggaatagttagattttgagcatagcacttaaagagttagatattgcagcattaatcaacgattgggacatcaactagtaaatgtttatcgttatgtcagtgaagatgtgaaagacttccaacataactttacgcaactcggtaatattttagtactcaggattatgttaaaacaagtaaacaacaatcaagatcaaaacatcaactaaatgtttaacataacatgcatatgtgacagactgacggctagcaaactactgagtcagcaactcagcatgttaagaatttgcctggtcttacttatctgtaattcagggtcactttcggataccctactaactcaacagcaaagcttaatttccagtgtaaatctaaagtttttgtctaacatgtgaatcagatagagttgcagacaaccaaagcgtagttgctctgatatcattaagatggtagaggggccaaacaacaaaattggtgccttagccctgcttaaactcgtatcaagaaagttcagaacattcacaatatatgctactaagaataacagtttttaacagttgttggttctattagcctactcttactcattagcagtccccaccatcaaagagatatactattggcatttatagtagatattccaccaatcaagtggaaggaaaatatcagagaagagaaccgtagatagtgacactgaaacacataccatccagtgcctcctgatctgtcacgctgtcatattcagcacgtccaatatccttcaaaaagctatgctcaggcccaacaccagggtagtccagcctaccattcaaaacagcatagatgattagcccaactgctgtaaaaatgaattactgtcaatgccaacaacagaatactcacccagcactaatggagtggggttcaataacttgtccatcatcatcctgcaacacatagctcaatgatccatggagaactcccacttctccctttgtcaaagtggcagcatgtttgtcagtgtctacaccatagccagcagcctccactccaatcattcttatatcttgatcatcaacgaactcatggaagagacccatggcgtttgatccaccaccaacacaagcaaccaagacatcaggcttgccaccccacttctccatggcctgtctacgggtctccttgccaatcaccttatggaactctctcaccatcatcgggtatggatgcggaccagcaactgatcccaaaatgtagtgagtgttctcaacattggtgacccagtcacggatggcctccgaggtggcatccttcaaagttgctgtcccagaatgtactgccctcacctgtttcagcaaaagagatcagcaaaccatgttgaggaacaattgtacattcatatcgaaacgagtgtacacgattgcaagcacaaagatgcacaagtttccgtcatacctctgctccaagaagcttcatcctgaaaacattaagtgcctgcctctccatatcctgagcacccatgtagatgatgcactgcagcccaaacctcgcgcacaccgtggcagtggcaacaccgtgctggccggcgccagtctcggcgatgatacgttccttcccaagccgcttggcaagcaagacttgagcgacagcattgttgatcttgtgggcgccagtgtggttaagatcctccctcttgaggtaaatcatggggcctgtgccatcagcgcgcttgtagtgctcagtcaatcgctccgcaaagtacagcggggtctcccggccgacgtaatccttgagaataccatcaagttctttctgcaaagagcaaggtgttgtcaagcacacaactctcttgttatttcataatctccctagcaatcaaaatgactactactacttctaaacatttcgcatgattcaggaatcatatgaagttgcaggcattgcagtgataaatgaaacaaactattcacactattgaaatgcatttggtctctgaaaggcgatgtagctacagctcaaatacagtgataccggtgcttgaagaataggggctccaaagtactatatgtggctgcagttctcggaaagggacacagacgaaaactgaatcttcgtcgaaaaatcaatcggtctcaaaggaagattgattggttctgcaaattgatgtgacttctcccctctaccacaaaccagagatctcaaacacacacaagtatcacgtattactagcgttaatccacacaaaataaaagaagcaaactataagaatataatcgaagcaatcatcattaatccacaaaagaaacaaaatcgacggactaaaccttgcaaatcaacatctccgaccatcaaccaattcggcgacgaaatgaaatggtggcgttttccaagggggttgaagaaaataaaacccaaacgaaatatacttcgcgaatcaaatcgaaacaagcgagcaccaaatccaataaatcggagtggggggaggggggatccagcaccgcggcggttacctggaaatcttcgtcgccggcgagggcatggaacgcggcctcgagctcggtgagcgcatgcatcagcgtctcgggcacgtacttgcccccgaacttcccgaacctcccgaacgcgtcgggcctcgcgaacccccccgacgccgccccgttcacctccccggccgcctccttcgccggcgacgccaccgccttcgccggccgcattgccgccgccaccacagcccccgctcccctcctccccgccgccaccctcaagccccccgcgcgcaacgcccccgcaccgaccctcgacgccgagatcgacgcagcggcggccgcgttagggttcccgacggcggcggccatggattccgaccacgaagcgagtaattaatggatagggaggagaagaggttgagtgggggagaagcgggtacacgaggcgggtatataaaccggtcgcggtaggaattctcccacgcgggggtaggtggtccatggacccggtgcatgggccggcccactcacagcgaggcgccgggtccgcgagggcgtttcgtggaccgggtgcagggggggtcgcaccgggcccaccggatcggggtaggggtgggggcgggtcattcggcacgtgtggcgggggcgttctcgtcagagcaagttttaacagtatagctaactgctggctctaaatcatctatagctaatctaatagtctattcatacaatagttaagtacaaaaatatactacaccattaataccggtcctatctctcatatacacataacgtcttagagtccgtgttgcaactagctataaatctgtagcccgttttcttctctcttctcttttcttctcgatacgtggttatagaaaaaaattgaaaatatacttctttttttattattttgcatttatatacctatgtgacgaaaatttgcacaaatatacctatcccgcagtgtggttacgcgggaccgaggcggtcccgcactaccattccgcgggaccggtggtcctgcagcacggacgcacggtaccgcgtcggtcccgcggaccggccgtgcggtcacgcaggccggccgcgcgtgaccgagcagccaagctgcacatgcatgcatatagcactgtttgacactgttctgcactgtttcgcactgttttcacactgttcatgagccggttccgcacattggatccgcggtaccgctgtttgaacagtgccaaatagtgtcaaaacagtactgatacagtaaaaattgtggaaccgagccgctccagcacgcccgttccgcgggaccgtgccgctcccaaggtgctcccgcatccctgccgctcccgcatacccgttccacgggctgcatcgcttccgcgcaaccgccgtgcgggaccggctcgatcccgcatccccactacgcgcgaccgtgcctaccgtaccgctcccgctaacccaatatacggacgaggtatattttcgcaaatatatgtcgtgcaagtatatttttgtaaattgaaagaaaaaaaagtatattttcaaatttttttctgtggttatagcggtcttatagtgagatttggatgtgagacgtggagggttctcggccgttcatccgtggggacggtgggtgcatcgaggccgttgattgggggatggatgggtcggattggggtcagggtgggttgatccacgtaggcaggatattggtcacgttgtgttgttttttttagtatttgaaagttgaaactagtggatggaaagagatggaaaatggtttgctgtgatacggctagttgtaaagcttgatcgtgacaaaaaaaaaatgaactagaaaagatatttatggctgtgtttagattctaacttttctcattaaacttccaacttttctgtcacgtcaaatgtttggacacatatatggagcatcaaatgtagacaaaaagaaaaactaattgcacaatctgactgtaaatcacgagacaaatctttttagcctaattacgtcatgattagctataagtgctacagtattccaaatgtactaatgatggattaattatgcttaaaagattcgtctcgcagtttacaggcgtaatttgtaattagttttgttattagtctacgtttaatactttaaatgtgagtccgtatacgtaaaaaagaatttgacgatgaactaaacacggccattatctaaaacaaagatatttataccatccacatccttatctctctccaaaattaaatattaggtaggcaaataatgttttttgtttttaataacatcgacacgaggttttttttttccataggataataaattgttcttggtacctttttttcccagcgtggttgtaattggacttttgcataatttctggtatcgtgcggtaattgggattattattttcctttggcttttcccaaaaattttggtacgacaaaggctgtgttgtttggcttattaagattgagtagaaaaacttttatacatatatttttagcggtccaaagacatagttgagtgaaaaaaatgaaaagaagaaaatttaattttacaatatgtttgtaatagctcataagccaaagtccaaacaaataagctttggttgatttagtttgagtttaaattggactagggtacctgtctggaatctagacagtggtcaaagcacagttacacaaagacaagcattccaaattgaattctctaataagggaccaaaaggagatcaatatagtactaatacagtatactagtagatccaaattgcctctaaaataaacctattaaatattcaccaagaattgaattgtactcacagtccagccatttatctaggcaggttcgcatttccaagcagcagcttcacaaaccacatcaaaacagcagaaagctccacattgacactgatgtgtcccatattctgaccattcattactactgtagtagccaagtcatcaattgaagaacaagcgagatgttcttcagagtcacaggcgagagacgacgtagcaaagcggcagccttcttgtttttactaatgttctttggcctctttgactaatcacatcttcagagatctctcctcaccaaccacaacacaaaacacccttcttgctacgccgctgttaaaactggtcaaggtgttcaaagcaaaatttctttttgtttgtactaagctgtcctcctttctgtggtgattaaataaattattcagacatgagatttggtcaggaccagagaccaacaaccgaatcagtgaaaatttcctggcatcttgcattggatggacgatgaatcacggtggctagctagctagatttttccagtttaattggaagaaatatggtacactgctactactacaacaacttcagaagttcagaagcatcagtgcatcagaaggcaggcaccaggaagctcaaggaagtcatacatgcagctcatgttgtcttgccgactttgtcaagcagacatacgtgcagccatcgtagcctcgcatatggatccagcgaataaaattcaggttaaaaatatgttcctaaccctgagtccctgacatgtgacaaaatagactggtagtagcagctagcttacacttcttgtttgtgctgcacactgaaagggacagcacagattagcacaaacacaaccatcgggtgtatctcagcttatgctcatacagatgatccaaagattgtacaatctcatacagaaagcttcatgactcggatgaatattctacaaaagttacattgaggtaacatttggttcagttgccctaccagcaaaatactctacctgtcaaaccaccatagtgaacattgaaattgggaggggaaaaatatgtttgtgattttaatcaaatccctaaattacaggatcctaaactagctttgaagacaaaagaagaatcctaaacttggggacagctaaggctgcttcaatctttctaatacaatgcaggaagaacaggcaccatgtcttcaatctttcttggcatacttgccaacatatgcctacacacaaacacagcccaattagcctatatgtgtgagtttagtttctcaaatgacaagagatgccaggtggacagcgctgagagtggaagctcattgttacctggacgagtttgtttagcttttctctggagtaggacatgtaaatatcaatcttctcttttgtttgaggagtattttcaactgtggtcgtaactttgtcgacaaccttcttcacaattgttttatgaacctctctgctcatttgaccctctttccaggtgggcttaagtgcatccttcacaaagtcagccagtgcaagcttaaacatcttcaacgccttggaatccttgctcttcttgttctcaccatcttcattagcctcagcatcagtgtcctttggttcttctttcttattttctgcaggtgtagtttcattggtcgccaaggcagcagcaggaacagtcggtgcaaccgaatggggtaaaagcagagggttgccattactactaccagcagccattggtgcctgaaatgtctggggagctggttgttcaggtggaacaatatgtgaaggttggaccattcctgcttgttgtaaccaaggccagtgattaggttgaactgcttgaggtgcagcagacgaattgttcatcaaactcgaatttggatcaggctgagacgactgcagcccagaggtatcagcagtcagagaaggaacaaagtactgggccaaagatgcagtaacacgacggacttcttcctgacttgacactgcattgtgagaaagaggagctccagccatatcaactgagctggaactggccaccactgataacccttgcaaggtttgactctgagtttgctcatttggagcaacaggctggaaattatgtgtgttttgcaagccttgatcaccactatctcggcccaggttgggtgtgtcacttgttgcctgattctgcccagcatgcacgattgttggaagattctgtggaacttgaccaacattgaaaatttgtccattatgcacagagagatctggtaatgattgtgcccccataatgtagccgtgttggctgtgccccatataaggagcaactggctggctctgcatgctaggagcagagttatttgtagttgcatgaggaactgcaaactggtcctgcctatttggatgtaatgaaaagtcactttgctgaacttggctattcaaaggcactgaggatgtagtattctgcaattgggtggcgcccggaagagatggtgcagcagaaatttgagaaattgcatcttggctctctgctttttggcccaagttatgccctcctaaaagattagcagaatgcatcccgatttgcatactcaaattgccaacggttccaggtccactctgaccacccatgtcagataccttgtcaatgtttatgctctctgtgcctgtttggacagaaggtatgaactgtggcagttgtgaagcagctatttcaggtttgttttgccctactgaaccaaaatcatcctgagggaatatctggtactgactacttccagcatctttggaatgccggtttttgttctcatatcgagaatcatttctgccagtaccctgaggaacagggttttctctgtcatctcttgacaaaacatgagaacttgcctgcacagaattattttgttcactccagctcaagtaatctcctcttgttgtaggcccaccagtgtaaccaggctcatcaggtgcacccagtcccatttggctctgggaagcttcctcgtggagatatgggcaattttggccacgacggcatccaccgttagcaaaaaatttgcaggggtttttatttgttctacggtgctcagtcctgttcccatatgatgaatcagggccacttctaccaatagcattatctctaacctcatctctccatccaccatgaggggtggaatcatcatgaacatatcggcaattcgcacccctactgcatcttcctttgacaaaatcatggcatggcatcgtagaccgatactcccttcgaggttcagatctttcccaagttccttcatcataatggccacctcgaggtggcctattccttaaatagtcatcttgttctcgtggatccatgaagtccctattctgatgcccatacttttcccttgaatctacaggataatgctcatcaaactgcctgcgcacaccatcttcatgagggaacctgcaatttgagcctcttctgcatctaccagctacaaaatccctacagggaagagcaggtcctccagatgatctgcttctctcaaccctccattcagatccacggtcactgaaataaggacttctgcttctgcttctgcttctacctctacctcgccctatgctcctgcttctacttctagaacggcttctgttcctgtaaagtgtaaaagaaaacaaatatattaaagaggcagggaaaagaaactagtaaattgaatttttcattagaatttcaaataaatgtattccatagaaattgtaaaaacttcttatgtgagcatcatctttgacatttatagaacaaacaaaccatacaatctatcttggatatttcattcttgataaatttcattttaaaatcatctccaacagctgctacacaatatacaagaaaaaagttaccagttgcacagttaattaaactaattacttgttcaaacacacctgcgtgacctgttccaaccacctcttggagatagtggactgcgacttctcttccacgcatctggaccagatgatgatatcctagaagaataaccacggctaagagttgtaccccacccatcaccacgccttctgtcatctgcatatctgctcataccttggttaccagctgccttttcaaagcctctgttgtgccagtcatttttattatgatcctcatcacccattctaagaggcaacctttcagaggatgccttggatgacctttccttgatatctttgttgagtccatcagctcgatcctgctcatgtccagcgctaccatggtgcatagagacagtagatttgaggttcagagattcaccaatttgcttgtcattaccatgaccaaaatcctgagaagggagcaaatcactgccctttctatgatcatcattgccctttttatgatcatccatattcataggaagagactcatcttcactgatctccactatatcaggaggtccttttgtatcccacttggaccgttctttccttgtttcaccagtcattttaacccttctttattagtccaacaaagaagtagttcctggtgcacaacctcctttcccttatccgaaagtactcttgtcggtctatctgaaataatcaaagatcgtttgcatatattataatcaatggaagaatagaatacttcaacaacaaaagtgactgctgcagtatgcgcaaaagatatagctttctcaaaggacatgattcagaaacatcaacaaagttgagacacttaacaactgactgacagctgtataataagtaggatccaggatcaagtaagacatatctagtaaaagaacgctaaagccaggaggggtatactgaaacagaccttccactatcaaggattcaaggtaaccgcctaagtggctaaccactctcattatatagatacaacataagatatgtcccaaaaaactaagaaaaatttcttattgtacaagttatatgccacctacactttccaaattttagtcatacggtacattgcttggacatttgagtggcaaatcctcataagaatcaattttaggggtggcaaataattgataccctcaccaaaaagctcaggacatacttttctctggtatttttgtttaattgataccctcaccaaaaagctcaggacatacttttctctgtatttttgtttcatttgttctttgtaggcaactacgtataccaacacttgttgaagggaattcacaagcactcaaaccctagtgtgcactatttccatgaattatttttgaggattttcaggaactccctcgtgtcccaacaggaatgtgagtagttatcctctagagcgctttgattaccttccccacatcagactacagtcagcacatctatcttgcttatttctaagatcaaacaacaggacactcaacaatttagcaacttatcaacatgtaccaaactgaacacgtatttttgccagcaattgctgaaacttcagcatcacccatctgcttccttgtacatgtgcgtaagcgggttgggatattaacaccatactgcaacagtataaagtatagtactatagcctgcaatttccatcagtacgtatttcactgtccatttgaatgcccaagaaaggcaataagtataaagtatagcctacagttttgtcctgtggaatattagaatagatgtttttttagtcagtaaagtcgattgcccatcttccaaggatagtcgtgactgtcatttagttgacttcagactgttattactatatataccagttacttctactgctagtctgctactacttgctgtgcccaatggacccgacaatcctctcatcccccttttcactcaatgggctcgataaaccaggcctgccaagcggcaccctgtagctgcccttgctccaatgcgtcctctggtgccaagtcaaagtcgtatccctcaagtcgtgctccctatccgatttatcaactagctgacgattagtcacacggcttcataaaagtagaatggaataattattatagcagatttagcacaactaagcatgcgatttgaataattggccagaactgtggagattggatttggcacagtcaaaaggtggagaaaatgcccaacatcaagattgcacacaatcacacaatggaaaatgaaccttatgcagagataagaagcaataacttttttacagcaggactgtaagagtcatcagacttgtgaagaacttataaattccacacccaggtacaaaccagtgttttttattcatctggcatagttcacaatcaaaaaccatggaatacttcattcaacatatacattataaccactcaaataaacctatacaacttacaggtaaatatatgacaagaatgtttgctttctacacttacaggacggctaaatctacaaacacaacctaccaagaaaacaatgtcaagcagtaattgctgttatctggggcatcaacagattgcaccaaaattctccttcatttactgtgttccagtgttttgccagacttggtcgatacttaaggttcagttgttactgtctctgattgcagagaccttggggcactgatactactcgtattccactgaagtttctccctcgaatgttgtgttccagcgattttgccgacttggtggcaattaacagttcaattttttttctttatataattgctagctatagtcttgaggaatggagactaaaccaaaagggcagacactccaaaaagtggcatttacataatcctgcatgtgagaaagataattctatcagctcgcatgaattcctatgtcccctcacctaccacaatcatctcccaattctagcgctaagcacatcaaaacgctaaccctacattgtctaaagaatccaagaagccaaccatatagagtcgttttacatggaccatatagctagcatgtcatattccatctgatggttatctaagcaaaaaagaacacaacagttcttggtttcaactttcaagattaaacaataggcacaacattggtcagtaaatttgggtgcattaacagtgtatttgcatgcaattctaagaatggaaaagcacatacaagcaagggaaacagccaacaatcaccacaaatgaaggaaacagaaagatgacacaaaagagaaccacaagtccacaacagcaagttaattaggggttcttcacttgggatctacatggtttgctaggagcccttctttcagaaggatggtctacagactgtattacgtcaatgcatggaacatcgagaacttaaggaaacatgacaagcaagcaaggttgacatactctacacatcaagaaacaacaggaacaggatggcactgtagtatagaaaccaacctgagagactcagaatgtgaaaggtgtccaagcctcacaacacagcatcggatcttccagcttaaatcacaggaccataccgcatttgcttttcatctgaaaaaaagaacgaagtttgtcatcattcgccagtacgccacataataaatcgtgtttgattagtattaataataggcacaacccaggtatttatccattaatctcatgaagaaaaaaaaatgtgaaaagaaccctaaacccaacgcggctcccgtatagagaacatacacatcaagacagaaatttccaatccagacacgagaaactgtcctagcaacatgaagatctaactcgtacgcagctatacctaatctaaccagaaagcaactccacatagtcaactcgaagaatggagaatacagacccaacagattgcaatccatccttagacccagccataaaagatctcagctttggggatgcaatcccaaacccctccaaatcccctaatctaacaaaatcaaccggtgctaatctgtcgcagacccacacccgagagtcccaacgcacccaaatcccggccaaagcagccaccaaccaagctcgcgagcgagcaagcagccgcccaaatcacgcccaatcgcaagggttcacctacgggagggaggaaaccctaggcgcgggatccgtacgggaggggaaaggggaagagggtgggaggggctcacctcgacggagcggatgccggagaggccgcctgacttcgccgccgtccgccgccgccgccgccgccgcagccagcgaaaaccctaattgggagaggtggaggagcagcagcgagcagagcacgcttcgaataacggaatagcgcagcgaaagcactggaaaaagggggaaaatattttattattattattaattaattaataaagcgaagcgagtttgggtttgtaattgggttggagttggatccgattgtttgatgggctgggcctccagtactggatggtatggccctccatttcgcagaattttaacagaatgaaattggaattcatgaaattcacaagatcttgccgtaatacggagaactaattgggcgctcctttttttaatcttgcgattataattgtgggttcagagaaaattcaggatgaagtaattacaaatttgacgaattgatcacaatgaattgaatgaattgaatcggggtaattacaaagttggcgaatagactgcacaaaaatcatccatgatgccaattgaagttattagtaactaattacattgttatgtccgccgccactaatgaatcactctatcttcctaatcttgttgctgcggccggcgtcgtcgtcgtcgccggcggcgacgttcgccaccgccgcggcggccttctcctgcagcttgcggaccacggcggccttgagcgccagcagcttccggcggtgcgcctccacctcctccgccgccatccccgacacgtccatcgcgaccaccccccgcagcgccgccgccgccgcctccgcctcgcgcctccgcctagccaccgcccgcgcccgcgccgccgcgatgggcgcgccgcggaacgtgtggtactcggcgcgcgacccgccggggaagaacacgatggcgtggacgtcgccgccgcacgccgccgccatctcgcccgcctccttcagcaactccatgtgcagcgtccggtgcaacaagatgatctgctgcgccgccccgccgccggcgacgacgacggcgccggcgccggacgacgagctcggctgcggctgagcctgacgcttcttctcaccggaggcggaggcggccatggctgcgtccatcgagcgatctgtccatctgctccccgcggcgagcccttatataggctggcgcgcccacccgtgcgctgccagattagactccgaatccgattacaattagcgctaattaatcgggtgaattaataattgttaataatttggttaaatctcggaccgtccgatccgctctgtgtgtatctgatctggacgcgtggtcgttccgcgtgggtcccacccgttccttatattaactagtgaatatgcacgtgcaaggcacgttgtgctcaacataaattgaattgagcatattataagtataagaatctatttatctacgtgtattgtgtaaatatgacctaggtctagaatatacatacatatatatatatatatatatatatatatatatatatatatatatatatatatatatatatatgtaagtcctagtaattcataatctataatgattaagaaaatatctacaacacaaaatacttttgatatattgttttccattgccaagtcgataaggcagtgacaacacagacagtgattgaggaacaatgttgagctggtagcgcggtttgttaatcttgctatcactaatacttgatactaacattcactcatcaacaacgaaaaatgataaatactcaaaattcaaagaaaaaactccatacacaaaattctaattgattttcatcctcggaccaccaaccaaccaaactgggaagaccaattgttttgtggccttaggaggaattattcaaatcatgctgccagcccacaccccttgccattcaaacttaaagtttaatgccataagtggcagtaattctgatcaaccttataacttgctgaactcaccctaaattcatgaaaaaccaatgacaaaaattacagcaaaacttccatgatttgcattgtacaggcaaatgatacaaaattatctaaaggtatggtacatgttgacttaccccttaacacatttccattataaaaatatactactgcaatatatgggtgtgcctcaaccctttagggtgtgtttggataatgggaaatgaggggtgagattgggattgggaaatgaatgaagagttaggattaaatgtatgagggagaatgaatggttaagatttaaagaggggtgagaaattatttcccttagacatttgccaaacactgccttagcatccaagctgcttcatcaataccttatctactgaacaggcagaaatcagattcagtaaatctcctaactcatcagttaatagatgcaacaatgggggtaaatctctaaattgattcgtatgtgggtgattcagaaagagagagagagagagagagagagagagattcaggagagggtcgacggcgtcgaggaagcccgcgtggtcggcggcgcggccgtgctcggaggggatgacgttggggatggttcggaggcggcggcggcggaggaggaggagaggaggccgagccgaactggcgtcccgccgcagtcgccggcttgtggtcgatctgcaggctgtcaatgctggggtaacttgctgctgtcccgaagcaaaaaacaacaattttccagtgttgaaatcaatgtcatccaacaatccaagacatgtaaaacgttaccactggatgaatgatgcaagaacaatggtaaatgtcagattcaattcagggttctcgttcttgtggagtcactcacattcagatgatgcggctgcgacgagggcacaccacccagcttctgctgctgatacttgctcccgttcgcctcctgcaggagatcaccattgaagaggctgcgacaaccctagctcctcctcctcctcagaccatttcctccatgataggctccctccgtggccgcggccgccgcgtccgccctcgcgctcctcctcctcctcctgtcccgctcgccggtagcacgaggagccgcgtccacgtcatcacctaccgctcccccgccgcctctgcggccgcggccgcgctcccgtggatcgactgggcgcgcacggcgtcgatgaaggcggccccgggctgttgtccttcgcctccgatccgggcagcgtgggtcggtcgctggcgctgctcgtggagttcgctcatggtcggcggcggcgaggcccggcatggtcgggtgaggcaaggtgggaagtcacgcgggcggcgggtgaggctcatggtcggcggcggcggcgaggcccggcatggtcgggtgaggcgaggtgggaagtcacattgtcggcggcggcgaggcctggcatggtcgggtgaggcgaggtgggaagtcacgcgggcggcaggtgaggcgggcggcgtggctggcgtgcgttctttttttcgttctttttggcgtgcagtttcttttttcggagcaagacgcggtgttaatccggtgctaattgtaaccgcaggattaatccggcgctaattgcaatcatggtgttaattacactaaacaactcgtgctttttatattagtctagattagagtccaagtccgattcaattagtgttaactaatcgggtgagttaattgttagtaatagtttggtttaatcctgggccgtccgatccatttgtgtgtggatcagatctggacgcgtggtggtgatgtgatgcaattttccgcgtggggtcccttggttccttcgtaatcaagctagccatgggcccacgtgccagtcagagagtggcttgcgcactgtcgatgtgctgggcccaccagttttctttgatgggcctagatgtaattgggccttggtggatagagaggaggaggagagagaaggagagggagaagaggaggaggaggaggtcgccggcggcgaggagggggacgagatcgccggagatggacatcatctcgcagctgcaggagcagctgaacgagatggcgatggtggcggtgaacaccttcgggacgctgcagcgggacgcgccgccggtccgcctctccaacaactacccggacccgctcaaccccgccgccgccgcagcagcaaaccctaaccccgacgaccccgcccagccgcagcctggagcggcggcggcggcggcggcgggagctccggctgcgcaggcacaggctccgccggcgcaggcccagccgcccgcgctcgacctcgccgagcatcccaaggccatgagccacgcgctcgtcctcgccgccaagaaggtacgcgtcttccgtcgcttatcttctctgcttgccacctgctcgatgaaatgcctgagtgcctgctggttcttggggtctgacgctttagggcttggactgtaatttttggtgtgaccagccttagcatttttgtgtgattgcaaccacggtcagggtgcctggttctttgaaaattcttctacttacagaatcatatcttctatagtgagattgttcatgtagtgtggtagagtactttagttgcattgtgctgttttttagccctctcgagataattttgaatggatctgcaaaataggagcttcactcatattattcctcgcaaagaagggttgacgatgatgtggatcacaccaatctttgtactgttcctcgcaaaatgtaggtgggatgatggtatgcagcacaccaacctctgtctccagagggcaaactttgcatctgagagtacacttgaaatgtgctactagctactgtttccaataccgttctcttttttttttggtttttttatgcagtttgatgctcttgtttctgcgttgccactatcatctgaagaggatcagctgaaaagaattaaagagctacaggtatgtctcagttttgccctctgagcagtacattgtgaaagggtgacattaagctagtgtcttgtgaagatggtatctttgtgcatgtttccttctgttttttttttcctacgccttgtggatggagtttcatactaaggttgtcctccttagtcgcttgctttcttctgaatgaaggtttagcagacgctcggcagcatgtcctgccatagtatcagtattcatgatacttgtgtcctgcagctaaaatgcttatgaatttgaaatgcgcaggcagagaatgaagttgtaggcacagagcttcagaaacaactggaagctgctggtatgctttgctattacattcttggaatattttgccttcattatataattcctcaccatgttacaactgattatttacaagtccagtgttttacatgtcttgttgcttttgtagagctggagctgaagcaagttgaggctctttttaatgaagctacagatcattgtataaacttgaagaagccagagtaatagttatcaatgtaagtttggatttctcccttcactatctcaataaatctttagctttttttgtgcttgcaaaaaattatgcttgcgcttatgatatgggattattttgtgaccagctgtataatccgcttgacttcccaaacttggtacactgtattatcaggaagtcaggatactgataacaattttgttcttatggtgctttttgcagtacaatattctacatgcaccatttactagatggctgttggcatcatgtccatgatcaattattggtttatgtagtttatgtacgatgatggcctgaacaaaacataattatggtggatgttgacctgttatattaatccctcgcaagatgctttcataaaaccctctgggggcttgtctttctgttgatcagaaaattccaacacagtgttgttacgtatgatcgtagtatcactaaaatgacttatgtttgctttcctgtcatatcaggtaacggaacccattttggagtcatgaacagatgaaggtggagatgtgaatgccagctgccgatgctacatgtagactcagttttagtatcaagttagctgatgctcaacaatattccagtagtacttgttggattaggaattaaacctagcactgtaatttacagtaacttgaatagtttcaagctggttcgtttaatctgaaataatttgagcataacttcatgtttatttattatagttgggccactgttcgttcacagcagcacaggaccatatagtgctatgcaaatacaattaagacatgcctaggattcatactctttgaactttgaagaactgcactgaagatatggaacaatattatctcggtataaagcattcctctctaaagattacccaaacattgaggctaaacatgacttgaattctagcaactctgacactgaaatatagaacaccatattttctaggggcacttggacaaacaaaacatcccttgaaaactttatttgtcaagctccagagattggctggctaacttggagcaaactctcaactcaggcatacttgcaattgccagaacctgcaaaggttggcaagaaagccatgtaaatttgcaggattcaggtgaaagaaacagcaagtgaagcaagctttgaagaggctaatacttactgggatcagtgatggtgatgaggccagtgccgttgaagaagcaattccatgagttcctccccctggcctggtagtaagcgttcatggtgaccgacgcccgcgtcggcaggctgccatcgtcgtcggggaaggagcatccgccggtgccctggatggcggcgcagtcgctctccgagcaggcgaactccaggttagccctcaaagcatcctcgctggctgctggatttggacacaccatgtcttggatgactgcaggttttgctcagtttcaggcaagaacagttgatgagcatggcaagatcatatgatgctgccattctgggtttgtttgcattgctgcagaattaaggagaactgaaatttcttgatgagaactgagaattgtttgtttgtttgtttgtttacctggctatggtataggctgggtgctgctgctgctgctgctgctgctgcatggaatacagattgtggagcattttgttgagagaatgaggattggaaaacatggagctgattattttgagcagacaaaatctcatctgatttcaaaaacaatagaaaaaatgtttgatgaagaaaagtaggctgtaagtgagagatgtgtaccgttgctgtgcagcatgaagagtgcgagagcaaagaagcatgtgagcaatgaggcagtagctgaagccatctcttttccttctttctgaacctgagaatgcaatgagcttctttctctgtattatgatgcgtcagaagaagcagcagcagcgtaatgatttgggctctttgtttggaattctttgcacgaggaaacgctgaaggtaatatataagggaggaggaagaagcaacagaaagggcgtgctgcagaaacggttggtcttcaaatcaatccaatttatgtcccatttatttgcgagaataatggctcagtgcattgcagcattgctactatttatcatcaggacggttacaagaaatcccagtagataactagcagaatataattggtcaaactccagacaatactcagtagtagtacataactcaaaattcacaatttgatataaacaaatatacacaaaaagaaatctattgttttcatcacagaggcaaatctccccaagcaacataagaaaaaaaaattacggttttcctctcctcaagttatttatttatttatttccccgttgtatcattgtatgtcattcgttctatttcgcagtaactatacaaggagctaagacagaagaaaacttatgcacatggagctagctttaccccacaccacattcttgattcttttgttacaaatcaacatgaacaaaaccaaaaacaaatctaatcattcgtttggtcccctatctcgcagcacaaatccaatgcatgcatttgatttgagtatttctcacaaacgatatgttcatgcattctgtacattaagaacagatttaagctccattccatcagtccataagcatttgatcatcctgagtacagcctcagcttggaccgaatcgtctgtcgacaaattgggcatttggtcaggctctccccacattccctgcagcactgttgttttcacaaagaaagagaatccaatcaaacaaatgttttttctctacaattttgcatgtcagaaacaatccgatcaaacaaatgtttctacatatttgaatagatttcatcatctgttaagaggttaaaaaagaaaactctgaattagtctgaattttcagtttaccatgtggccacacccaaatgccaagtccttggcattggtcaggcagattgggcacacctgcaagaacaagcagcaggtgatgtgtgagtcaaatcttggtcaaacctaaattacaaggaaaaaaagaactcttgatgaaactatggcaatttgctctacttgatcctctcttggtgacggtggggcggcggcagcggtggcggcggcgctgtcttccctcctcagcgatggctgcctccccgccgccgacggcagcggcggcggagcaggcatgatcctcttagccttccccgtcgaccggcttcggagcagcatcacaaaataaatcatcaggtgaagaagagtagaaacagcaatgttgaccagctattggatgtacttcctccatttcataatataagttattctaaaatttcccacatttatattgatgttacatcaatatgaatgtgaaaatactataatgacttacattgtgaaacggaggggtatgaattaagtggtgtttaaaactgatgaagattaagttagcgcgtaaaacgggaaagtcattagcatatgatgaattaagttttaattattacaaatttgacaaatggatatatttgatattttaaagtaacttttatgtataaattttttggacgaaccaacccatttagttgtttgaaaggtgtgctaactgaacccgagataaaaaatgtgaatttgaatattattcgtgccatgcttctaaaagtacgatttctccaaaagccttatgcgtaagtgcttcttagataatttcttatgaactactccctccatccaaaaaaaatctcaatcctgaatttgaatctggacacaacccaatcctaggtttttttttttttgatggagggagtatttgttagctttgtactaacagttaatctatccccagcaccagatgagcaattttcttaagtccataatctatctaatcatccggttagaacacgctctactgatagatatgatccattatattagaaaaaaaaatgaacggtccagattaattctactactagcagagaccattgtaaaacgtctcggcacaaacgttaagacttaccctaggatgccgagctccatggtggccttgtattggatgggcacctccatgagagccgccaaggcgaacgccgactctttctgctgctgcgtcgtgctcctcgacatgatcgacgtgaagttcacaaactgcacaaaacaattaagtaaccattgcattattgcatgtttaatctgcattgcattgtgatcaattcatctccaagattcagtttatggtgatgagattcagaggttaacctgaaagttgtcgaactggcgagccgggatcttgtcgtcgaacttctgcatgtcttcccatgggccatctccaactccaacaagaacaatggatagagggtaggagctgagtagatcaatcaacaattgaaaaagaaaaatatttttttcttaagtaaatttaaccaatgtctttttgcaagtctgaaattaatctgaaactttgcagtttgtgtataccttgccatgacaacggagtccactgtcctcctctcctgggggctcagatcattatcgcttgtatcaacactcctagtcacctgaattttgccacaaatttttttattaccagactgagtgaattctactagagagtgagtcagtgtgactttgcagaagtgttcttcatttcaaggagagaacctgtccatcagcaacgatgacaagaacatgatactgtcctccactcctgtcaacaatgtcgacggccgcctcgacgatcggcgcgaaagaggtaggccctgcaaattgcacacaatttcaccagttgaattgtcagtgacagttcagttttctgcaggtcaatgcacaatgcagaaggtttttcagagatgtgaatagattggatcatcaccagatagcctgaggtgtggcacaatcttcttgtagcatgataggacctcctcgaatccatggcagggtgagttgtcaggatggaagctgaacacattgtagtcatgtgtggttgctgcaatgggaaaaaagaacagcacaattcttcagacaacaaagaagacaatgaacatctatcatatgatcatatgtttttttcctcaaatgtctaagttctgcacaaattttgtttacaattcttgaacatctagcacaaatttgagcctcttaccgtcgccgaagccaaagcatgggatgagattatcatcgtcgaaaggtgccaatgtcttgccgatgatgctgatggcttgctcatatggatttggtgtgctgcctatcttgtgcaggctctgcccactgaacgaacgcttccctgaatacacacagataattcagaactttcagagcaatgcaggcaagaacatgagcagttgaaataatcagatcagatcgagcaaggaccaaggagttcttggtgaagatacagttaggacattattatcgaaaaaatatatttatttctcctaaaaaaaatctacctgtccattcgttgctcttggtgaagtctatgccaagtatcaggttcgacgactcgagcccttgatctcgcagagccgctgtcacctgaagaaaaaaaaatcaatttgttgttcaggcattgattcgatcagcaattcagaagcagaaacatgcaaaaaaaaagaagcttaatcaatcacaatatttggtctatttatcagtgatctcgtcgtgttcatccacctgatcgagagactggtagttgtcaggtatgtacgagtacttcttggtcagcatcgccctccggtggttctcgccgccgccgccgtatcccggctggttcatcggcgctctgtgcatctcacgacggtgaccaccaccgcggaataacgctccgatcacgccgcccatgtgatgcagcagcgatgacgacggtggctaagaacctcagcttcttcttcttgtacatgcgagaagcagctgctgtcaagctacctcctctctgcttctcagaaagttcagagatcaatcgattgatggatgaattaaagccgcaagcaacgaacaagatcgcatagaaggcaagcaatcgatcaacgaggatttattcctctgaaatgagaggagagtttttttgcagcgaagcttcttgagtctttcgctgagctgagcctttattccatcgaccatcgtgtcctactgctttaggtcggcagaaacgctatagctgtttctgtacttgttgagtaatcacatcggtaataacagtttgtggattggattttttcagggtgtaatctctgaaacctctcgttaatcatcagccaaagctgctaaatctgaaaccaggagctgggcattctgaaactttatggttgtttttgctgcaagtgttaaagttgcagattcttgtggctttctctggagcctcatgagaaagcggctcagggattcttgaaaaaaaaatgcagacagatgcatcgtgacagtgaagatatgtttggatcattgcttgtttttggattgctgagtcaatctgatgtgttctcttgatcttttggccttgcaactacagggaaattaaatggatgtaaagccctaaagcatgtgagctgtagtcttgatttagaacatggaacttttccctttcgaaatgaacgtatcaaggccgcctttggaatggaggaattttgcgggaatttcgtgggaattggactgatttctgtggaatttctgcgtttcgaaggagctcgaaattctataactaacgtggagcttacgatgtatgtttgtgataagttccatacgactttctaatgggacaataaaagtagtactgcgctataattttggttcaatatgtgatattaattgatacccttgaaatcgaaattttatggtattgtttgaaatcgacaaaaaattatatactatggttggagtttcctcaaactctatgtgttctaaagttgttatggattatggctgaaactgccgcttaaaacgaataacaacatattattataaattaaagttaaagttttgattttaaaaaataattctaagaaatactaggaaaaatcgtactgtttgcccgtgataatgaatactccctccgtcttaaaagacgtttttgaccgttttaaaagacgttttgactntggtcnaagtcnaactgttttaagcttgactaagtttatagacaaatattgtaatatttataatactaaattagtttcatcaaatcaataattaatatattttcataatcaatttgtcttgggttgcaaattttattatttttttctacaaagtttgttaaacttaaaagcagtttgactttgaccaaagtcaaaacgtcttataacttgaaacgaaaggagtagtccgtaagggtaggggaactaaactttgataccgtattttattccctttgcgaaaacttttcaggtatattttttccgaagtgaatacctgaaaacttttcagttcgatattaatcatggattttataactgagtcaattttgcaagacaattttcttatacccttcaaaagacaagataataacctttcaggtcagctaagaatattggtaaagcaggcaaggagatgatcatgttgtgggcggttttttttaagactatgggcagttgattctcactgggaatattgaaacttacatgtggcgcgcatatgtgcgccaaattgtgtttggaaaatgttctaccttttccagctacaatactagacattctttgcaataataatcccttttcaagattcgtgaatgaataaagtgtactccctctattccgaaaaaacgaatctagtacaggatgtgacatattctaatacaatgaatctaaacaaaagtatatccagattaatagtattagaatgtgatgaggatgtgtcacatccagtactagttttttataggacggagggagtatgtaatatatggtatgggccata

SEQ ID NO: 7369 - DNA, 12394 bp, Oryza sativa
caagtggctgccgcgtggggcccggccgtcagccgcccgcgctctcgggtgcggctgacgtgtggggcccacggcgccggccggtgtgagcccgggtgcgcccggtccaccgtggaccgtgaggctgccgcgtgggccccactcccgtggacccggtccgcgcgcctctccccctcggctgacgcaataaaccctttttaaactaaaatttaaatgaagaaattcgcaaatattcatttaaagagcatataaacttcaaatggccataacttggccatttgaactcagaattagaccgttcaagtctctaatttttccttaagaagtcaagaacccatttttgtgctttgttcctgcttgttatatggagtttattagagtaaaagccttttcttttccgttggtcgtgtagacgctgcagcttcggaagatccgctctttgtggaagttgaagccgacgtttgggaaagcgagcaaggcaagtcacatcatccttgaacatattggatcccatttttataaaattattttgatttaaattattgcattatcgctttacttaaactcccgcgttatcactgttttatttagccatgcctatttacctttgttatgaccttattattattgttattgatattattaacttgttcaccctagattaaacaaaaccccaactagtggacactctactcatggtaccactagtatgaatttagttagatgcttcgctggttaattaggcaacattaggtggttttacaactctagactttgggaatattctcatcacctggacactatggaatggatggattattgtggaattggattcacacctccccctctattcaaaatcctcaaaatggttttaggctgggctcggggtgcatggttttgattgtagcacctcggccatataaggaccggtcttcgggcctctgttgcaaagcactaccgtacttccacatgtctagtgggtaaggcttagtttgtggctcagtctggttataaacaaaagtacacggatggagatggacgaagtcgggggtcgatggacatctctagggcaaatgaaggctacacgagctgcggcccggtagtcgagatgtcatggcacagggccggtgtcctgctgctaggggctcagtcctgcctacctgtcccggaggttccggccgtaggtggggttgggtcggtactcttgtctatggctaggatgggttggaaactatgtcacgtcttccgtccgtataccgtggtggtatgtggcacgtggttacacgtgagaaagatgtgtcttgtgggtaaagatgtacacctctgatcagagtataacctattcgaatagccgcgccctcggttatgggcaagcctagcaatgtacccaagttagtgttttaattcttaaaaccttcttaacaactaaaatgtggaatggttggcctgggttggcttgggacgagctgggacccagggtcgggttgccagttcggtctgaatcatcgtaggccttgggttaaggtaggttcgtgtgggttcacggccttgattaataatattgtatagctctaggaccatgtttacaaagtagctttgagcaactaagtgacttttaatgttgtttactgcaaaccctaaccccctatattatggctcccttgtactcccttgcatttattctgcacttgtgggtgtgtcttgttgagtatggtggttgtactcagtcttgctcaatttttcccaaacccagaagaggagttcctggaagatgaaggctttggtgtctagctcgtgcttgccgtcaagcgcctgtggtcgtcgccctagtcttccgctgtttcccgtttgtctttgtgtatgctgggccttcgccgcccatgtaataaattaattatttacgcttccgcttgataaactctgaaatgtatcaacttttaggtgtaccttgcctcctgggacaagaaataatacacgcacgtaaggaacgcccgttgggttatttccggtcatgacattcgggcccctgaattgtcaggtaataaccctacatcctgttggccgaagccggtcgttgctcttattcaccataatcacaccagtataatatttggggtagcctatctaactgttgtcgatatggcggtctgaagttctgactcgtagtcgacaacagggtagtcttcctcctcaagtttgtgctcggcgagatcagagacagcgctagatccctacggccggcctctgaaggtaccggatagggtcgatctagacatatctctgatgtcgatatccggcggcttgtcttgacgtatgttggcttgtattggcttgaggctttgtggcgtctatggtgggtgtcttccatgctgggcgttgattgtcctctcctcctagggggtcttgtatttatacccataggtgttcctttgtccaagttgagctagggaaaccaatatggatacaatccgagtagtccttgtcgtttccatgtagaactctggttatccttccttatccggaactcctatatccgcacgttgtttccgtataagacatggtatgtggtgggtactgccgagatttactcaactactattaggtatgtgctatccataaaccctgatagtagccccccacttttatgcaaatgaacgaattcatattctcaaccgtgcgcagaccttggagtatctgagagaggcggctttttctctcctctgtgagtttagagttaacgttagacttcctttatcagcctcgtgcgggcacctaaagggttttgtctgagtcaatctctgacgtcaaccaagaaagtacagaatatacgactatgtctcccatcttgctgtaatcgagaatttggattgaagtcaagaaatcttatctcggcgagtacaccatctcttcattccgtattccttgttgagatccaccaactgttctcgagtgatcgagaaggcacagagcttgcaacgaaaccttgtcaacatttgttgtgctcgccttagtcgatcttggtgtgtagaaccatagagacatggagtcttcgtcaatgtcgaatagaattttcctgaaatcaatactcagaaaagaatattagatagaaatagcccccgagcgaatgctcaaagggtgacatgttataatatgtatagaaaattgaaaatgaattgaattttacagaccaatgttttgtatatgagcgtctactcttttaccgacttcgatcagtcagtttgttgagttatacactctccctagcccctagccttgtcgtcggagaatcgttctcggaagataaggctcttggacctttgacctgcctcggttgaacaagcactgatcctagcccccagtcgtgaagttggaaaacccaatttctgattatacggcttggttaatacgcacggcgagaactcttacacaaccagctcttacatggtcttttgtctctacaggattcgacaaggccttatcggctctgggcgtccctagccgaagttcccttaggttcctcggaggccttgtcaagacagcgtaaagggacatgaggataggtttgaacgctaggtgtcatcgtggtaagggatctctgggtaaaacacttggcaacattgtgtacttgatatcaactttgttgaggtaaaggtagtggaagatctcgctacccttctggtcgaggaccaggtagtagtcgtactcgactacttgaagtggaaatagtgggagaatcgctacaccactggtcgaggaccagatagtagtcgtaactcgaccactagaagtaaatgtacgagagatcgcgacaattgactggttaagaactagtgagtaggtgtctctcgatcatttggagtcgtggtatgagggccgctacgctgccggtcgaagaccagtcgtagctgttcctcaaccatctgaagtcatggtgcgaggaccgctgcgttattgctgtagtcgtacctcgaccatctgaagttaatgtgcgagagattgctacgttttactagttcgagaaccaacgagcgagtagagttatctctcggacaccaatggaagttgcggtgcgagagattgctacgtgctggttcgagaaccagcgagcaagtagagttatctctcgaacaccaatggaggcgctagagttggtttattacatgtgcatctcatgtggccagcatgactcacacacccaacttgtagcatatccggatgtccgttcgcaatcatgtcgggtgatcaagccgacgacgttcgcgaggaattatccgttaacaaccttttctcgagtagtccagccatggccggtactatgagataggtcgtcggtcttcgttggtaggttgggcacgacgactcagcatttgtcgagatcgttttcgataatgcggtgtactcgaccacaacctactcaggtgctcaattgttcctgaagaatattttctagaaggcaagacatatagtagataatatcgagtatgtactcaaaaaactgcatggatcttctagtattatcaggacataatgagcaaatgtaaatatcaggcattatgcaaaccgtaagcaagcatgattcatataggagagaacagagcgagcccccagcgttagaccgtagtcgatttaacatcggggacacccgcgcaacagatattgtataaaaacatgctctaggtaaacaaaataaatcatggatttgacaatgctgtatgatctgaataggtacgataaattgcagataaactattgcgtacctttgtagatacatgccggatgtatctacgaaattagtagatcaatttaaaaaaccaatctaccaattaccttgttgcgtactcgttcgatatcatgcgatctgacatcttttggtacgccgcggagcttgaggcttggatgatctcgatagaccaagttgttgatgacgatgatggttccgatctggttaggttggatctccccctcagctgaagtcgtcgagtagctcgttgtcggagaatccatctcttaaacacatctcgtcgaaaccttgaagcaccaaaagatcccctacttggcgcgccactgtcgacatttgatgtcgcgattccggtatttgcatagtatggggatcgttggtactaggatatacgcgagaccgaggtaaaagagatggagacgaggatttttatacaggttcgggcccctgaattgtcaggtaataaccctacatcctgttggccgaagccggtcgttgctcttattcaccataatcacaccagtacaatatttggggtagcctatctaactgttgttgatatggcggtctaaagttctgactcgtagtagacaacagggtagtcttcctcgtcgagtttgtgctcggcgagatcagagacagcgctagttccctacggtcggcctctgaaggtaccggatagggtcgatctagacatatctctgatgtcgatatccggcggcttgtcttgacgtatgttggcttgtattggcttgtggctttgtggcgtctatggtaggtgtcttccatgctgggcgttgattgtcctctcctcctagggggtcttgtatttatagtcataggtgtccccttgtccaagtaaaactagggaaaccaatatggatacaatccgagtagtctttgtcatttccatgtagaactctggttgtccttccttatccagaactcctcctatatccgcaggttgtttccgtataggacatggtatgtggtgggtcctaccgagatttagtcaactactattagatatgtggtatccataaccctgacagttatatggtttgaagggcacgggtccccagcctgcctagggacctgggcccacctttgctctggtaggttacacgtccctcccaaagaggagcgtagatgcctacaagatctatattttaagaataaggctgagggaagcctggatcctagcttgctctgggacctaggcccatctttgcccttgtatgttactcatccttccttgagaggagcgtggaaacataaaagatctacatcttaagatcataaaccaaggcggagggaagcctggtcccatcctgctctaggaccaatgcttgcctttgcccttgtattttgcatgttcctccttgagaagagtgtggaagcatacaagatctacattttaagattgaagactgagggaggccagggtcccaccctgtcccgggacccgggccctcatttgcccttgtatgttacacattcctccttggtagaagcgtagaaacgtacaagatctacatcttaagatggaaggctgaggaaggccaggaagcctgtatcaggacctaggccctcccttgcccttatagataacacgtccctccttgagaggagtgttgaaacttacaagatatacatcttaagattaaggctgagggaagcctagatcccggcctgcctgggacccggccccacctttgctcatgtatgtttcacctctttcctcaagaagagtgttgagacgtgcaagatttatgtctcaagcaaacaaaccaaggggagcttgaatcctagtccagcttgggatccggtcccccctatgtccttgtaggttacatgctcatctttgagaggagtgtcgagacatataaaatctatatcttaaaattgtaggcaaaggaaactgggtcacagcttggtctgggacttggtccctcctatacccttgtgagatgcatctctttccttgagaggagagttgagacatataagatatacacatttacaacttttcatcaaagacatcttcaagaagctcgtccaaaaataactaaactaccttttctaggacaaggggcacaaccagaaggctttgttgagtagtgaacgtgcccctctaccagctatgggcaaacgtttactgccataaatgaaataggtttaagagggaaactccaagtggcctggggtaaaagacatggaaaagacactaacgctgagtgattagggacaacgggcgtctgtacatgcgtcgcgcatgcccagcgacacacgacttttccaactggacaaaaaggagctgtggcactattttgggtaggttggggatcggtaggcccaccacgagctacatggagctggcccaaaccaatgcccggagagcctggggcaacttaatcacatatttttggtaggtttttcaagaagattggaaggaaaccaactggcagtggcaagacaaccaagagagaacatagaggaaaagcaaaaatggtaatctgagcccctccttggactataaaaggaaggggatatgccactaagaaagggatgcttgagtttagcttgaaaaagtatagtttgtatttttctagatccagatagcaaacacaaaaaattaggagtagtatattacacctccgggtggcctaaacctgtataattcttggtattggttggattgtggggaactcgtgccccatcctaggtgatttccacacatcgattgtagccaacccctggttgaatcttcatcaggggacacgtctgcacttccctgctgctagagaatcgcctctccgatagtggcggtggagaggagagacgccagtggaggggagaagcggcggcgctgtacgaggagtaggggattgggtaagagggagagtttggtggggaggagaaaacgtataggtcaggtctgacatatgggtccggcaataggctagatatatgtgtactcctttttgttgttatagggtgtaaactataaaagttttaatttattcgacaatagaaaatatcatagggattgacaaagaaatgactagggtctgaaatcctgtaccatgggttatgtgctctaaatgaatcttgtgcttatgtggcatttaagggtgcttaaatgacgatcccgcactgtgaatgtgtcaggtaggatgaagccttggattcagattcggtgatattgcgatagcatggcacggtgtgacattggagtgatctggggcgttgaaaactaatccaatggtccgctgcactggcccacctgcaggactccgttttcaccccacgcgcctacccttcttgccaaacgacgtctcctccaatctcgccccaatctcgcgtgctcgcatcgcggcttccccacgccagtctggagaggcgccaggccaccgcgccgccgcgagtgaggaggggactgggcggccgcctcgtcgcttcgcctccccttgcccgtgtcaggccaccgctgtgagctagctgggagccgccaccgcgccaggccggagaggcgcccgccaccgcgccaccgcgactggggaggggactgggcggccttttcgcctcccctcgcccgccttaggctgccgccgcgagctagctggaggccgccgcgccgccgcgagtagggaagggaccgggcggcggctgcacgaggaccctgatgtatctgaactctgtgttggttttggcatatttttgatgtttggagttccatctcgccaattctactgaacatatgctagctaatccaacagctagcactaatagagcaacagagccaaagcacccaactgaaagggaaacacacagcaaaattgatgaagcacaggggcgcgcaggcacctcttccgcaccgggaggcggttggacctcgttgatgtcaggcccggtggctggctgcctccacacgcggcctgccgcggtagcacggcagggccccagccccggcctcacgtggcagccgccagacccctccacactcgcggcgagctcgtcggcctgtcacctctccggtcacggtggcggcgactctcccagattcagcggtgacactcccgctgactcacggacgcgcacgatgagaaattgggggcatcgtgtcacgccccgaaatagtaccgaccggaaatagcccttgacgctccaaattaacctgttaatcgataccagtcccaggaaacagtgctggtatcacaggaagacggattatcacagcaacagaggtctctttattatagagtagaggtacagtcatgttgggctgcggacagatcccgagctcacaactgcattacaaaaggggaacggaagccaggacttggaccaaacaacacaggcgcgacttgggaactaggccgaaaccctaaaactcatcgtagccggcttgctcctggaagaactcctcatcagcaggatctgcttcatcttcttcagcaactggggggattatttatatagagcaagggtgagtacgggagtgctcagcaaaccatgggaaataagtgtttaatgcaggcttcaaggaaatgctgttgtttttacaattgattttattcaaactcttttctaaaaacaactaagtgagtgcttctcaaacgacacggatgagacagtgcgtctcatccagtcggagtatgtgcaatgtatcagtctttagaattgttcaagattggcacccggccaacaactttcaaacggccacccgggccaacaactttcaaacggccacccgggcctagctgatcccatcagctgcagatttttcaaacatcgaacccctttccaccacagcaatctcacaaggcagtagtcaaacaaaactacgctaggaatcacctcacatccgcccatgaccgtgggcacggctgttcgaacagtttgttaacctctgcagagggggtacactttacccacacgacattactaacccggatcacccagcccgtggggatcagccacgtcgggagacctccaagctttcatgacaaggcatttcgaaagccgacacaggtttaccatatgccgacgagaggggtcccagaccaacaacaggttaggtcccagaccatactgtgccaggaagcccaggggtcctccccgacaccaccccggcgaatccacatgtctctcggcatcaaggctcccctgataagctagttactcagccaggggtgtcccattccacccatgtggtcatacttgtcttatgtttggatgaaattccaaggaaacggtccttaagtgcgagagcgggaaaccgtacacccggtacgtcccccggtccgcggctttggaaattcatttagttcgcaagtaccgacccaggtgtcgggttttccaagtcttttgtaaaacccgagttttacccaagaagtttttcagattttaagtttgaaggcgtccgtcgatactcgcacagggtgcaggaatatcgagacgcaactagattggttacaagggaacacgatataccatatcaaggaggtcaatgcaacaaattaggtaggtccgccaatctgccttgcagacgggacaacagtttaagcgcgatcctatcaatgcataatatttttcaagcaacataattaaatttcaaatataggctcaagatgttcaaaggtggcttgccttgctcgagatctggagcttgatcctcgaaatcctcgcactgcgggtcttcgggctccgaaactacacgcgaaacgggacaactcaacaaacggcgaaaaaagccctattaatgacctctatgcgtgccattagatagatctcgagatttgaggaattttggaagttgaacggagtcaaacggatttacggttgggaagatattgaatttctaagattattggattttttggtctaaaagaaaaggatttaattaaatcctttatgaaaaagaaaagaaaagaaaaggaaagagggagggaatatagacttttctcgggcggctagggcgcggcccaagagaaatggggcggccggccgagctaaatgggccggccggcccaaggcggcccaagacgcgcgcgcgcgggagggaggagagagagagccggtggaccgggctcaccacgcgcggtcccgggtgggacccgcttgtcggtgacacggctcaccatgcggagcgagcatgcggcgtacgcgcgcggcctggggagggacgcggtgcacgccccccgttcgcggaggaacggttgcggcgggcccacgcgcagcctcgcggctcgtggtggaacgcgcgccgggaggggctgaccggggtcggcccgacccgatcttggccgagctggcgccgacgtggcgtctacgtggcgcctacgtggctgccacgcgggctggcgggaggaagacgaaggcgccggccgtgaatggacggcgggcggcggcggtttctccggggcgccttgcgacgatgaggggcgacggggcgtacaccgggatgacgaggaagaaagagagggagcgagccaacggcttggattcgccggagggagtccgtcggcggcggatttcggcggcggcaaccggcggagagcaaaagggggaaacggcgatgaggtcacgaggggccaattcccggcggtgagagcatctacgcggctacgggaatccgttgctagcgtcggattgggcggagctacgccgagcgaggccggcaacgagcgggtgctacggagcacgggcggcgacggcggcgagcacactgcgagcggcggtaacggtcggggcggcgccggctagctacggggaggctactcgagctactaccgaaaactaaggggggaagatggagcgaggagggagaacggagggaggcactatcgagatgaggaggggcgctgtgacgagaggccgacggcgcgggagtaatctctccggcctcgggccggggaagaggaggaagacgagcgcccggagtccccttccgcgtccacgaatgcaccggctttcccggcgcttggcgatgaacggcggaggcgagacagagctcggaaggcggcaacaatggcgatgggagggagaagagagggagggcgcccggggctttaagggcagcaatgtcggtttggaaccgacttgggcggtcaaggcgcgagctggcgctcggcgctcgcgtccaatcggcgacagggtggagggaggataacgccggcgggaggaaaaaggggaaaaggagggagagaaagggggctcgtccctttcttctttgggaaaaaggaggaggggagcgggggcgtcgcggcagagggaggagggctctgcctccgtcccttggcggcttgcgcgcggagtggcggggccgaggcgatgacgacggcgatgacggcggggcggtttggagcggcgcgacgacacgggcgacaggtgcgggctggcgcggcagagggtgacggcggcggcgaccagacggtcggccactcggcacgcacgcgcggcttgcaacgggggggggggggggcggcggatggagtggcgcggctcgggcacgcgcgctggcggcggggccgagcggctgcaggcgcggcagggcagcggggccgggcggcgcaaacgcgacgcgggcgaggaccacgcgggcgcgcgcgcgaacgacgcgcggggagcggcagcgagggagcggaaaggagg

SEQ ID NO: 7370 - DNA, 9754 bp, Oryza sativa
agttgtgtcgtgggcttaacccaagggggtgtgcaccttagggcaacctaagaaggtccggaatcatatttattcagtagccatcatcgtctagagtcgggttttgcttacattaatctgtcaagaatagtttcgccgcttgatcagtttgtggaaccccaaattcaagtgcttaatcattcatatgcaatttggttgcaatctatcttattcttccttgtgttcttcgtttcgcatgcagggattagccttctcggcgaggtcaaccgcgtttcggcatagttgataaccagaggagatgtggtgctgcaattatgtggctcagtagcgtgttcgttcagaagccagatcgagttctgtcgcgactccacccaaatcaactatttatcaatacctaatggaagatcggaacctaacatccttatcagttggtatcaaagcgcgattacccgttaggtaatttatcttcccacaactagaaaattgccacataaaaaaattttattctttacctaaacaatttgagcaattgcattgttgtattagattttgcttcgttgaattttagattgcatcatcgtgtcaactgctggtttagttctagatttaatttgtagttttgagtattgcgtctgtcatcacattgagtctagggttgatcagtcaagtcggtgtgagttgtacgtcaattttgggtccagttttgcatttcgtcggttgttgccgggaccttgaaaaattgaatctaatcattgtcgggtttccgtttttgggatttggagaaatttttgtacaacggttttggagttgctccattcaagaagttcctttattacagttttagtgcgcgtcccacccaccccccacaattcgtgtaagaagactagtcccaccagcaagtgcttgtgctactccccaagtaatcacgagcatccagatctgtttcactcattttgatacttgtaagctgcaattaattgtttcctaatgaaatacatcagcacttggaacagatatccagaccgtctgtttagctttgattcctgctgcctcccttttccattgagccttattgatcaaatagtgctcgaaacaaattctactggctcttgaactttcaccttcatatgatgcaaatatatgatggattgatgggtcatacctcacaaataaagcgggagggaaggagggggggtggttacacagcacatgggtgataaccatcaaattatatacgtatataaatagagagaaaccattatatgccactgactttatcacgttctataatatgccatcgacttttgcttaacttctacgatttaccatcgccgtctggttagtctccgttagtactgtacaaatttgtcaaactgaccaacatacccctgggacaaaactttcaaaatttggataaaaattctgaaatatcagattttaagtttttgtccaaattttggatgtttacaatattatgtttataatatgatatttttgtccaaattttagaagtttttgtcctaggggtattttggtcatttggaaaacattgtacggtgctaaaggaggctaaccggacggtgatggtaaatcgtagaagttaaacaaaagttgatgacatattatagaatgtgataaagtcaatggcaaattgtagacgtgtgacaaagtcagtgacataatggattctcttatatagtattaatgttcatgtagatgtagctagataagaaaataacatctgttttgagatacaaaagaaggcttccaacctctcataaacaccaaaacaaggcaacatatgtttactgttttgccgtacacaaacaaaaattacatctcagttgacttaaaattagctctacgagtactaataccatagtaatgtcattagaactaatccttgatgccaaatatctttcaatagaacttaccaaatagtccgcaaatagtcgtctcctattttatttcgaagacatgttttcacaattttcagagctaaaaatgctctcagtggttccagttgacacggagagagtcaagactgatcaattgttccttttaaagagaaaatatagccggcaataagcacggtatgtgtgtggtgaatactctagccaaataaatagattaaaccaattgcattagaatctataagagaaaagtatcaactgtattattcgtaatgcagttcaaaagtacgatttcaaaaaaatatattgttcactggtattgcttaaaaaacttctttcagtctatttgttatctctatattatataatatataatttaccaggaattatctagaatttgcatgcttaatcatctttaaaagaagaagataggcttagtttgtttccgaaacaggtttcacaaattaagtgtaaattaaaagtaaagtgttttctttttttataactgattgtttacggattcagttttttaaccaaatctttaaaaacctattgttcaataaatttgctttatttgtacaatcaaactatcgccctctaattagttcatattaatgctatttgttgtatacttatatgtaagcatctaagcactgaaaaatgatgcgattgttatgataactagaaaggtagcccgcgcacatacgcgggcaccttcttatataatgtgagtgaaattttattatgaatatattatgtgcaggtggctttttattaaaatatcttgtattatgttctaaactaaaattaaacttattttgtgtgctttgaaagctagttatatttttataactacccttgcaatatataaattctaaaataaaattaattgagaccatgtggttttgaattgttgagaaaatattgtgtcgaaacaatggaggtggttcctataataaaatttagggtattttaactcaccaaaaaggatatcttacaacctcaaaagaaatccaataatatcatttttttgtttgattgtattttaaaattacatatatatatattttttcattctaaccatccttgtaaaatgtttgaatttttctatcaagtattggttttaaatccagcaacatttgttcaattttaaatttattccatgtccatttttttctttgggatagtttcattctatgattcatccttgaaatgatttgatctttgcaattttgggcaaaaaatataagaacacataacctagtatgggataaagggcatacgttctaaattttctctcctgaaatattgaagtaatggtcataatgtatttagcgaatcaccactaaagtgtattgttttataacaaatacatgtttctagattgttctacgtcaagactttacaatgtattgtagcaagtttaataaaaaaataaaaaagggcatagtcaataattcctatatggaattgacttgatttattgctaaggccactgcaaggttgttccactgttaaaatccttgggtacaacccatatgcttatcggtatgatgttcaaccaaccacacctttattttcaccctattgtctatattgctagatgaatacctactatgattagtgacttcgtagatcatatgtgtaattcagaggctatgatcatctttcttataactacttatttatgtcctaaaaacatcatattaaaagtatcaaggtcaatttgtataggcatgtcaagagaaattaattaagttggcagaaagttgttagatgcccaaaaggatataattaatagatggaggtccatttgtgttttttaaccatatagataattttaattttaattgtcaaggagataaaaaaatatagagaaaagaatggcgcacgttgtacatgggccgagaaggaaggaggtttgggaggtttctctaaatgattaatctaacaaaaaataatgtgtcagatgtttatgttgaaactgatggtcggatgttttgttttcttgtcagaattttattaggattttctttgatttaagagaatgacgtaacatcttaagagcatttataatatctgtaatagacttttaacaccgtatgccgcaaaagaaggagggaagaaggtttagggtgctcttttttaaagaaaaatatatctaatgacctaaaataatgtgtccatcaatttatgtcatatctaatggttgggtgtttttcttttccaaaatttctaagatttttctctaatttaagaatgccatatagcagcttagaggcatttataagatatttaatggattttaacaccgcactgggatggggagggacagagagaggtttgggttttttcttattaaaaaactaacaaatcaatagccaaatgttttattcttttttaatattttctagtattttatttaatttaatagcaccacgtagcagtttagaagcattcgtaggatatttagagtcacagagtgagagctgctagacctaataggtggaggtctctttgtgatctttttaatgtaaaaataattttgattattatttctcatgaacatagctcgttggcacgtatgtgacaggacgttcggaatgtgtgctttttaaaaaaaaaagatctaaccttctaatataaaaataatggatccaccgatttttaaataaaaatcgatggttggattagattggccacttggcaaccctggagcgtttgtaaggtaccacttggcgaattaagagtattcgtagggatgtttaatgaacatttaatatataattgtctttttttgaaatttctaagattttctttaatctaagtatgtcatgtgacatagtagtttagaggtgtttataaaatgtttaatggattttaacactgcacgggagtggggtgggagggagagaggtttggaatatttttattaaaaaatctaacaccctaaattcatcaatttaattagaaatcaatagtccgttgctttgtattttttaaaattttaccacatagcgatttaaaagcagggagagagctgtagttggtctatttgtgtttttttacctgtaaaagtatttttgtttttattttctcattaaatagaaaataacacatgaatgaggacagaagggaagtacgtatacagtacatatgtacgtacgttcgactattacgtaggtttgtacgttggtttcgtatgatggttccggatgttcttttttctttactagaaaaatgctcgtgcgttgctacgggaaaaaacgttttttatcctatacattatattcccttggttttggaccggatgcttctttgtttttggaccggacgttcattccttcctttctttttagctctagtcctagagtagtccgctaactctaagctgctcggtctatctctttttggctcagcccacaagtgaaactgtagtcttagctcgaacatttccgtgcctggcctacctcttttcggctcagcccacatgtgcagctgtaggcctagcttgaacagtctcgtgcccgtaccatgacggagccgatcctcccatcaaatccggtaatctggtcgagctcacatagttcagtgtccgtacgatggcaatcctctccgtcaaatacggtcgaatctttctcgatctccaaaattatcgagagattttgatccactcgatcccctttttcgtttttttaccaaaatcaaagcaatccgcaaaacttggaaaaaaatgacgaactgaaaggaaaattcaagcggaaaatgatgaaagagtagtggagaatcggtttttcaatctattggataaggaaatacataaagatgcaaatcgatatggcggcggcgctagggttcggcccgacgaaaaaaccacacaaaaaaagcgaaaccagaaaaacggtgaaagaaaaaacggcgcaaacaaaataaaacggacgaaaaaacccgaaaaaacggtgaaagaaaaaagcggtaaaaaataaaataaaacggaaaaggaaaaagaaaagggaaacggacaaaaaaatttattttatttttgccgtgacgggcttcctttttatacaatcgttttttcagcacttttttttccgcttttttaagtaaggataggaatcggtcagtttttttttccacactttttttttcgccctgggcttttcttaattacgatcggacttttttttatatttttttatttacggacgaaggaaacatcttgaacgtagtatatatatatatatataggagatagatagataaaatagatctaagtaaatctaaccatccaaaataatgggtccaccaatttaaataaaaatagatggtcagatttctcttaattattatggtgtgccacttggcgacttgatagcgtttatagggtgccacttggcggtttgggagcgtttatagaaagtttaatggacttttagtatataatagatagatagatagatgggtatcctacttaagtgaatgctaagaactttttaatgtaagagttttatattttttttctataattagttcactttgctcccttttgtatttcctattttattttatacaactttattttaacttgagatgataaaatattaatgatagagcgttataccttatgtatcaaccattttctgtgaaaactcaatcaacttttgtgtaaacatctaaggctaaataggttctcattatttatttattgatggatttggggaaggtggggggaggattcgaggttggatcatttcttgcaagtgtgcaaggctccacccagcctagagagaacatgattggaaggctaaatataactgcgaaggcatcattatgtttggaatatgatttttttattgtttccgtgatttaaatttttgtatgaaatttataattaaatattaggaagtatgtactcgataccaatcactctacaaactttttgattagctagattgcactgggcatgaattaagtacaataagattatataaacatttagctgatgcttataatgtctatccacttgacataattaccatgtatttggtcatggatgtcttgaactcaatgttcagtcatgcttctcttgaaggttggttgcagctcctatctattcagcatgctcaacatagatgctctttttatgttgacgatgcggttatatatatgttcctaaggccaacagtgaatgacataactatcatcaagcaactgttagatgtgttcagtcatgcttctgggctagtgactagtggagtaaaagagtttccctgcacctacgtgtggttgcctctcaatattatgaaacctagcaaagctgagctacaattcttggtggataaggtggccaacaccttctatttggaaagcttccctcatgaatagagctgggagactcaccacactgaaagtagttctatgggccatcccgatttatttgatgatcacaatggatatccctaaatgggtgatcaaggtgtgaaatagataaaaggcgaagaggtttttcctatgggtcgggcatgaaagggctaactgtggtaattgtttggttgcatggtagcggatttgtcgacccccttatgtatggtgatttaggaattcacgagctcatgaatcgggaccttcgcattcggtgggtttggttgcaaaagatcaatggtgctcgagcttggtaaggattggaccttcaatttccaagcaatgctcatgctattttcaatatggccgtggaagcaatggttgggaatagtcaatccatcttgttttggtccgatcgatggatacaatacaggaccataacagaggtggcccctaatcttatcaatttggttcatataaaaaggttattaaaaaccgtactgtcgcacaggatttagaaattcatagatatggactacagaaatcgaaggagccctccctgtccaagtcatcgtggagtatcttcagctgtgggacttggtggttaaagtggatttgcatgatattttccaataaagtaaggtctaggtaagatcattaagattggtctactcactctctccatgcttctctctctcatcctagttcgcgcaagaaaatctttaggtttcaaggtataaacaaattcattataaattttgtgtatgtctaatatatgacaatctttagcttttactgtgtttgcaaggtatttagaagtattgagaggtggagtaatgtggactgttgatcgagagaggtgtaaggaacggaataaaatttattgtaaccgatggtagtgaagtaattaaatagtaaaacatgggcattttaagtggatggaatatttggctggactgaaccagtaccaatcagtaggaaaaacataaatcaggcattgatttatgcattgaatagatcttcacgggaaaaagatatcagatccgtcttctttcttcttccacattggttcgttcttgctctaggatttgacctaaattcacccaaaaggaacagagggagaaccgtcggaattgttgaggattcaacatgagacgagattgaccagtcaatggcataggtggagcccatcgggtgagatctccttgatgtcaattgattagttatttagatagtttacaaattccttcgtatgagagattggaatgagatctcctctgttcttctaatagggttcgaacatgtggaccagcaaggagacatgaacaagggagaagctctggcacagtcatgtgttcttttgaacaaaacataaatctatagaagaccacgcaaatgagaatctttacgttagtaatgtgttcttagaacaaaatgtaaatctagagaaaatcacacgaataagaacctcaaagaacacaatgtaaatctacacgaaacgacgcaaaagaaaacatgtacgctagtaccaggcaaatgacttaagtggtacctatgcggtaccgatttaaatttgaggacaattctgcccttttctctttactagcaaatttatattcaaactttgatacctaagtacctacactaatacttaaatactttttacatcatatatatatatatatatgttattgagaagcgttggatgtttactttttttggaatgcaaacatcgtaaaagctctcttttgttaacaatggttttcttgcacctcctagtaatcatgccgcagggttgtaaaatttgtttagatactgacacatggatgtttccatgttgtgcgcagaaaaaatataaatttttgttcatacctggaaggtatagaatagctcttagccccctgcatgtataagtataactacgtatggcatattaccagtccgtaaaatagactctataatatagtcggggcaacggcccgcttgcgaaaatggaagaaacgaacaaaaaaaatcgctggcccacgccgggagccgccgccacccgacccgcgccgccgccccacgccggagccgtcgtcgtcgcacccccgcgccccgccagccacgtgcctcgccgccgcggccctcccccggcctcctcccggccggatctgggaggggaggggagggccgccgccgccgccgcaccggagccgttgtcgtcgctgccctgtgccccgccgaccacatgcctcgccgccgccgccctcccccggcctccctccggccagatctgggaggggaggggagccgccgccgccgccgccgccacgtccgcgccgccagtggagggagggaggggaggggaggggacggcccggcctggccggtggggagaagtgccgttgagggagagagagggaaatgagtggtggggagggggtggaggagaagataaggagttagatttttttggtaggtacaatttttgcagg

SEQ ID NO: 7371 - DNA, 18437 bp, Oryza sativa
gcaacggctagtgggcccccatatcagttttgaccattgtgggtgcactactttagccaaccagccgggagagggaactccaccccatttcaacacattttcattccctctccaaagtttgctctcaagttcattcaagctttgatagtttccctcaaattcaaacacttagttgcatatacacaagttgctttggtgaaactaaccggcgggtgaaattcttgttattcctaaccccggccgagctagtccgttcttgctccattgtgcagaatgaggaggcgactgtctcgtctgttcaaggggtatgggtcttcatcaagtcgccatgatgggtctagtagtcattcatcagcagacgtctcgatggaagatgccgaagctctgcgacgactcctgaacgacaccgacctcaaccttgtcagtgatcgggagagacaagcctactacatgctgagcgaccgggagtatactcacacgcgagaatactcaccagagcttcccaaaacgataggtatggttgttgaatttcgttctatttggaaagctgttggttggcagagatttgctgtagtagatgagcctggttctcgtctgcttactttcaaagaaatagaagatggtatttcctttcgctttttccatgaggagttcacacttacatggaaaggcttaagtacacttcttggttttcacgattcctgtaaaatcgatctccagaaaggaattcctggattcgagaaaaataggttttggaaagacatttttggtgctccaatttgcaagaaacctaggacaaatgatatccatagtcctacacttaggctcatgcacaaatggattcttatgactttgtttcctagaggtgatcttagacccatcaggggagatgaattgattatcatgtttgccatgcttagaaagatcaaaattgctcctgtgaaatgtatgataaggcaatggttagaaagtgtaaagttctctgctcttgttaagtgcacttctctgattacctggatagcaaaaggggtaggggtcgttagcgaccaaattgctttttgctcagctgctcgtccatgtattgatgaggcttatctagtgcaagggcatattttgaaacatggagcagatgaatctttgatttactttttcctcgattgtgcaaatgaaatcccgttgccaaatgcggggtatcatttgtacaactgccatgaactaaccattcccctgcagactatagaagaatctcgtgcaggtggaacatacagggagacgcgcaacatgacaaggaacgaatgagaaagttcatcatcctcaacacccgtgcagatgtatgaggcaggttgggcaccgactggggatgcacccggatggacccaagctccacgccacagcatcggagtctcaacctgggcgagtgccagtgaggacctgtggtgtgcgtctcatgacatccaatggggggacaaccaacctctcagatcaagtggtgtgcctccagctccaagtgaatggcgctcaagttcctctcgttgggacttaggtgaaatcactaggagaatggacacccttgatgtgcagacgggggagatccagtacaagctcacagaacacatagctcaaatgcaagaatggcaacaatctgctgatgctcagttcacgtagctcaaatgtatgtatactatgtatattagaagtataggaatatattttggttctcttttctttccacttagcctagataatatattatgggaatgagtagtaatgcttgtgtgtcactctacccttacccttagattatcttaacccctacttagaatttgattatcacaagtaatatataaattattagttaatgttctctctacatgatattcccacgggataaaataaatacgatacccttggaatactctcgggtgaaatgctacaatggtatatccgtgcgcttgcggacaaactctgtaaccataatataccagaagtatttctgcgtcattgctgggaattatatttctagtaatgtcgttaagaaatacaaacacttgaggtgtgtgagtgaagtgagaaggtgaggggtttatatagcctcccaatgacggttgtgatggttggaatggttggaaataccctgcaaccgtcattgggagccaatctaaaccatccagaagaagccctgcatccaacggcggcgaggaaggttcggctgaacccactggttcggccgaaccaggggccggcccatctagcccataatttggctggtggcctcctgggcttctccactccatagacttgtgaattttggcccaattcatcgtgtcaattctgagttcttggcccattcatgcataagtctgattctcgacatcgtccgattgatttatcgtctgagttgatatcgattctccttcactttatagttattctctgcaaaaggttagtaaacctaatactaatggaatattattattctaacatatttatgcattgtaagaatcactagtgatgggcggagcagtttttatttttctctgggccgaaatggacagtgatgggcttccctttgtgggcttatcactgtgcctacccttgtgacacgtggcggcttacgattgggtggggaggcgaaccggcgcctgggtgtgctatatattcccctttttcaccgccttacactcgtcattttcaccacgagtgctctctctttctccgtcctttcctttcacggcacactttttgccatggctcctcgcaagctgaacccagcctccacgacgggccccgatcccggtcggatcgacgatgacaccaccggctttttaggggcttcgcttgtggatgatgacgagctggcgaagttggtcacctccagcgcggtggtggaggggcaggaatttgccccggggaaggccgtggtgccgaaacccggcgacaaccggaaggtggtattcgccgtgttctttgaggcggggcttcgatttccgtgcagcatgttgttgccggaaatccttcgccttttccaggtggagctcccccagctgagcccatcggcactcgtccggatcgccatcttcgactgggcgtgccggaccaccgggttcgaaccgagcgccgagcttttcggcaccgtgttctacgccactgtaaactcaaagacggtggtcactccggccgggacttagaagacggcattcgggagtgtgaactttaacgttcgccccgagtgttccgatctctagacagtgaacgccgccatgttgaagtgggatcgccattggatggcgatgtggttctactactccatccccttcgaggctgggtccgatgcggcgaaagccctccggtggcggcgcagggcgatttcactgaacaggaagcccaagatcgccgtcgatggagccatggaggcccggttcgccctgctgcgaaaggtctgctcccgccttagctgccgcgacttggtggaggagttctgtatgcttcgcattttccccctctcccagtcgtggcaagtcgaggtcgatcaagataaggaggtcgacggtttgccaaagctcgtcatgcctgtgggggcgaacggtgagtctatgcttttcctatgtgcatccgtgtttcgctcgtcatgcctgcgggggcgaaaggttgcagtcgaaagtgatgaggaggaggaggaagaagaagatgtggaggctggttctgaggatgatggctctcatggctatacccccagtcctactactgtgaaatccgcggcgggctctcatgtttcgcctacgcggtcgcaagatatcgtcgtggcgaacaccctcctggcgatttccagcacagtcgcgaaaccggtgatgaccgctaggaggaagaagaagaaagggaaggttgcgcaggtcggccgtggctttttggacagcgatgggtccgacgggactcttacttcaccggttttacgacgcgcatcttcccgtggtaggcgcatgtctctgccacctgctagcgataccgaagcggcgacgggtggaagtgcctcagccccagccgctaaggcgaatgttgctgaggatgaacgggttgaggcagttccttcgcctgttcgtcaacgagagggaaaggctccggcggttgaagcgagcgtttcggacgtgacgcttaccgccccacatttcgtccctgctgatttcgccacatgtccagagatcactccgttcgtggacggggtgtgctaggtcatagcaccgaccgatggccttgggctcttcaccgagctaaatgagttcgccgaaagctacgtggccgtggaaagcctatttgtgcaggtatgagttttctgtgcgccaaactttgccctttcgctagttccctgtcgtaatgtttttttttaccagggccttgccgcgcatctaagtgccaagaagtctgccttagagcgactagatgggtatggccttcgcctccgcatgatcgaagaagatcttcaccacaaggaaaacgaaagacgtgttttggcggagactttgaagaaggcgaatgctgaaaataggtctctctgctctgaccttgaaacagcactcaaacgggatgccgaacgagaccgacaacttgcttcggccgaggagaagattaaatccctcgaagcccgtcttgtgtcagccgaagctgtcgccacgaccgtggtaccagccacagagtctgccaagcaggcctattacactctccggctggcccttaacgaccttggggcatgggcggaaggtgctccgggtgaaggcgggacaacattcaatttttccgattggatgcaggaggcggccggctcagttgtcgaagtggcaggtgcctacggggactgctgcactcgtgtttcggcgggattcgtccttagcctcatgcacgcgcacggctgcgaccacatcgggagttttcccgatttcgtgaaggatgaatggcctagcaatacgcagtgctctggggctgcgttaagggcctttcgaaaggggttttgggaggatggcggccgggactgtgcgaagacttgactccgcgagaaccatgaaagattcgcgaggaacgaggaggccgctgctgtcaacgccgaaagggatcccgggccgtcggaacgagcccccgggcacgagggcgaaggcgacggaggccaagaccaccctgaggtgtgaggcccttcgccctcgtgttttttattttatttttttcctttggtcctttcgggctttctggtagcctaagttttgtatataggctttttgcatgttcggctttaagccgctttcgccttgtaatcaacatgatctttgttctactggcgaagtataatccttttgcttatctaattgttctgtttgaaagtggaactgatcttcgtctatatttccctcgttttttgcacccccctttttttgtgctttgctagcaggcttgtggccgaaatatatgcgttcgacctcccgctaaaaaatggcggaacaaaaacgaaaagttcatggcgataaaaagcctgtcgaagatcaagtgtcattttcggcccatttaccgcgagatgttgattaatggcaacagctataaggttgtaagtgttgctgaacggatgcgcgtgcatccaggccgaaccttagaggactacgatcgctatcgtgtatcgcgtcgcgaagatagttcgagcttttggtgaaactttaggagatcggctcgccaagaagcgatcgcccatcgccgttatagtttagcttgtgtttgtcctccatcccctttgagggttgtttatgatattagtagtgacgatgaacttgattcgtagagccatcccctaaagggtgaggacctttgtgttggcgaagatgtaatttatctttaagcttggctgtaaagccgttgcttcgttcgtctgtatcatatttgtaggacgtgtattctttgattattcttctttaagttaataaagatgtgttttacttcttttttgctatttctcgcattgtcacttttcgtgcttttgttaggtcgaaacatgtcggcccctttgtgtatattagcgaaataggcttgctgacttttcagctttcggcttccgttttcgacctgttgtgttccgcgtttgaaaggagcgcttatgttttcactttggtcgaatataacggtgttcggttaattgtttcccgaaacaagctgttgcggtttcaacgttcagcgagcgatgcttcggctaattcgtttcgcccccctgatttttttgctgatcaggcgtttgccttggggtttttccacaaattatcaatcacacacataaatgggcgaaagacaccaagattttatactggttcgggcctctgggatggataatagacctacatctggttttttttgtcttttttcattttcctctttttttttgcatttttgtgccgaagggcttacataatgccaaaggcttacataatagtatgtacatttttacaagttggcgatttgggtgccacccgttctacacatagaaacgcttgagggaggcagcgttctaggaatggacgagctcttcgccctctagtgtcgctaagcgaaaggagcctgtcctggacttgtgcttgatgaggtacggcccttcccacttcgattcaagcttgccgaccgccaccgagtttgctttcttccttaggacaagatggccgggcaacagcttcgttggtcggacttttttcttgtaagttgccgaagtgcctgtagcgtacttgcgcatgtgttccagtgctttgactctcaccccctccaggagttcgagcgacacctcgcacccttcttcgcccccagagaacatcacctttggtgaattagcccctagctctgttggggtcattgcttcgtcgccatagagaagcatgaacgggctgaacttggttggccttgtggggtgtaacatcctgaaaattcccaataataaaaatcactaaaatttcaaactttttaaaactttttgatcatgctggttgttacgatcgctattgcttgccaaaccataaataatcacaaagaaagtaaaggaaagatctacatttaagcaatagatataatttacgagaatatgttatttattattaaccctagaaatattagtacacatgaaataatgatcacagcaatggccccatctataatagagtatctcactagaatatataattaatatgtgaaacaccttatcaagctcctcataacatgaaaatcactcatataaaataatggtcatataaataaattaagctttatatataaataagattatgtgagttttaattaaacaattagattaatatcgtaccgagtctcaatttactctttacagaataaatggattaagtctatccgtttaaactatattgctatacaaataaattcgaccaatctaccattgtattattaagaacacatcgctatattaaattgaatattaccccaaaagtcttcaaagatatataagttcactttagggccaataatttaaattaatctaaaaagaatttatttgtgtgataaataaataaatatgggtggtaataatttttgataaattttcatgaggatttagtgcttaaatttagttaacatttatctaagtaaaattagagcttataggattaaaattgtacaggagataggctaagagatgattaataggaaaggacactgttcattgcacatgaggtgtttgatggagttcctagccaccctagccctctttcctccccgctgccacgtgccaactcgcgcccggcgccgccgcgtcatgtcacgtcgccatcgccgcaccatctccaacccgccccgtgctgtcgccgtcgccgtcggatgcgccgcgccgagccccgcgccgctcgtgtcaccgtgggcgtcacccgtgccgcgccgagccccgcgccactcgtgtcgccatcgccgtcacatcagtgcctcgcgccccgtgagccgatgcagccgtcgcgtcgcgcatgcgtccccgtcgttgccgcgccatcgcgtcgccgcgtatcgccatggccgccttgagtcccatgacgcagtgcgccatcacgtcgctctcgagccccgtgcgccgccatcatgttgtcctcgagccccgtgcgccgtccgtcgcgttgaccattaagccacccttcccacaccctataaataccccctcccatctcccttcctcccccacacaccatgttggctgccatatcacaaggccccaagagcccccacgagctcgtccacccctctctgcctcttctactccctcaaaaacatttcgtcgaacaccttgtgggcgtgcttcaccttcttctccgctccaccaccgtgacaccgatcttcatcgttcctccatccctcggtaagtcctcgctcctctagcctcccctagttccatagaaactagagccccctttaatttcgccaattagcaaccgaagccgtgcctgttcgggcaccgttttgccgccggtgagctcgccgtggacaagccatcccggagctcctcctctccttctagtgagtaaaatggaacccccatgcgccgtagatgctcatgcccccatcaaattggtcggaaaccctctctcttgacctagccacttgcagcctgagcttggccatggcgttgccatgccgcaacgctcgcccctgctctcgcttgcgccgccgccgaaattggagggtcgcggaagcctcgcgcaccttccccggccgctacagtgccggtctcgcgccgtctcgggtgcgcccagccacgccatgcgcgttggctctgcccgggttgaagaagatgacgccggtaaaagaaagaatgagagagagagagagcagccgggcccacctgtcaatggttcataggatttgctttagaaaaataatccggtaggaaagcaaatacaatcctaaaccccacatgtcagtcacttggagttttggataaagtttaggaataaaaataatgaattaggaacagtaccatttcgcaattattagaattaattcaaatttgaatctttacactagcataacttattcattttaactcggatttgagtgaaacttgaacctaaattcatctaaattcataagctttccaatgatatataattcactatttaataaaatatatttataaatattaaataattaatatcaagatgatgcataatagttaacttaaaaatgtgctaataaataaaattgatattgtactgtaaagtagatgtcaaataattgtccttaacacgctttctcactgtaaaacctatgtaaactaattaggagcattgtttcaaattaattaaagcataggaaatactagtgccatttattaatatatgtcaatatataattatactcatgacgtccaaattgtataaataatgtttagccgcatactttgtgactaaaagtggaacacacgtagatgagtctttaacttgtttatgagagataataacagagctactgtgactaaaatcacctgcacgaaattaattaacggcatttcctatacagtagtatatgtttaggttggaaatcgacccttaagttgtatagacggtaactcactcataaatccacttaaaatcacatgtactgtgtagctcgtagtaaatagcaactattcaaataaatgattcaatattaagatattgtgcacacacctatactgtacatcccattataactgtacggtatagtattaatttgcttgttgcatatattaaattagagggactatatgacaaacatgtatattagataaatactagttataaatcttgacctcatataattataattatagttcaactgtaaattaggattattcattgtaaaattatgtgatgggataatctgtaaccataatatgattaacctaaacaactctaacatacaaagcatggataattattaaccttttataatttattgtgacaagtaaaatatgttcataattaaagtaaagcctccatcaattaaataataatacaaatgattcattatttgattgatcctaaatccatctaacaatagaacctctggtatgtatccgtgctatttagatagatgcatatatagccataatccttccataaccatttgatagactaaaccaccgattagccaaatatatatgtataccataaatgctatgttggttaactcctaaatagaccacaatgacaacagaaagattaagaaactttagcccttagcatgattggaatccattagcaaacacgaatagtacattttgttgtgcatatttgattgttgttgaatactggtttttctcgcgtattatagaccttgtgtatcggttagtcgtgagacaacgtctgcaacttccaagaggtgaaggttgatcaagaattatatcaagaataaggattatcctgagcaggcaagtcatcactattccttgaacatgttgatcccaattgcgaaattgttttgtttacaaataaaattgcatgcaatgatgaacatcctacttgtgattatgccatgccttgattattgtttacccttaaatctttgtaaccatgattacgtatgagtccctagtcaactatgaccattgcttagaaatgctattttagaatcatgcatactcatatttatcaaatgctatatgcttgggcaattacctttgagaaagtaattgagatgcggcatgtggaggcatgagcgccacattgccatgatattgatgacatgatttgtgaaaggaaaataaagtgaaacaactattttcgactggggcggctggacgatttgggtggtgtccggaaaaggctagtgccgtccctggtcagttaaggaccgagccatgaagttaagcatgaaacgacccccgtacaaccgcacttctcgtatgggtattgacctagcggagtagatagctgagcggaggcagtatccatgcgtagtggtcttcttttaggtgtgtgatgcggcaagcagtctgctggcggatgtccggttcggatggccaggtggatggcggatgcccgttccggatggtcagaggctggcttggcaatactacatgaggatacccataagagaacaatcatgatggactgggttcaacgacaagaagcaacgtaggaatgtgtgtgtttttcccttcccgggagcgccagaactcctcttactgctagaaacgtatgacgcctagagtgcatgagggataaagttcatggagcgggtactgccaatgcgaggttatcgaaaggctttgccgtgacgcgtcttatgtgttgggacgaggctcatgtgttgggcagtcgcggagtgcgggtaaagtgtacatccactgcagtgtgagtaaaccaaatctattcgaatagccgtgctcacggttattgaacaccgggacgtgtattacacttggctagactctaaattcttaacttgtgtgggatgggttattgcatgacgatttttatgctgatggagccacttcctgagaggagggaaggtggacgtcctcagaaaaccatgacgactcaatggcgggaagctatccttgggatcacaatggatggtggacagaaccgtcgttgtttaatgtgaatactggtactaaaatttgatcagtctatgctaggtcttaggcttgtgaaaagaattacaaaacttgctttgcgcaaaagaaccatagccatcctttgaatacccctatcatgtgcattgttgctgtggtggcttgctgagtacggttggtactcacccttgctatttatatatcttttaggagagtgttgaagagaagcccttgtcggtacgcttgcgtatccaacaagatgatcagagtgcggtcttgttctaggtctcgttccccagtcgactgcctgtggcatgttaaccgggcccttatattattttgttttccgctgttgttctcggatagttgttggcctacctggccctaatgtaagtatttaactcttttagcctgaattcattcatgatacgttgtgatccaactatgtatgtgtgtaccaactactgatccagggattggtacggataaacacagaagatttccgatttccaaaatcgggggtctacatgggggttgttcaaagggcccagagaacagatagcatttcatctcgccatttacccttcgccgccccctcaagcctttttttgagcgcctcaagaatcttgtcgttcatgactgaagcgaacctaatttccaggtttagcccttcgcgcatttctctgaatctgtcagagtcgaactggttgccgttgtcagtgatgaattcttttggtattccgaaacgacaaacgatgttcttccatacgaacttctatactgctgccgaagtgatcgtcctgagtggttcggtttcgatccatcgggagaagtattcgatgactacgattgcgaacttgtaaccgtttcgcgccactgggaataggccgatgatgtccagcccccacctggcgaatggccagattggtgcgataggctgcaactcgtattggggcgcggtttggcttctgccatggcgctgacagctttcgcatttcctgacttgctcgacacagactctcagcacggtgggccagtatacaccttgtcgaaacactttggaggcgactgttctcgcggcctggtgtgcaccacaaagcccctggtgtatttctttcgccacttcttcgccttcggctaaggagatacagcgaagcaagggttggagcaccccggagcgatatagctgtcctgagaccagcttgtactttgccgctctgagcttgaggcgttttgcttctgcatcatcctctgggagccagccgttcttgaggtactttacaaacggggtccggcaatcctctgggtcttcgcccagcttcgcctggtcgattgccatgatgtccaggctctctatgggcacacttggtgtgtacaagacctcaaaaaagatgccaggcgactgcgggcccccacaagcagcagatttcaccaaggcgtccgcttcctcattctggcctctaggtaagtgttcgaccgttatgccggcgaagcactttttccatagatcgaacagcctccagatacctctgcattccttcttcctttgcctcaaaggacttgtcaatatgacttgccaccaacttagaatcagttcggatgagcaagcgtcgaacccccaatgctttcgccatttttaggcctagcagaatagcttcgtattctgccgcgttgttggttgtgtcgaactgcagccttgcggtgtaccgaatcggcacgccccctggcgaagtaagcactgccgcagcgcctgcccccttgtgcgaccatgagccgtcggagtacatcacccagggttgttcgacaggctcgggttcaggggcgaatgccggtgtccattcggctatgaagtcagccaggacttgggacttcatagcaatgcgggcaacaaaatgcaagtcgaagggagatagctccgccgcccacttgctgagcctgccggtaacttccttaccccggaggacttcacccaaggggtactgtgatggcaccgtgactttctgggcctagaagtagtgtttaagcctgcgcgaagccatcactagggcgtaagcaagcttctccatttcgatgtatcttatcttcgctccttgcaaggctttggagatgaaataaactggtttctggcccgactctgtttcctggacaagggctgcactgcccgccactggcgaagctgccaggtagagtagcagtttgcttcttggtgttgggctgatcaaagcgggcgggctttgcagatattgcttcagctcgtcgaacgctgcttggcattcgggtgtccaggtaaactttcccgctcgccgaagggtcttgaagaagggcaagcctctttaagctgcctttgaagcgaatcgactgagtgccgtaattcggcctgcgagcttttgtacttcgcgtacgctcgacgggggcttcatttgctgaatggcatcgattttctctgggttcgcctcgatacccctttcagaaataaggaaacccaacaacttgcctgcgcgaacaccgaaaacacacttctaaggatttagtttcatacccgccgcgcgtaagttgtcgaaggtctcctgtaggtgggacgcatggtcgaaagccttgcggctttttacgatgatatcgtcgacataagcctccacatttcgccccaactgcttgtaaaggaccttgtacaccagcctggcgaaggttgccccggcattcctcaggccgaaaggcatcctgaggtggtagaaggtgtcgaatggtgtgatgaaggctgtcttggggatgtcggacaggttcatgtggatctggtgctagccggaatacgcatccaaaaagctcatgagttcgcagccagctgtcgaatccatgagttggtcaatccgtggcaaagggaaatcatccttcggacatgccctgtttaggtctgtgaaatcgacacacatgcgccatttgccgttcgatttccgcaccagtactggatttgccagccactcggggtggtcgatctcttgaatgaccccagccttgagcaatgtttggacttcgccttttgctgcttcttggcgatcagcagacatcttgcgtagcttctgtttccttagcttggcatccggcttgaccgctaggtgatgcatgatgagatctgtcgattcccccagcctctggagaatgccgagtaaatgctgctgcgtcttcggctcctcgtaggtgcctcgaaagttaaggacaaagacatcacgcaattgctcccatgagtaattgttgttagctagtaaattgaagtaccaagaacgggcgatgccgtctagagcgagatgtattaccttcgccttggtattttcgtctccatgagcagcttcgatcgcggactcgtagatggagtggaactcctttgggtcagtttcgcctgaatagcatgggatgggtgcgaacttgaactggggtgggattggacggatcttgattcccccgctcagtggtacccccttttcgccccctgccctgttcacggcaccttgatgcggatacggcatggcgaaaggtgaagtcatggcttgcgcgtgaggctgggccacggtgttcggctgcccggctccgattggtgatgcatggtgagccacaatggatgggtcgaacatcggctggggccatgccatggcgacctggtttggtgcttggtttgctcaaagcctggcgttggggcttgcggccgaacttggtgcctgagcagcattgatgaagtcgaactgcggtccttgactccaaggcgacgcccccagacccaggtgattcgacggcaaccaactaggcacaccttggcttgtattcctctccggctggccgaaggggttctacctgaaatgatgtggggttggctgagttgttgaaggaaagcttggagcagcgcctgtagagtcgaagccccttttgccattgtttgtgacacttggccaggcggttgagggtgtacttgggtagcgaccggctgagcttgcagctgcacgtgaggggccagatgcatagctgcggtcgaaggctgcccgatgaagtatactggcgcttgcgtggcttgtggctgaaggggctggatcggtgcttgtggacagacttggggtgggacatagcctgccgaatactggaggattggggccgaagcggccttggcccgcctcaccgcctcgtacgcctgctgttgttcttgcatctggcgaagcatgtcttggagtcgtgtcatgttctgtcgcatggccttcatgtcagcttcggcttgtgttccgaggtcagggttgacttgtgcggcggcgagcacagtcgaaaccgttgccggctgtgacgaagtggcttggggcaacagcagttggcttgtcgaaaggatctccgccctggtttggagtgcccttgccgccgcgtcagccgtgttcggcacctgccccatcgaggtggcaggagccgaaggcggtagtggtggcgcgggtgctgaagccgatggcgctcccccatcttcggcgatgggcgccgagggttctgctccctctttggcggccatctcccctccgacttcgctttcctttcgccttgtaaacttctccttcatgaccctcttcggtggcatttgctctcagtggtttcgctcggaggtccctacggtcggcgcaagctgttgttgaaacgacaactgcatacgtcgaaagacgtggttactcaacagtggttggaaaagaagtaaagtgtattaaattgaggatttttcttcggatccccctattacatggccctagggggctatttatagccccattacacgttcccactactagggttcaggttatacaggggaatttacatagttacccttatgatagggacattatgaagggcacattgtgtcctttacccacacacgagcccccactgggcctaaatagctcggcccaccggcggacgaaatcccccgtgggcgtagcggcccgccgattctcccgtcaacagggtttggtgccatggcgaaacccgtgctcgtgtgccgaggctttcgccacatcatcttcgcctgttctgccttctgccaggaactccacttgacgaaggtggtgttacccaccgtcacggctttcgcccgtatggcttcgctcttgtctctcggtgtgagcctgatacttgtacttttcggtttcggcaggttcggccgaaggccttccatggcaagcctccaacacatacatatacatatacatagatatacatatacatatacatatatatgtatatatatatatacacacacacatatacatatacatatatatacatatacatatacatacatatacatatacatatacatataagacactcatatggggcaccattgtgcccgggcaccattgtatgaaatacacaaattcacccaattttttaaaaatttttaaattgtgagtatatacctagttataagtattcaattcatacctatacctagcaacaaaacaactcaattttaactttatttcacaatccaatattacatacctaattaattatatgtttggatgctatatacctagaatcaaattctaataaaaacatgtttaaattcagtgcaaacttgttttgaactagtaaagttgttaatgttaatacctaaacagttaaaaaaattttatactcatttcgaattgagtatatattcgatttaaatcatggagcctgggcatcatggagcaccaaacaaatctactatatacgctcggatggggctccatggagtatgggctccatggttgtgagacgtcggattgctgatgatcagagttaccatttcagtatattagcttaatgggtatacacccgtttagaatttattagtggaaagtgaatgaatgggagaatgccatataatccacgatacttatgaacagtaaatagtacgtttctatgcatgcatgcaatgcgcatgaaagactttccatatattatgtgcgtgtaaaggtcagaatggaaacattgaatgtccatgtaattggaaataatatcatggaaatatggaaactcactttaaatatgatgtttgaataaatggtaatatatctatgaaatcatgggtactgcatattttggaacatggaaactaagtatatggaaaacaaaagcatttttttaaaactaaatattgaaccgcggtatttgcgcgctttgatatatgagttgcttacgtataccatatattacggctgggtatatggtaatgtacccgtatctctttttgccatttacggtgttattaatttcgctattgctgcactacggctcactttccaattttagacacaaaatatacatgtatggtgtttggattatgagatgagatttgcacaaatttcgggcgcatatagtatgacattacttttatattttttagggtatatctgtacgtacatataatttttactagtgttcaaggaaattttaggaaaattgaatatttagatctaatagagaatagctatatacatgatgagtttggtctgcattacgtaggtacctacagtgtggtcgatgggtatatggggccatagtgaattctcagaaaaaaaaatagtgaatttgggtatgaacccaatttgcatgtaaatacatgaaaaatttaggtatgtgcccaatttatgtgtaaacgtattcatgaacatatacccaaatattgggtatgaacgccaaaaaaccctgcttattttccatactcgtttaagctaagtatatacccatttaaattgttatgctcgtttatattggacatatgcctaatttaattttttatggcccaaaattaggtacatacaattttttaaaacctgtttaaattgagtatgtgtct

SEQ ID NO: 7372 - DNA, 11341 bp, Oryza sativa
ccaggttatatataaaagtccactaaactttttataaacccccttaaagccgttacatgactcctacaaacgctactaacccgtcacgtggcgctctaataaattagagaaatctaaaaaattctgagaaaaaaagaaaaacatcatatcattgttacatcacctgctcactattttatccaaattttctagctagcagctcagcacataaataataagaaatgctatattaactatctattatatagtaaatatcaaataaactccctacaaacgctctcaacctatcactatgttgtgtgctatagtggcactctaataaattagagaaaatcctataaattctgagaaaaaagtaaaacatatagcccttaatttttacttaaattagtgagtccgatatttcaggccattaaattaaatctattaaaatcattccttctaatatggatctgatgcgaatggatggagagaaaggtacgatgtactgttcataaatagaaaaaaaaacaaaaaagatccttcctatcctatgcatatggatggagaggaatgtacgtatatatgtactacctaaaaaaaattattacatgttacgtttatatgaacgtaacgtacgatcgtatgaacagaaattaaaaaggataaagctgaaaaaaccaggttatatataaaagttcattaaacttgatagaaactctcttaagcggtcacgtgactcctacaaacattactaagccgtcacgtggcgctctaataaattagagaaatctaaaaatttctgagaaaaaaaggaaaacatcgtatcattgattttcacttaatatggtggacccatcattttatctcctattatctcacctgctcacttttttatccaaattttctagctagcagctcagtacataaacaataatataagaaatgttgtattaactactccctctgtttcataatgtaagtcattctaacatttcccacattcatattgatgttaatgaatctagacatatatatctatgtagattcattaacatcaacatcactatgaatgtggaaaatgctaaaatgacttacattgtgaaacggaggaaatatctattatatagtaaaaatcaaataaactccctgcaaacgctctcaacctgtcgcatgcgtggtgtgctacaaacactcttaagatgtcatatggcgctcaaataaattaaaaatcctaaaaattatgataaaaaacaaaccattcattttcttttaaataggtgaacccaataattataactactacaataaatattttttaaaagattttttctatctatattgattcacatgcataactaattgtacatatatgagaaataattaaagagagggctagcatgatggtaaaaaaaccaacgaaagttgttgagatttcttcacgaaagagagatataaagaacactcaattcaaaatagaaactcaattcaaaatagaaaatacgttactttaattttaatttattttgttagaactattttcgaaacaaactaatgggtatgcccgtgcaaatgcgcagagttgtagaaaaatatttcatgaggtaatttggttgtcttttagctttttatataattgaaacattttcgatttactaaaaatatgttcgatctactcggtgaaacttgatattttttcccgattcgggaatgttttcatgccgcggggtctgaagttcctgaattttcggaaatacgggaagtttcgaaccgaaatttcagggctgacggaaccaagctgccgcctgttcaattcctatttcagcgccaccttccctcccatcctcggcgtctcctcgaccatcatcgccgccgccgccgccgccgccggcggctcgcctcatcctttctccggccagccggtcgacctctccgtcagtttctccgcgccctgtcctactcgctggggtaaccaccgccatcgtcttgctactcctcttcgttccctacaaaatcctacgagccatttttcgttttggggttttggggttgggcaagggggaatttgagggctgtgatgataatgatgctttttcgttggtgatgccgctgatccagttttgcaatgggggatcgatcgacgccgttttctggatgaatccgtccttgaaatcggccattttacttttccttttttgggatcaaagaggtaaaggggttcttaatcttgtagaagaaatggccttggcaaagcagttgttaagtgttgtcgattaggtttccagcaatctgcggaggtggaatgatttggggactaatgtggttttgttatttgaggcctcaaagtctttagattggtgggtgaacataacggaaatttgtgtgattgataaatcaggtattgggatttgtggattggaggaactgggtgtgataggttatttttatcaacgtccgcaagggatttatggttcttttaggtatggtggcactggcaccagttaattaagggttcttgttgaggttgatcatttcttgtgctccttgttgaactgattcccgatttataatggaaatataggagaaaaaaatgtggaagagtggtgaaaattggtcttgttgcttttagtgaatggtaggagcacatgctttgcatctttcatataatcatattgcttcaaggaaataattgtgccctacccgtgagaaggaattggttgcatgttttagttgtattggcatatatctctgatgtctatgttgtaatagttcagagcatgagtgcatgacagcattgtgttttctttgcggatgtgcctgttgtagtggtagtggtagatgattcttttcctctttagaaacatgcagtccgtatatcttttaggaagtcatataacagtggaaattcatcatattgttctctagcccatttttcacttcgattcttcactaaactttcaatagttccagtgtgttttattgtttaaagcacaaaaacttgatgtttgattcttctgatgtagaagtaacaatctaatgttagttagtttgatgatattgggtgccttgaaattgtcgattccgttggattaatatattaatcaaagtatggtgagtgtgtggattacatacagcagccagactcttatatttctggaaactccgatccagcgttaagactagcgaattactctgttgtagaaaccagactgtaatttttaccgagtcaagtatttttttttggcgtaaactgggaagcttctttctaattacttaaacaagttttttgatccagccatttgaatatccatgtattggatgtgtattctgttacatattcagttagatccttgattttccatcctgcagatctgttcctttcatataatcccctcaatttcaaattcttgttccaaactttatcttttattatggagttttatcatataataatagtaattttgataggtttgtggtgacaactttgttcttattaaggtttgcagcatgtgtacgctctgacatgatgtagggtctgaataggaagagctagcacctgtgtggaactgcataataattttgtaatctgaaaaatgttacttacatgctaaattgtaattttctacttctcttgtgctttctatttccaccttatattaactgaaatctcattcttgttaccaaaagcgagctaacctatctcatgccatatctgaacatgcttgatcaggtccatccaagcttcaagatgacaacatgcaaattcatcacttccttcgcaccgggaaggcgcagcatcggaacgcagcctcccatggctgcgccacgaagcctttccacccgcgtgatcagctaccccgaccgccgttccgcgaccccgaccccgaaagccggcctgaggaagctctgagtccctgcggtggatctctacaaggtgaagctcgtctcgccgaaaggggtggagcacgagttcgacgccccgggtgacgcctgcatcctggactccgctgagacggcggggctggagctgccctactcgtgccgcgccggggattgctccacctgcgccggcaggatcgaggatggcgtcgtcgatcagcccaacgggtcgtacctcgacgatgcgcagcgggctgatggctatgtcctcacttgtgtttcctacccgaggtccaactgcgtcatccacactcacaagggaagagaagtgtagtggccggccgcgaacgagtcatatcacgttcgtgtccagatctcagatgttgagagacggtcttacaaactatagcttctgttagatagttgtccggaattaatgcagtatttgccctttttgccgttgatgatagattagcttgagttggggatgttggtgcattgaactgaattatttacatgctgatattactgggttttatggagggaaataatactacctccgtttcaggttataagactttctagcatttcccacattcgtacagatattaatgaatctagacatacatatattcattaacatatatatgaatgtggacaatgcaagaggaagtagaatacagtaaatgaactgaaaaatgctgagcggctgaatgcaatgcatagttttggaactcagctatatataattttattttttaactaatttctgggatcgtttcatcaggatatttgtaatttcccttgggtattttatccttatgcactactcactaaggccctgtactttggttcctgcttaagccatacatggaaaactatgtttttctataaatttggtcaaatttaaacaaaattaactattaaaaatttaaaatgctttataacataaaatggaggaagtagctaaactgtttcccccttcgatgttgattggtaaaaatcctgtcgaatatttttcttgtcagaattgctgctgcttcgaaggaggcatgcccggctgcctttttttcttttcagtttatggaccttgcattattagcaggagtttttcgaaaaatattctttattagcatttcttagaaaagattttaaggacaacttttcaactttctcaaataattgtcataacactactatgaaaacatttgtacatgtcttaggcttttattttcacatccggcctaaaatgaaaagcacccgttaaattggggcttagaagcgtcagagggtgataaaccaacctatttttatagacaattttttttaaaaaaaatctgatcatgaaaatagatctttcacgagtggtttccctaagtaactacatgtgaaaatcaggacatttatataaatagagtgattttatagactgttcttataaggaaagatgtctattaaaatacaaattttttttgttattttcatcatgactacaaaaagaaaaatgggaaaatcattttcatgggtggtagtggaatttgaacacgcaaaatcttgatgtctataggcccttagttgtacacggtttgataaataggtgtatgggttaccgaccacttgcaaaaatgtgttatgtattattataaacataatttcttccgttagctgctaactgctcctataatctctttaaggagattccatttgttattattctgtacattatgcagctttaatgtaaatttaggtatgtgaagaagctgaaaagtgtaaatttaggttacattcttttcggcttcttcatatactacatgcatctaaaaacataatttctcaaaaactttcttccgttgtcattgatttgagcacttattttggtttatttttaaaaatatttaatttatgcctataattaaatagataatctgtggctatatatatatatctatctatctattatctattctatacttaaaaatccgttatacttcatataaacgcttccagaccgctaagtggtacgctacgaacgctcttaagtcgccaagtcttaaattaatggacccatttgttttagatggttagatagaaaagaacatccggaaccaacgtcgtacaaacgtacgtatgaactgtacgtacttccctactgtccttccatattttcattcatgtgttattttctatttacaggcaaaaaaaaatcacaaatagactaactactaggtctagcacctctcgctgtttctaaatcactacgtggtactattaaattagagaaagtactagaaaatcttaaaaaatacaaagcaaccgaccatcaataccagctataattagtgacttcatagatcatatgtgtaattcggacgttatgagaaaaagatcattttaaaagtatcacggtcgattcgtataggaaagtagccctcaactgcatgttaaaagaaataaattaagttggtagaaagtcattagatgtctaatgggatataagtaatagatggaggtccatttgtatttttttcctatatagataattttaattttaattgtcaaggagataaaaaacagagagaagaatggcgcacactgtacacgagcagggagggagggaggtttgggatgtttttctaaatcattcatctaacaacctaagataatgtgccagatgtttatgtcaaaacctaagagaatgacgttacatcttagggcatttataagatgtgtacctaatggacttttaacaccacttgccacaaaggagggagggaagaaggtttagggtattctttaaaaaaaagatccaatgacctaaaataatgtgtcaattaatccatgaaaataatgtgtccatcgatttatgtcaaatatgatggttggattttttttccaaagtttctaagaattttcctctaatttaagaatgtcatatagttgcctagatgcatttataagatatataatggattttaataccgcatggggatagggagggacggagagaggtttggattttttcttattaaaaaactaacaaatagatagccaaatgttttatcctttttaaagattttctagtattttctttaatttaatagcaccacgtagcagtttagaagcattcataggatatttagagtgacgtagcgagagctgctagacctaataggtggaggtttctttgtgggttttttaatgtaaaaataattttgattttaatttatcatgaagatagctcattggtatgcacgtgacgggaggttccgaatgtgtgctttttctaaaagaaaagatctaatatataaaaataatggatcacctatttaagtaaacaatcaatggttagattagtgtgccacttgacgacctaggagcatttgtaaggtacaagttggcggcttaagagtatttgtaggatgtttaatgaacttttagtatataattgtctgttttaaaaaaaattcaaagattttctttaatttaagtatgtcatatagtaggttgggggtgttaataaaatggttaatggattttaacagtgcatgggtttggaaggaaggagaaaggtttgaatttttttattaaaaaatctaccaacctaaatccatcattttaaatagaaatcgatcgacggtggcgccgatggcgtggccacgcgggtgacggagagcgccgcggcgaggttcctgctggtggcggcgcggccgcacggtgagtccgcctcctctcatctcgcgtgccgccgcctcgcctcgtgtcgcctccgtttctcacgccagcgccgatcaccccagctcgggccccgtaacgttcagcctcggcgcagcggcgtcctccactgccgacaccatcatcgacgacgaggccgtctttggggaaggtgatgcgtccgacgaggccacggcgggtgcgcagacctgcgtcgtcttcgttggcgacgacggtggtgccgacggcgtggccgcgcgggcgacggagcgcgccatggtgaggttcctgttggtggcggcgcagccacacggcgaggctgcctcctcctcatctcgtgccaccgcctcgatttcccgcgccggcgccgaccgccccagctcggcctccacggcgtgcagcctccgtgcggcggtgccttccaccgctggcagatgccggtgctgcgtcttctccagcccactgtccatccccatgtcgccgcgcacctcctcgcccctgcgcgctgcccaataagagagaaagaagacataggagagatgaagagtatgacaggtgggacccacatgttttaaataaataaaatgctgactgaattgccatgcatacgtcatgtaggataaaaccgctctggattggaccgaggggggtaattcatcgggtattgaaagttcagggtaagtaatgtctggtttttgggttcatggtgtaattcggtcgaccacgatagtttaggggggtaattcgtattttttccatgtattaattaactcgtggatgaatttgtgaatgtataaatttattgaggttctatgatgtgaacttatcaatgaatatttgattttgtgatccttgaacatctataaacttataaacttattggttctctgattttctgattccttgatatgaacttgtttcatttttcattagatttccgatttatcgtttgtggttttgaggcatcggctcgtatttagccaaaccaagcctttttttttttacaaaccatactccctcactactagaaaactgatctttgctcggtcgccccaaaaccacaatagtcctggttaaaaaagaaccgggactaaagaggatctttagtcctggtttaaaaccccagagccattctatgatctttagtcccggttggttcatctttagtcccggttcatcccctgtcaccttgtcagaggggcggggatctttagtcccagttggtgtcacaaaccgggactaaagatcactttactaaagatctcctagatctttactcccagttggtaaaatcacgtgtagtatataatccctattccctatcctctcaccaacaaccggcctctcctctcatcagatccatctccctctcctcttcctcctcccatcccggcactctccttccccctcccttcccatctgatctctcctcagatccatctccctctcctcctcctcctccccttcctcctcccatcccggccctctcctccccctcctcccttcccatccgacgcccagcaagggccgcctcctccccctcctcccttcccgtgcccagcgggaccacacttggcaggcggccggcggggccgcgcccagcggggccgcacgcagcaggcgccgcgcatgggccgagtagcgagcggctacaggcagcgctaccgacatccatttttttcttttttttttacaatttgtgattctctgatatgtataattttgtgatttgttgtatggatctgagatgtataatatgtgatgtatttggtttgtgtgtaatttttttaaagatttgtgatgtatttgatttgtgtgtacaagtaacttaagatttgtgatgtgaatgttttggatattactttgatttggggtttgatttaggactatgcatcccactcgattggggagaaaatatagggtttaatctctggctaagaaacaatgaaaaaaaagaaaatgagacctaatgggactgctgctaccctatctttagtccgggactaaagataccaaccgggactaaagatctatttttagtcccgattatttcaaccgggactaaagatgggcatctttagtcccggattgctagtcccggttggaaaacgggactaaaggggttaccaaccgggagtataaatggtttctccaccagtgcctccggtttcattttaattgacgttttggacaatgacacggtctacaagatacatctttgaccttattttttctattataatatatataataaataaatgcatgtttacttttattatagtactttaaaagacaaatctatatatgttgttctagttcctttatactaaatatttttaaagttattgataatctaagttataaaagtttgacctcaactttatcccaaacgtcaattaatatagaattggagggagtatataccttagaggaaccgacaccattaacataactcctcgttagcacctgctcgatcgatgccggttaccaaatccgacaccatgtgaagttgataaccagcacataaaggcttttcgtaagtagtgcgtgcgtgcagttacagagctaatccgtgaccgtgatcgtctccacttcgatcgaccgtttcgtcgcggccacgaaatcgccatcaaaactgctgcatccgactgggaaaaggacacccccgtacacgagcccgactcgtacaccacactaccccgccccacgctataaataccagctctcgtcgtcctcctcgatcgtatcccaccaccaccaccaccagagctagcgcagcaaccgcgagttcagttcagttcagtttttgttacgtcgtcgttcgagtcgtcgtcggctagcttcgattcgaagaagggcaacaatgaggttcgtggcggcgtacctgatggccaccattggcggcaacgcgagcccgaccaaggacgacgtgcgcgccatcctcggcgccgtcggcgccgacgtcgacgaggacaagctcggctacctcttcgaccaggtcgccggcaaggacctctccgagatcttggccgccgggagcgagatgctcgccttcggcggtgtcggcgccgctccggcagccgccgccactgccggtggtggcgccgcggcagctggtgagaaggagaaggaggaggagaaggttgaggaggaggaggaggacgacatcgtgttcagcctcttcgacgacgaatgagctatcgaccttcgtcttcagccctgcatctacgtgccgtagtccacatgtcgtccgtctaagtttagtcgtagtagtatatatatctatttaatttgtttatttagtgtatctgcgcgtctagatatataatggatgattttataagtacgctaattaataccttcatcttatctgggtttgatgttgctgtgatctccatcgtatgacttccttctataaatgcaccagtatatatatgcacagtgccttgtatgaaaatatggcgcgtacgcgtgtatattttatatacatgtacatacaaatagtatagaattaaaaaaaaggaacttctatggataattagacgacgttaacccatttatcattctataaaagggagtagtggtggtggttctgctattatcctcactaccaattcctaacttatggggctacagagggatcacatgtcaatactcacacaaactcagtatggaactaacaaggtctacgtgtgagcacaaatatgtaaacaattaagagatattaataatatgttaatgataatactaccttcgttttttaatagatgac

SEQ ID NO: 7373 - DNA, 9019 bp, Oryza sativa
aaacactcacacccatcacatcttattagtatgttgctccccttcaacaactaaaagtctatctttgattgtcaattattcggaggtaataaacaatatctacgaagtcaatctcaaggaccataggccacacttgttccacttagaatgaactttctgagtaactatgacgaaagcattttcctcaaaaactgctctgaacatcaatagatcgtgaattttctatgaaactcaaacattccaaagtaaaggaattaaatccactcaataaaaaacaatttgttgggtgcatgtaattgaaaagaaataatcaaacatggaaggtcaagcaacaaaacaaacaacataaaaaatgaatatttagtcgcaaacacggttttcttaagaaatctgagatcatgaaaatgactatttgtactaaattcaagaatcacacgtaaagacaatggaaatatttagaacatggaccgagtataaaaccactttttgaagaaaatgcgtagaaggaagcatcctcttcgacttgatttttttaaaaaaaaagataacaaaaaggaaatatatcttttaccataaactcatgaaccaaaaatcaaagatttggagtttgtttgtcacctcaaactgcgaatccggaagctattctataaaaaaattcaaataaagattaataatcaaataagtgtgaacttcaatccaagaatatcaatactgcacacagttctgtgccatgtaatgaaaataaatcactaggtaaagaaaatcagatttgatacaagttgtccataacaagatttaaattagtattttcaaatagcattgtgcatatcaataatttataatttatcagtgcaaagcaatcacgcaacacttatgtttgaactaaaaagcgaatgaaagccacaaaagtgaaactaaaataaatatttagtgttaattcttttctgaaatctggagaatatttgtcacaaagtaataaatgcaaagtcaaatgttttccatttggaattatttcagaacatgtaccacaagtgagaaagttatttttttcatttcctcaaccatagtcacataatagaactcacaaaaagaaactaataagccatatcgcccttgaatctgaagactgaaaaatggaacttcctcttttttttttttgcctttcgggtgaagacatcactacgttggtgcgtcaggcataacacatagacaaatcacaccactgtaagaaaagaatagaatgagtagatggcatgggggccaatccatcccatacccaaactattaactcggtacgttgatagatgtatcctgacctaacactcacactcgggcaacctcacttggcattggggaaaaaaataaagagtaaaagtcccctcctctaaccacattacactgcctatatggaagaaaagttacctattcttaaaggatcattaagtcttataggatacaacattaattacttctataaaagagattaacacaagttagagccatgatcaaaatagtttaattaaggtctagggaaactaaaaccttatcatgtacactcacatacctcaagtataactcattattgcaaccccatgttgttctccctaatagctttccgaatatagttattcgcaaacgttaatctccacactatacaccgcaccaatgtatcaaaactgaataatttttttatacctcctagctttacttaatatacaattagatcttattcgtaaaagagtatatatatcgagtaacagcataactccagaaatcactaatacaatgagatagagatcagtaatcaataaaataaatcaaaagtgtgatgcaaagaatgacccaatcccatcctattgtgcaccagtgtgtcagattttattagtttaaatctaactcaaattttacttttattttccccatcctaaggaaaacatgatcaatattttaagttgtcatacttacttcccatggacctaccgcccgctctgataccaactgtaacaccccaggtaaccacgtacctagagtgccacaccaaacatactctcaaaccactaactcccaaaattattagaaatttcggtagagtctcccctgtaaatacggacatccatgacaggcaattataagttaaactaataacaataacattcccataatacgatccatccttataatccatggggaagaaactattagaaatctaaaagattattacaagaccaaaccatgatatagtttaagtatcattatggacctaggcaatatagtttgatagtgtgcagataaatgtgtatataagagtgctacttcccgcccatgcatgtcggtctcaatatgtacctaaaaccaaataaaacacaagagtgagtataaaaatactcagcaagtacaatatggaactagaaaacacatatacacatcattggcaataaagcatgaacaaaaggctttcttcctttgataggaaacacattttcaaacaccaatagttgaatataaataatagctttaaacaggatcatcatgctcaaagggttgtttgggatctgtgtgacttgccttgctggccttggaactcttcaaaatcttctcctgcaaaatcggactctccgggaacgtcggaatctaaacataaaagagcaaaatcaccaaaacagtacataaacaatcataaacagcatatgtggatatttttaacatgtagatctcagttttagaaaaatttagagacttgaaccaactaaatctgacctaagatgaatttgttatgaatttttaaagattaaaccggattgaatcatttatatagaattatttttgaaaaggaaaaaggatttattgcgttagcgggctcaggttcacggtggaccgggtgcacgcaaatggtctacgaaacaaacggctgagatctaatccaaaccgaacgaacggtcgagatcgatctaatctaccacgggtctacggctgacgtggcgctgacgtcgatgatgacgtcatcaccggcggcggctcgacacctcgtgctcgccggcgaacgacggcgcagcggcgcaaatagaccacacctatgggtagagggcgacgcggcgaactcagcgagggctcggacgacgacggacggcaactgacggcgacggcggagaggtcgaggcggcggaggcgttcaggtcgacgatgacggcgatgctccggcggtcttcggcggaaatggaggacgggacggggatggtgacgacatggcgaacccgacggcggccttcccgagcgacggcgacgacaagagcggcggcggcgcacgactggacatgcggcggtgacggcgatgcacgggctgacgcggaggcggtgctacaagcgacggcggcctaaggcgaaggtggtggcgaaccgaggaggtctcgggggtccttatataggggctagggggcggcggctagacccacggcgtccggcggcggcgatggaaggtttagggttagaggagagaaatcaaatccgaatcgagctcaaatctgatgatttccaaacaaaattagatgaagtttctataggggaaaagatagaggagatcaaggggatcatttcccctctaccaatttgatcagatcgggaaagatgcaaccgaatttggaaggggcggcggcggcttgcgcgcggctagggcgcggctggcggcggaaggaggaagacgaccctggcggcggcggcggctaaagttttgcacggaaattcccggatgcacttataatgggatggagggagtagttgcgaacaacccatttagaaggggagtgcttcttatacttgctctcccatagtacgtactcgacgataccccgcgctttgctgcgggatatatgttagatattggagaaatgataaaatgatttggattgaaatattatgaaaatgatttgagaaagataatttagcatgtgtatgtttagttttagaataaaataaattgtagacatgattactatatacttgcattgtggagctttgtgtgcatgcttaatgggttgacgtggtatgcttgcatgtaggttttaggagtgctaataaatactatgcttgcatgttgagctttagatgtttagtgggtattagctttatagaaacaagagatacctgtttctggatgaaaataatgtgcaccttaagatacattcagttctctattttgtgtccatgtttctataagtttctctattttgtaaccaaatctgtttctctatgtactcaacatgttaacatgtattccagcgaactttcagcgtattctgtagaggctttcagttgcatgatttggttaccatgaaatatgtctttattttttactaaaaccaagattaaggctgtgtttagataggcccaaagtgccaaataaatcggtgaaaggggtgtactcgggactttggatctaaacagggtgggaggtggaattcggccatttcgcacattaatggcccaaacagtaccctaggggatgtgtggcccgttatacctctgggaggaggcgtcggcaccgctcctatccattccccatcgcgtcgtcacacgcgcgacccctagcttgctctcccccacctccgctcactgtccaacgcgtcgccgccgcacaaatccaagccttcccccggcgaatcggagggtaggtcgtccatatccatcagctccgcggcggtttgtgggccaggatcaaccggagtgtgcgatggattcttacaacggtgacggcgacaacgggggcggctacggcgacggccatgacggaggcgggtacggcaacggtgacaacggaggagggttcgccgacggcagccacgtgagcgggtacggcgacggcaacgccgtgcgcgtattcggcgatggcagccacctcggcggatacgtgccggacagccgcttaggtgcgtacggcggcgggaccaccggcccgctatacggggctgagcatcgattcggcgccggcatccctactcgcgacttcctcggtcagcctctccatgcgtcccgagatggcggccacccgtcgttcagctcgggtggattcggcgaggggtcttcgagcagccaaaacccctctcgtctcgagttcggggcactcgacctcaactccggcgacgactggtcgtccgtgcacgcctacgaagaccttcttcgaggcggcggtggggagggaactcaatgccctcccggcgtacgcgttcctgcccgtacaggaaatcgcacgctcaggctgcgcgactggccaagtgctcaaggggcttctggatctggggcgtgacgtgcccttccgatgtcggctggaggactcggcggatcgcattccgttgctgctgggttcgaagcgccaatggctccgcattccgttgctgctgggttcaaagcgccaatggctccgccatttggaggtacaggcgaaggaggcgtcttcgtgcctccgatccggccgccagctccggctgcttctcagggtagaggccgaggtaggggtcgcggttcacggcctcggtagacacaggtacgtccgttttaagttcttgcaatgtgtggattggcaattgaacatattcttgtgaactgcttcgtttcattagttgctatgtattatagttgttgaaccatgtgaattaaagctactgcaatacttgcgaaatgtgttagagctacggttagtccgtatggttactgactttgactttgttgctcacagttcttttgttaagggttagttttacagcaatgacatacattgcagcacatattttagcattaacatgacatagtgagatgagagttcattgttataaagttgtttaatttgcattgattgataagtgcgaaggtcattgcttcgttcggtttacttgtgcatctaggatgtcaacgacagggcaaattggacaaatgagaacaccaagcttttttgcgagctttactgcaagcaaatagatagggggaactgcttaaggggaaccatgaataaaactgggtggaaggagatcatgaatacaggggtttgaaaaatatgtggacctttatacagaaattgcgtacagacactaggttaggccgcaggcctaacggtaccgtcgttgcttctgagaagtggtgggatgacaacacgaaggtacaaaaacttcaatattaagttctgcactttcattcttgctctttcccatgcatctgactgctgccttcgttttttccaaggccatcctgaattgaggaagctgaagaacgggatgcccgaccatctcgatgagctggaccgcatgttcatgggggtggctgtcgacggatcgacttcatttgttcctacgcaccgcgcatcccagccggccaaccccattgtcgatgttgaggacagcgacgatgacgaagagtccgacaaagactacttcgaccccctaagccctagcagcgttgggacgaagaggtcgcacagcatgaggagcacaccaagcactaggagcatggcaactagtccgagcaagaagttgaagagcccagccgtccgcgccgtggtgaaagaaatgcaggtgcgcaacaatcttcagaaggacaaagcgacatcaattgacaccctatttggccgtttagaccagaggagggatgatgatgacgctcgcgcgcggcaaaaggccgagcgcatcatggcactctgtagggagtgcagggtcacagaggcgacaccgcccttgtgggttgccatgttcaagctgctgaaggatcgagatgcaatcaatgtctttgagctgtccaatcctgaaggaagaaagaccctccttgagcacctcgcacgggtcgacaactagaccttctcatgcttgctttacatgttaatgtatcagccttagttgtgtcttttgggctgtgaggtgctttctgtgttagtggtgctatgtccgttagcattgtccttcaagtaatgtgggctactgttgtgtttcgaactatgtcatgcgtaatgttggcaattaaatgtaagttgtagtatgtctgtcgttccaaattcatttcttacttatgactatgtatgaaagttaccgttgttgttgtaaatttttacaggaggacgtgcggcctgatcctgcggatacaagcgaagaagtttccgacaaagatttggaaataattctggtggaatacttcatggacgattctgcggacaccacgttcctgtacggtgcgtattttatcgctactcacattgacaagtactgcaaccgctctgattatagagatcatagcacaactatgagtggtttggaatgggtagagcataagcttgcagataggaagcggtgttacaacatgtttagaatgacccctgatatgttctatagtcttcatgatctgttggtcgacaaatatgaactcaagtctagcacaaaatctacaagtattgaggtgttaggaatgttcctttggatgtgtggggctccacagttggttaggcaagctgaggacagatttgagtgctctctaggaacagtgcacaacatgtttcacaaagttttggcaagccttttgaagctagctgctgacataattaaaccacgcgacccacagttcacaactttgcatggaagactaaggaaccctaggttctatccttatttcaacgactgcattggggcaatagatggaacccacattcctgttcaggtttcgaaagatctgttggttcagcacatgtgccgacaccacattacaactcagaatgtgatggcatgttgtgactttgacatgatattcacttttttgcttgttgggtggccgggttcagtgcatgacatgagggtgttccacaatgcaatgagtacatacagtcatgttttccctcatccacctccaggtacacagctacctgttgtaattttgcaatgtctaacttccataacgtgtaacttacaggtgattaccgctgcagggaagtactatctagtggactcgggatacgcaaaccggattgggtacctggcgccgtacaagggcacgaagtaccatatcaccgagtttcaaaacgcgccagaaccagaaggtaaagaggaggtatttaactacgcacattcctcccttagaaatgtcattgagcgatcatttggagtactcaagcagaaatggcgcatattgaaatatgtgccttgttatccccgtgaaattcaaacacatatcatagttgcttgcatggctctccataattacataaggcttgctggtttaagggataaacactttggtcgttgcgaccgagatgagaattatgttcctcctgaggcctatgaagatcagccaccggaggacgaggctcctagttacttacaatgtgaacatatgaatgcatttcgtgatacacttgccctcgagttgttgcatcgagcatgagccatttcaaccctaggttccataaacttgttctctcatttatttgtatttgcacttgtcttgccatgtgcttcatgtcaccacatggaagtgttgttgtaatttgtgaggcttgtaatcttctcctgtaatatgtgaggacttctgtctgttacttgtgatgttagagaacattttttcgcgacggcatagtcatggatgtctagtgtttgtggagtactttctgacaattttcagctgagctagcaacatgtgagctccaaccgttgcaatgtaatttttcacagttttatctacggactgttgtaatttaaacttgtatgacaattatttgtaaggattgtttttgttcctattttttttgcatatgtgcatggcgtggatgtcagctcttcaattgtcatgtgcaaggtgcatgcaatttgacagtttgaatgtgtgtgcatgaaatttgaacgtatgaatgtgtgtgaatgcaagttttgtgtcatatgttttattcatggagctgcattaaatagggttacttttgtctcttttcaaatttcttcattccatccttcaaatttgggctgccaactaaacaccccttgcaaagtttgcaatttgatatgtc

SEQ ID NO: 7374 - DNA, 26651 bp, Oryza sativa
agatacgcagtttgcatatatcagtttttctgacagatattctggtagtgtgccctgcattgggttaaaaaaaatatagttcatggaatcaattcctactgatctagaactgaatataccaccaacagttctcatgcatccacattccattagtactgaatataccaattccatttaattacaaatgccatgtacataggttagttgtacaaaaagagattctcctatacaatctacaaaatgagacaaaacgatggcaaatctacaacaggcaaggcatttcccttgtagagaaatgccactccaaaatatcttgtgaccgccatgataagttgagcatctaaaaacttgaatcagattatcagaaagacaaaagtattaagggtcagatatatagattataataatactccattcaatgttaagtaatctatgcaacacctactatttcaatacagaattgaagatcagtgtcaaatgtgcaggataagtgtcaataacataactgatgtagttccatttaattcaatctgtagcatagcttcgatattctcacaatccaccaatattaaattaccagttccattttatgagaaatttatgttgaagcagtataattgcaatcgtaacagattcaattacaatttacaagcagcaaggattgcaatttatctcacaaactatgggaacaaactgattttagcttacatgatgtatgagcctttaagttagtgttgatcttctgttccttcaggtacccttctctgacacttcagcaagaagttgattgctcacccacaggtcgcaaatcatagctagtaaataaataaaaagaagataagtgctgaagtacagtttaattggctcccacttgcaaatgttaacttatattagaattgagatgtatgtaggtgacattttcataattaatgtagatggaaaatctgaagcccgaagactgtttcaaatttgtactacgacaactcactgcaaggacagctagccacctaatttgcagagatcaactaagggagttttatttaaaataattatactaggatggtacattctacaagtaaaaactcagtaaacacacaatgtacatgcatatttctaataaatggattgatataagttggaaatggcttcactagtaaatagaacttggcttgagtagttgctgtactatgtggtgcatgcaaagttctcaattagcatttcaattattccaactggtcctgatagctgatgcatgtctgtgtgaaatcaataatagatcaaatcttaaaaaaaaatgttcaccactctttctagtacatatataataatgtctgccatgaaatgaaaaggaaatggagcaaacataatctccaatttattgaatagtgcatcatatagaagattagcacttaattgttaataccattgaagttcttgtaatggaaaagtaagcggaaatctaaaaatatgaacaattatccgtttttcaatttgatacattagatcagacagaaaatgtccataatgtggtacactacatgagaaatagtgcattttcttagtactaccacatttctgtaaacattacagctaacttcatgagaaatataaagcagaactggagcattagctaagattcatggggaaaagagacaagtaggttcaccctaaactcttttgcaccagtattaagcatggttgcaatgcaagtttccatcccatggctatgaatgacagccccagctctcatcaaataagcctgcaaaataccaatgaaaattagacagtttagaacacactagccgaatgtgcgctctttctcttttggcaaccatgattggacaatcaataaatgagaattctataaaagctcctaatcaacaccactcccgaatacggtatgctcgatcctaacagaagacacgagagtagccactgctcgattaaccgctcgtgagggggaatcgagtgcccctcgcaggcaattcgtcgaacaggagccgtgcaggctgtgatgagagagagagaggggggggaccttgggtgcccagaggcggtcgtcggcggcgacccagcgccaggtgctgcgtgcgtccaggagctccatcacccgccccatcacctcctccccgagcacatccacggggtcctctcgtctctgccgcctcctcctcctccccctcttccgcctctcccactcctccgcctcccgcttccgccgccgccgccgcccgcgccttggttgccgatgacgtcgcctgcaccttgctcgccgccgccgccgtcgcccgcaccttgctcgccgccgccgcccgcgccttggccgccgatgccgtcgccttgccgccgccggaggaagcgtgagtgcgtgacggctgggtagggaagaaaaggataaggttgtggggaaattagggtttggtttatatatgataggctagatgggctttttgggcttgcaatatagtattattaatagtctaatatacacccactaagttttgctgacatataattagctcgtactcttacaattactgacagatattttgaccaaaaatatatttagaattactgacatataccatgtctcattatgcactattgctgacatatagtttgccaaaaacctttaccgacagatatgttatcactaattgtttatttttgccaacagatgtctgttggtaattccatgtcatggtgtagtgccaaatttatgtgtaaacgtattcacgaacatatacccaaatattgggtatgaacgccaaaaaaccctgtttatttcccatactcgtttaagctaagtgtatacccatttaaattgttatgctcgtttatattggacatgtgcctaatttaactttttatggcccaaaattaggtatataaaatctttttgaacctgtttaaattgggtatgtgtctatttaattctaaaaaaatagtgaatttgggtgtgaacccaatttgcacgtaaatacatgaaaattttgggtatgtgctgttccttttgacttaatcagcaattatgctagagatttagagaaaacgatccaatgacacattgactaatcaacattttttaactaatttctgggtatcccatcggtaatacactcataaatatacattattcggattggatacggaaataacaaaaatggggcactaattaaagtatagtaaacactgtttcaagctaaatgccactaattattacactgtaacacgtaaatatcaaactctacaagtgatgcttagttctctgatggcttgcatttcttgtgtaccctccgagatgcggctttcggctgttagtgggttgctctggtttgtttacacttaatatagcggctatgtgcagtagacatgctctcatgattttgatgatgaattttgccataattgtgtgatcttcaaattggttggtaggaggatgaacaagcaacttattaggacgatccactcccatcttgaggtcttcaccatcaagggaaattgtttacacttaacctggaaaacggtagaactcgtacgcgtacgtaaggaaggatataagaatagattgaaacaaattacccatgaaccatgccggcgaccgccggtggtgcaacggacgtacctgacggacaaccggcagcggtgaccacgaacctcatggacggcggatgatgacatcgtggtgacgaagcttgcggatggcttgcgacgggcgacgaattgaagctcacagatgcacaaccagcagcagccgcagcgactaacctcgtggacgaccggcggcgtaacgacatcgcgacggagctcgcagcatcacggctgcgacggatgtacgtatatacctgggcatctaatctgaattctaaaatttagaataccctcggatggtatatatatacatatataaaaggaaacgtctaaattcatatacacggagcaatcaatccaatgtaattaacatgcttgattttctgaacgtatttatatgtaatcatattcaaaattcataattcatttggaaatgcatgcatgcaaaataaaaaatggaaaggtacaagataccctgatgcaaatatacatggaaagcaatcaatccaacgtaattaacaagcttgattttctaaatgtgattatatataatcacattcaaaatccgtaattcatttggaaatgcatgcatgcaagataaaaaatggaaaggtacaagataccctgatgcaaatctttcttattgggttaaacccgctaatttcattaatacccagtttttggtttgcacgaatcctaaagcagttgcacggtggatgacgttggagcatgggctccatggagcaccagttaatttacctatacatatacatatacatacatacatacatacatacatacatacatatgggctccaatgttgggagcctttggatggttgctgatcggttgatcatttgagtgtatgagcttaatgggtataaacccgtttagagtgcatgatttaatagtgaacggattccatatatttgaatacattaaaaaaggaattggatgagagaattatcataattgcatgtacattttaaaaatagaaacattaaatgagcgtgaaattggaaataatatcttgtaaatatggaaacttacgtgattgcatggtgaggtttgaataatgataatataatggtgaaaaatggaaactgactatatggaaaaacgaacttttttttttgcaaactaggtatgtaatattaaatactgatccttctcatatttggaaacatgaaaactaattatttgaaaacatgcatactatatatcgcagcacatttttatggcaatgtatctgtaccaaattattccattcatgatgccattaatttagctatttaagtcacaaagtatgcattgcggatcactttccaagttttaggtgcaaagcttgacatatactcaaaaattgggtatgaaagggaaaaaaatcccatgtaggtatatacattgtaccgatgtacatatgtaatatagtttgatgcgcgtgtggcattcgtgtaggtatatactaaaaaattgggtatgaaagggaaataaatcccttgtaggtatatacatagtaccgatgtacatatatacgtaatatagtttgatacgcgggtgacattcatgtaggtatatacatagtactgatttatatatgtaatatatacactccttattagtttgcatgagcttggaagaaattaaagtttgcatgaccatcgaataaactatcacctttttttttctggctatgtaccattatgtatctaagtataatatacctactgtgtctgggtatagaaaaatagtggtttatagaaaaatatagcaatattttcaagtacctattatgcgtactgtaattatatatattcgagttatatagcaacattattagggtattcgtactatatttatatttttaagtctaatgtaccatatatatacctattagtacctacccaaaattacggggtgcttacccaaaaatttgaagttatgggtatgtggatatgcatagtgttttagttaggcacttatataccttgtttattaatttaaactgaactcaaaactatagatgtccctttttttaattattttttatcatagatacatgccattgggtatatacctgattttaagtagggtgtatatccgtttaaattgggtatatgcctgacttttatattcttttaaattaggtatatatctaatttaaaatacggtatttagctgggtatatagcattgggtatgtgccattgggtatgaggcgaaagcagtaaagcactaattagcgggtactgtctccatttggaatatacacagcagtcacaatattgattcaatgaattcatgataaagaacctcttgtcacaatatatttttgatgaaaaatacaccaaaagttattcagatataaaataaaagaataaactagttctgaattaatctatacactgttctcggaggataacagcaaagcttgcgaacgatttcgccacgaggcaacgacgaaaggacatatacagcaagaataaaaaaaatgataacctgtagctggtcgatcctaacgtacatggaaactgcaaaagtcatattccctcccttcttccttttttatatgaatcaaataattcaaattgaaagtaacggagtgaacgacgaacatcatatcatggacgaccggcgccgacagtggtgacgaacctcaccgacgactggtgatggcggtgcatggcgacgaagcacacaatgacacggctgcgcgatcgtggatgaccgatgccggcggccgtgacgacgaatctcaaagacgacctgtgcggcggcgagcagcgcgtggcgacgaagctacgtacaacatggaagcgcgacagaacatgtgttacgctcccagatcagtaaaatacttttgaaaacgaaaaatcatcgatacatatataaggtaccttaaaaaatttccatggcgaggaacgagcttgagagtcatggacgatcgacggcgcaaaaaaaagcaactgattggcgtcggagacctggttgtgcgttgacgaatctcgcgaacgaccagtagcccactacgaattaagaagctctctcccacgtccggccggtggcgcaatagcttggcgatgaataagctcgccgacgtccggccatcggtgtatgtagcattgagtcgagagtggagtgtgtcatctctatcattttacatgtacacaaagaatggaaagtattaattggtatgatggaaataattaaatcaattacaacgtaattagtggatttacatcgaaatttgtggatccaattcaatgtcatctcaaatatgaaaataaattatcacacaatcatatggaaataaattatcatgcaatcaccagaaaattagtacatgcatgtttgctctatggaaagggaatcgcatcatgtcgtgcacacgctgcatgcaaatcatgaggatacaacaaaaatagaaaggtctaatcgggtttaacccgttactatatgtctaacactctggttttaagtagcacggatctcaaagcatagtacacggtggattctcttggagcccatactccatgtagcaccagctaatttacctctatatatatacacatgcatacatacatgcatgcatacatatacatatacatatacatatacatatacatatacatatacatatatatatatatatatatatatatatatatatatatatatatatatatatatatatatagatatatatatatatatatattgatgtgtgattccttttagcattctttttttaataacaaataaaatgcccgtgcatctgtgtgaaattcttttccgaattatattctagaattgtactccagtttatatcatgtcattatagcatttgaaacacaaactataatacatacccatgtgaatgtgcgggctatctttcttaaaaaaagcctggtgtacaactggggccactgcttttctcaaaaaaatgtgtattccaaatacatattgttatatcaaatagtaaccatgatacagaccaataaccatatacgataaggaagagcttgtcagtaaatccactcaagaagaccaccttccaacttcccaatgtttactggtgtgtagtcccagcagaggcacaaaatcatatgattttagccttttgagcagcagaggcgagagatgtggcagatgcctttcctcctctacttgtaccacctaaagggcacaaaacaaccccaaataaatattagcacagggtttgcattaatacaggaaacaaaaatcattgaagcatcacctaagctaaaaattgaatctgacatataattacattgtcagaaatatctatagtaaattgagaatcaaatacacgtgatcatattgacatgccatcaccaaagtaatttatcctcaccacttaatttattgtacataccagtatttgcaatgttctgctgcacacatatcgtgttggttgtgcaatggacatgatgatgaaatcaacactgcctaacaaacatagaatcatttctcagagtttagttcatcaagcaaaatcaattttagagtttgtttagttcaggatagcaaaatgatttcagatttactttcacatctttgttatccatatttttatatacaaatacaagtaaattgttgctctgatcttgaggtcacaccgtcacagactcatatcctgagaggatttacaaggaatcaacagacttacaacataaatgcatgagcatatggtttacgagcaaccagctatgatcacaaacatctgcttcttttctgtttttttagtagataagctccacccatttaaaacccatcctttgtaccttcagaggagcagctacccattccttttaccacaaactgaaaaaattgtttagtcatctcagaaatccaggtagcaaataagattcattcgggcatgtcatatgctgatggcctcctagcacttacaaatagaaaatgtccataaccaactaattcggggagagaccaattataattactagttgcccacccatgcattgcacgggttgaaaaaattagtaaaaatctaattaattagtttgagaacttaaaaactcaacaattcatcatcaatgtaaatcataaaaaaagtatcaccatgagcattgtgcgaaatcttaaataataaaacatcatttttttcttattgtattgaagagtttttttttttacatttgcaccatatgtccataatttgtctgatttaagggtcagcatctcaaaatccaaatttatgataagtgatgatgttagtactggagactggaaagctcccgtgtgacaaaaacacacggtaactagccaaaaacgccccggaacagcgttaccgtgtgccatcacacggtaacgaacacacggcggcttcaccactttaccgtgcgcagttcccatggggatatgcaaaaagcgcacggtaacactagggaccataccgggtgtccagaaactcacgggaacacctgtccctaccacgtggcaaattttaacgtaacggagttcaccgtcaaatgaacggtaggttcccgggtgaaccaaaaacacggtaacataccgtgcgctgacggaaactctcggtatgctccggtgtgttaccgtgcgttatagtataataaacacacgggaagcaatcgttactgggtttgtacagtggatataattattttttatttctgattttcatttagtttcttttttattgtcacttattgcatcaaaaaagaaacaccacatgctacatgcaccacagctcacatccatataaggtgaaaccacataattcaccaaataaatttaggtttcaacatacacatgttaattaaagaaatatcaaagctttaagacaagctagcttgcctactctacaaattcagacagtcatgtgacatctcaacagatgaagcagctgcatatatttcatcttaatatatctatcagccgaccaaagcaacaaattcttccatagatcaataattcaatatcgaatcagtcaagatgatgggtggctgctgtttgtcaccttgagttgatacatgagtgtagatccttgcaattgttagatactggtaaggagacaagatagcaacacatgtgtaaaaccactgtgcgattggtagaaacagaatggatatgaaattctagatttgacatatgtttccaataattggtaaataagaaagcttactgagcagtgctgaaagaaaaataatctagcacaagataaagttccatgggcataccgtttactttaactaaaaacaatttaaaatgatagaaaggcaaggaaatgtaaacttgtttatcgacatgaatcctattaataaactattagaatgtgataatgataaattaatctacagttgctcactgaagtctaaaattacttactcagcttattgcaggaaacacccgagtggaatactagaatccgcacatgaaaagaaaaacagccagcatgaacagtagatgtcatggacaggatatgagaagtgagtattgtttcagtcagttaccaataccaatttacactacctattagtaccaaagcaattactgcaattcattcagttacaaatttacagttgcactatgggagtgaatttctgggcttcagtatttaattcatactaccctgtttttacaacaaggcaacatacatgttgagtgaatgactacgatacaaaatcaaaagcagtactcatactattgtgtttcaaaaatgagatatatagtgcgatagtcagcatagcattttattgggaaaaaatgttgatcacaaattggtgaggcactttggagaactactgagagattgtataaagagcataccacatcatgagataacatgagctttaaatttttgcatcatatagtgagataatataataatcagggaaaataactgcacaaatctaccaactggtgatgagcacgagctagcatgcatagaacacgaccttttatagttataaatgcaaaggacatgctgtgaagtgtcaacttgcagccattaagacaaacaccttgtaagcataattcactgtatcttgtggactgcagttttgctgatttcttcactgacccaaccaacccaacccctgaatcatgtactgagaaaggaatgcagtatcatttgcaatcacatggatctactacttccccattgcccagttgccgaagagacgattataccgttcgaaaaaaaaaagtttcctacttgacacacaccaaaccaaagaataataaacattaactgacgattgatccaatgtcgaaccctaaccatcgccgcaaacaagtagcagcaatacagcattgcatatgcgatttcagaaaatatatataatggattggtaaatgccacgctcaagaacaaaatcaagaatttgccaaaaatgccttgatgctcttttcattcccttctggatggatgcaatctcgtggacaggacaggtgtaacaatccgatgcaaaacctacttttgaggtttcgaataaacatgattacagacattgatgtaactgcaaagggaagcaaagcatgatgatatatatagtgtgtcatggtttacctgatatatgaacgtaagaaagaagatacacaaaggtaaaacatatgagtttggttgatttaaattaactgatatgttttattacccttgaaaactacaagcatacgaaataaaattattttgattttattgtctgatttgttgaacaaataaaccaatattcggacggctaagcctgcccgatcgagtggttaaatcacctatcgacttttttaattgataacatatatagcatttgtcttttccttccagcatacaatcaggtgatgctcaactctgccaatgattactcactgagacactggttcttgcaatatcgtctaaagaaatctgtagctgtttggcactagacaccactcatgaagatgcagtacaggtttatatatattttttcttacagaccgaaaactgcactatgcatgcataatcctttttgctacacaagctaaatcacatgaaaccttattatgctcaggtgttacagagacgccagtttattacgtctatcagaaagatctgaagaaaaaatactaaaagatgtggtgcattcagttcagcttctggaactgaagcaatttttttccctggataaagattcagacatggagatgtttggttctatcaagaagctgaagaaaccagactaaatgaaaagcaaaagaaggggctagaagtgatgaatggatttgatactgagaagttggaatcatgccaatgctcttgatttgcacctaacgaaatggattttcctcctcgagttgaactcctgtttttttaacttgaattcctgatgcttctccttcttattgtgccatttgctaagatttgttattgaatctttcatcaggctagatatggaattttcattgttatcgccctgaacttccctacagttcttctcaaagcagagaactgccttatttggttctgaaggttcatgctatatatcacttgtgtgtagtgtgatgatttttgttgcatgtaaataagctgcatgctctttacttaggctgaggcagttaaactgtgtgcagtcgtgcagagatgcctatcatttatgattgagattacgacgtataaatttagacaaactttacaacataaatattttttcaacattctggagactgaagtaatcaagattaattaacacggatttaccatcacaactttgttgcaagataggaggatggccctagttgtcattgatgactcaaccaagctatcaaagatatttcctggcaataaaatcaaccaaatcatctaattaatactattaatgtttgctttcatctaaatacataatatttcctagcaaacaaatcaacccaatcatctaaaaagtgctctgctaatatcttcagctcagaacgaacagtcttgaaaacggctatatatgccaggcgttgctcagagggttgtcacaacatcaggctagcttctgtcacttaggtatgtagtgaatacgtaagaccacaaaaaccagagggggggtgaatggttgtagtaccaaaaaccaaaacttttagcggaattaaaagttaccctcaattcgatgtcacacggtcagaccggagtagatgcgctggtctaaccgcatggaaaccaccggtctaaccgctgtagtcgctccggtctgaccgccgaaatctgctactgtcgtctgtagccgccgccagtctgactctgactgccgttagtccgtcggtcagaccaatccgatgtcgtcggtctaaccggtggtgtcttgccggttggaccgccgaacccgagcaaatacaaatcgaagaactctcaaagtatatgacaactttattacttctctttgtgtttataaagtgcaacaacagcacttctcacgaaaatctcgagtactaaacttgaaaccctaactattctcccaactcaatgctctctaaaacgataccgggaggccacacccttcttctctatatatacccgaggtaggcagcctaaagccacgaaccaaacttgtacaagaagtcctaatcccctaggaaacctttctgtataagaaactaactttacaaataacaattgtaccaaatttggactccctccaaattcgactccgcaccccatacgcacacaataccttcatcgtatgccatatagaatcttcaccaaccatgtgcattgatctttagcctaagtatctgtcacgcccagaatttctatccaaaactccaaacgcttacatacgtgtaaaccctcgtccaggaatcagctgagacacacaataacaaattgataatagagtgcaattattattctatttaataggcgaatataaagtcattacagaggtagatagttcctctcaaacaataaagatctaagcagcggaaaataaaataaaaagcgtaggcgactccatcccacaagtagctagaccagggctacgcctaatcctccacaccttcagcatcactgtagaactcctcctatgatgaatgattgcaaggtgagtatatgacatactcaacaagccacgcagcaaatatgcaagtgcaggggataacaaaggattgcataatatagtcttatttgcataaatggcattcaataaatacttaagaatatagaaaaaacagtaaagtatttaattaaacaatattaatccaacgctatacaacatacccgttgtataggtccaaccattctgaacaaccattcccggctgcacagttctatctccaaaccaggaatataccattccaaaccaggagctaaacaagttattaccaattacagcatcatttattatggtgagaggtatgagactaatcacgaaagacattgttagacccgcccataacagcggtgtggagattatggataccccatatctacatggcatgtatagtacgactaggtacagggtgccatatatagatagaatatctttatgaggactcgggttaagtttaaacttgtatgtcaaagaaatatacgagatcctagtcggtgacgattgtattttatctgtaattgcatattccgttagggatatggactgtattttgtaatactgaccccttcccctatataaggaggggtccgggtccctctagggacacgattttctcccagatcatacgatcaataatacactcggcggatcaatccctggacaggagtagggtattacttcttgattaagcaggcctgaacctgtataaaattatttgtctccaaacccatccacttttctagcttggtagccacccccttttagtattgccgaaatcttgtttcgacagttggcgcgccaggtaggggtagcgtcaagttcttcgccgattaagtgcgatgggttccgtctccggcatcgacgacttcgtcttccctcccgggcaagcgttctggttcagcagcctcgacttcatcaccaacgacttcggcaagatttctctcctcgactcggattcaaatcagtcagggagagaccaggtcccagccccgttcggtattccgaactcggccgagatctaccccaagcttatctcgatcaagtcggctccaaaccacttggacgagatcccatctacttcaacaccaccagatcaagatgatggggcctacccgccaatcctgatgaaactccccgacgatctggctgtcgtcttcactacaaggacgtcttctccccgtaggcctaagcgggatccggctttagcatggatccggcctagctccagggaagtcggcgtcatactccagccactcggcacgatttcgacggatcaattggaaggctacttcagctcccccggcgtcgactcacgaccaacagagatcgtagagtatgattaattcggctacctctatgacaaccgtgacctcgacgacttcaacgaaagctttgaagataactacacccctctctatttcggcgtcttcatggccgataacgagacggaagaacaacgccaagcccgagaagcagaagcacgacgcgtacaataggaggccgagcgacgccgactggaagaggagcgccaagcacaagagcaagaacagctgcagcgtgagcaacaggaacgtgaacgggttgcaaaggaggctgaggaccgatgacaacgagccttggatgtagggcgacgagcgcgagatcttatcaggcagcaaggcgttgaggggacagcggtcttctgcacccctcaacagaacgcggttgcggcgatcactctcctcgacaccctcctcaaggaagacgcactcaaccaagctgatcacgttatcaacatcttgaaccagaccaagaccatgattgccgcctcggtcccggttaactccgcaagcgtccgcacgccgactggtagccgagttccccatcttcggtctcaagattatcaccagccaagcctcagcattgctggcgcgggatacaattgcaggagcaggggccacaacgagcgatctgtccactcgcctcccgaacgacacagggagcgccgagttgaacggcctcgctccccacctcgtaggcgccccgtcaatcttcgtgatacaatcaatcagcgccgcgtagcacgaggctacgcgcaccgccattctccggatcgctatgacgacgacgtggatggagttgctgcctttactaacgacctgcgtcgagtggattggccagccggcttcaagccgactagaatcgagaagtatgacggcaccactaatccggagtcttggctcaccgtctatggtctcgcaatccgtgcagcaggaggagacagcaaagccatggcaaactacttgcctgtggccctagcggattctgctcggtcctggcttcatgggttaccccgtggcacgattggatcatgggcggagcttcgcgaccacttcatcgccaacttccagggcacctttgaacgcccttccacacagtttgatctctacaacgtcattcagaagtctggagaatcccttcgagattatatccggcgcttttctgaacaacgcaacaagatctccgacattaccgatgacgtcatcactgccgctttcaccaaggggattcgtcacgaagatctagtcggcaagttcgggcgcaagcctcccaggacggtcaagcagatgttcgagaaagccaacgagtatgccaaagccgaagatgccatcatcgcgtccaagcagtcgggtcccacttggaagccaaagaaagatacgccgactatgggagggggtggaagtaccaatcacaaggaccgtaagcgtaagcccgaggaacttgttgcaactacttttgacaatcacattcctcccgacaacgttcgcgcgtcaatacttttgacaaggtcatgaactcccaatgtccgcatcatcctaactccaatcacgcagccaaagattgcttcgtctacaagcagtttgcagaacaatacgccaagaatgcatggaaggcctccgacggagatcaaagcacgtcaaaaaagaaggacgatgacgacgatgccccgacaggttttcaagaccatcgcaaggagctcaaccacatctttggcagacctctagcttatgaatctaaaagaaaacaaaagctgaccgaacgggagattaacgctgttcaacccgacatgccccaatatcttcggtggtcagagacaacaatcaagttcaaccgctcggatcatccagaccgagtggtccacccggggcggtaccccctagtactagacccagtggttcgcagtgtcaagcttcggagatccctcatcgatggcggcattgcactcaacatccgcttcgccaagaccctggacgacatgcagatacctcgcacataattgaaaccgagtaatgcgcccttccacggagtcattccagggctatccgctacaccactcggccagatcactcttccagtcaccttcggtactcgggagaacttctgcacagaaaacgtctgcttcgaagttactgatttcgagacagcgtatcacgccatactggggtgcccggcgttagccaaatttatggctgtcccgcactatacctacatgatgatgaagatgcctggtcctcgaggagtcatatccctgcggagcgacatcaaacaaaccgtcacatgcgacaaggaaagctacgagatggcccaaacccgagagatcgcgatcgcccgagaagacatccgactggctgcaaccacggtaagcgaaggagaagtgcctgcaaccaagatctcaaagagtggagaaagcgaagccaagaccaagaaaattcttttagatccttctgatcctactaagactgctgtaataggcgctgagttagattgtaaataggaaagcgcactcaccacctttcttcaaaataataaagatatctttgcgtggaaaccatccgatatgcctgatattcctagagaggtgattgagcactctttacatgataaggaagacgctaaacccatcaaacaacgactccaccgctttgcacaagataggaaggacacgatcaaggaggaattgaccaagctgttagcagcgggcttcattaaagaagtccttcatcccgactggctggctaacccagtcttggttcagaagaagaccgggcaatggcgcatgtgcgtcgattacaccgacctcaacaagtcttgccccaaagaaccttttgggttgcctcgcattgaccaggtagttgactcgaccgccgactgcgagctactcagttttctagattgctactcaggatatcaccagatccgactgaaggaatccgactgcttgaagacttcattcatcacgccctttggggcctactgctatatcaccatgccttttggattgaagaatgcaggagcaacttaccaacgcatgatccagagatatttttcgactcagatcggccgcaacgtcgaagcttatgtggatgacgtagtcgtcaagaccaagcagaaggatgatttgattacagatctagaagaaacctttgcgagcatccgcgctttcaggatgaaactaaaccctgaaaagtgcatcttcggagtaccgtcagggaagctgcttagatttgtggtgtcccatagaggcatacaggccaacccggagaaaatcaacgccatcctcaacatgaaaccgccgagctcccagaaagatgtccaaaagctgactggttgcatggcggcgctcagctggttcgtttcacgactcggcgagcgggggatgccattcttcaagctgttaaagaaagcagacaatttccagtagggacccgaagtacataaagcctttgaagacttgaagaaacttctcacctctccaccagttttggcctcaccacatccgcaagagccgctattgttatacgtgtcggcaacttcccaggttgtgagcacggtcctggttgttgagcgtgaagaagaatgccatgttcaaaaagtccaacaaccaatttacttcgttagcgaggttttggtcgactccaagacaagatatcctcaggtccagaagctattatatggtgttttaattaccgtcaggaaattatctcactacttccaaggtcactcggtcacggtggttacatcgtttccactcggggatatacttcataatcgtgaagcaaatggacgaatctcaaagtgggccttagaattgatgtccttggatatatccttcaagccgcgaacttcgatcaagtcctaagctttggccgactttgtcgccgagtggaccgagtgccaagaagacatacccgaggagaagatggagtattggaccatgcattttgacgggtcgaagaggctttcaggcactagagccggggttgttttgatctccctgactggagaaagattgagctacatattgtggatacatttttctgcatctcaaaacgtggcagaatacgaggcgcttcttcacgaactaaggattgcaatctctttgggaattcggcatctgatagttcgtggagattctcagttggtcgttaatcgagttatgaaagagtggtcctgccttgataataacatgaccgcttatcggcaagaggtacgcaagttgaaagacaagttcgatgggctcgaactcacccacgttcttcggcacaataacgaagcagactcactaacttcggttcaaaatgagaagcaggtccttccaaagtgtttgttaaacatctttatgaaccaaccgtaccaaggaaaaacaatcgaggccatggacactcaagacgtaggtatgatcgaagccgactggagagagccccttataagatttctgaccaaacaagaactcccccaagataaggatgaagccaagcggatctccaggcgtagcaggctctatatcattcacgaggccgagctgtacaagaaaagtccatcaggaattctgcaacactgtgtgtctttggaggaagggagacaattgttaaaggatatacattctggtatctgtggcaatcacgctgctgcatggaccattgtcggcaaggcttaccggcaaggttttttctggcctacagctgtgtccgacgctgataagattgtgcggacatgtgaaggttgtcaatttttcgccagacaaactcatctacaagcccaagagttgcaaaccatcccgttgtcctggccgtttgcggtttgggggcttgacatggtcggcccattcaaaaaggcagtcggtggttatactcatctctttgtggctgtcgacaaattctccaagtggattgaagctaaacgggtcatcacaatcacagcagacaaggctagagatttcttcatcaatattgtgcaccggtttggggtacctaatcggatcatcactgataatggcactcaattcactggtggagtatttaaagacttctgtgaagacttcgacattaaatctgttatgcctccgtatcgtaccctatgagcaatggacaagtcgaacgagccaatggcatggtactccaaggaataaaggcacgagttttcgaccgactgaatccctatgccggcaagtgggtagaacagctgcaatctgtactttggtccttgcgcaccactcccagtcgagccacgggccagtcgccgttcttcctagtttatggagcagaagcaatgttgcctagtgaggtggaatttgaatctttacgttttcgcaactttcgcgatgagcgctacggagaaaaccgagtagatgatctaaaccgactggaagaggcccgggaagcagccttaattcagtcagctcgatatttgcaagggttgcggccgttatcataatcgcaacgttcgatcacgagccttcttagtcggcgacctggttctgagaaaaattcaaactacacgagatcggcacaagttatcccccttatgggaagggccatttatagtctccgaagtcacttggccaggttcctaccgactcaagcatgaagacggtactcctatcgacaactcctggaatatcgagcatcttcgtcgtttttatgcttaagcattacttttgtatttccctattttgaccgctaacatcaagctttcccttgaagttatcagtcggggggcaactataataataatggagtgtgatttttatcaattcaatttgcttacttgatttatcattgccttgcttgatcttttggcttagtcaatgaggactgaaacttttttaatagcttttgcgggttttaggctcaataaggtttcacaaaagcttttaagaaatcagaagttaagtttgaaatattgagcacagcataaattcatcggtattgtacaaattgtgcctccatcataatcatcatcatcagaatcattgttatgatataacatcaatcggtatcagttttttcattatcagagttatcagatccagtcggctgaaggtcgttgtcctggaatctctcaactacataaactgctatcttattggcggctttctgcgcatcgttgatgaggtcaagagcagcttcttcgctcgtcccgtctgcaaagccatcaatggcgtcaatgtcggtcctcgggtatagagacttggtcattgccaacgccaggcttgctcccatacttctagcctctttgatattcttaaaatatgtatcgggagcaactctcagcttgtcgaagatttcggaagcatcgaatgtactcggaccattgttattgaagaacatggcttggacgagtggggtagtagcgttagcgacttcatccctggccccttcaagcctcttgattttgttgactaagacatcaaattgagcctgcgacttgattttgcggtctgcatcaacagattcacatcaatgagtaagcataaagaagataatggcttttgaagtattgattgctagtaccttcaacgtctttcaaagccgagtccctctgtcttgccaattcagccttgtcgttttccagagtctgaatctgcttttccagttgagatatcttggcggcttgcactatattgcccctggttaattgatattacaaagatgacagcacaaataagttggacagagtttgtgtgtaccttttgatgagccacttagttcaaagttggattcctggagctcgacaatccgatccctcagatcatgctcagtttttctggcaagttctttgacttcgtgcagctggtctctggtggcctgaagggttccgagatgaggaactaatttttccagggtcgcggttttcgcttcattcctgagatagattctctgcaaaacagttttaccggcatttgagctaaatggcaaacaagatggttgatgccgtgcacgaagaaacttacgtttacaatgcgggtagcctggctgagtgcctttttcagcaggcatacttcctcatcttctttttgcttattgatcacaattccttgaggttgcatatcgtcgtcccaccacttgactaaaatgggtggacggtaatcctcagctgactgtatctggaggacttcttctttgtcgctgactatcgggccttaggcatttatgaaaagcgatgaaacaattggagaaagtttgtcagaccaaaatgattttggataatatgcttacctgtgatgatttccggtcggagacgagtgggctcttatgcttttacagaagagctggatcctggatcattatcggcatcctttccgagagggttgtttgcttgagtttcaacttcagggatctcttggtttggttctgtccccgactggtttccagtcgggggctcctggttaactccaattccagcttcggccgactggtttccagtcgggggcatgttgctgggttctacattatcggttgccggttgattatcactcaggtgatcttttgcagtcggcctagtttcttttgaagaacccgtctccatgttagtcagatcagagtcctttccagaaggatctatgtcagatggcttcctacgagtttgagttgtgctatcagtattattttaataatgagtgagcatcaatacaaggaggatcgtcaaacgatttatacctggaagacttcctgattttcagcatgggacgactagatgttttcttcttcggattggcttgtctcggttgatttccggtcgcctctttatttccaaattttccagcatcatcgccttcatcatcactcagaaccaatttgtcgcgaccgggaaaatttcattttcccgaacgctagtgtattaatccccgtcctaggaaaagcaggggtacagcatacaaacatgatataaaagacatatctttattatatcgataatatttacattattacaaaggcacttaaggcctgacaatcaaaaataaacagcagcggactagcgggcctacggctccatcttcacaggcgctcaactggggtataagccaagactccacctaagacttcttctccaaagcttctcttactgaaggggggagaaagatagagcaagaatgagtacaaccacagtactcagcaagccacaccggcagatgcacgactaatgcaagggggtacaaggggtaatgatataggggttaagttttgcagaaaacagcatttaaaagtcacttagttgcccaaagccattttaaaaagacgatcctagagctacacagtattattaatcaaggtcgtgaacccgcacgaacctgccttaacccaaggcctacgatgattcagaccgaactggcaacccgaccctgggtcccagctcgtcccaagccaacccaggccaaccattccacatttagttgttgagcaaattttaagaattaaaacactaacttgggtacattgctcggcttgcccataaccgagggcgcggctattcgaatagattatactctgatcagaggtgtacatctttacccacaagacacatcttcctcacgtgtaaccacgtgccacataccaccacggtatacggacggaagacgtgacatagtttccaacccatcctagccatagacaagagtaccgacccaaccccacctacggccggaacctccgggacaggtaggcaggattgagcccctagcagcaggacaccagccctgtgccatgacatctcgactaccgggccgcagctcgtgtagccttcatttgtcctagagatgtccatcgacccccgacttcgtccatctccatccgtgtacttttgtttataaccagactgagccacaaactaagccttacccactagacatgtggaagtacggtagtgctttgcaacagaggcccgaagaccggtccttatatggccgaggtgctactatcaaaaccatgcaccccgagcccagcctaaaaccattttggggattttgaatagagggggcggtgtgaatcccattccacaataaaccaacaattccaaagtgtccaggtgatatgaatatcccaaagtctagagttgtaaaaccgcctaattttacctaattaatcagcgaagcatctacctaaaattatactagtggtactatgggtagagtgtccactagttggggttttgtttattctagggtgaacaaggaaataataacaataacaataataaggtcataacaaaggtaaataggcatggctaaataaaacagtgataacgcgggaatttaaataaagcgataatgcaataatttaaatcaacataattttataaactgggattcaatatgttcaaagatgatgtgacttgccttgctcgctttcccaaacgtcggcttcaacttccacgaagagtggatcttccgaagctgcagcgtctacacgacgagcggaaaagaaaaggcttttactctaataaactccatataacaagcagaaacaaagcacaaaaatgggttcttaacttcttaaggaaaaattagagacttgaacggtccaattccgagttcaaatggccaagttatggccatttgaaggttatatgctctttaaatgaatatttgcgaatttcttcatttaaattttaattcaaaattggatttattgcgtcagccgaggggaggggcgcgcggaccgggtccatgggagtggggcccacgcggcagtctcacggtccacggtggaccgggtgcacccggctcacaccggccagcgccgtgggtccaatgcgtcagccgcacccgagggtgcgggcggctgacggccgggccccacatggcagccgcgggacgcgcccgaaggcggccacgccggcacagccgacgggaggcggcgcgcccgcgccccgatggtcgccgccggcgaccaccggcgcggcggagcggcgcccgagagaggggagggaagggggaaacgaatcggcggtccacggctcaccccgggtcgacggcgacgacgggaacggcgactggagcggagaggggcggctgcgtggctcgggttgaccgggacggcggcgttccggcggtcggcgaccgaaacggagaggtggacgaggtcggcgaggttgcggcgaagccgaaggaggcggcgccgaggcgggagatggtccggggcgaggacagcggcggaccggagctcggcggcgacggcggagagagagagcgacggcgcgagctcgattccggcggagagagagtgcggcgagtggcggaaacggcggagggaggcacggggagtgtttatatagggttgggagggggagagagcggccggatgagggggaaacgggcgcggaagatccggccgccattgatgcgccggcgaggttaggggaggagtttccaaacgaatccgagggagagagggagggaaaaatggggggggggggaaagagggagggaatcacggggaatatttcccccctcttgattgcacgcgggacggacgtaagcggcgggattcgcggcggcggcggcgctagggcacgggcgaggcggcgggagcggcgggaggtaggggatgacgggtgggccccacccgtcagcgagggcggcgggcgggcccgcccgtcagtggcgcgcgcgcggggagaggccaagtgggtcgcggggagaggagggagaggggagggagatgggccgagccggcccaagggggagagggggagggaaagggaactttttagagtttttctttttataaaatcattttaactttgtttatttcttaataattattatttgtgctctgaaaattccactaaaatttgagggctccttttagaccaaggagaatttaacaaaaattctccgggccacatttgaatttttcttgtacgtattttagtgtttgccaatttcttttcgaattttaattaattctattattccttttagaaaataatttttatttcgggatgaatttatcaggacgtgacaaatccaccccccttacaagaatctcgtccccgagattcgaggaggctagcaagaagataggttgggcggtcttctcttcttgtctgacttcttccgctccgtcttcacaaactttcagcaaaacttcaccactcggaactgcttggcttgacctcctgttgcgggtggaatcttctcttcacctgacttgaaccagggtgcaccttttagctgactcagactaggttgcggtagtttaatgatgcttccgttccagaacttctcatgattcatatcttcggagtcaacctcatacaagttaccacttcatgtcatgcgtcgacactagcttgtcattactaggataccatgtttgtcatcataagaatatcatgcttgtcattcacttctaacttgccaccaactgcctcatattagctttcccggtctccgggtaatagctacttctgctatttgatgcaagggtcgataactttgcctttgaattatgcttcccaagagaaccaacttatcccacttgacatactttgacgtcttcccaaatggctttattgctggatttgttattgtctaatcattatcctgccaaatctgaggcttcgttgttagatgtgcttttaatctgacctctgtagattatcttcgaacatatcacttgattcataactgggaatagctctcacgaacaagcaactcggattcactttcttt

SEQ ID NO: 7375 - DNA, 21830 bp, Oryza sativa
  unsure (1)..(21830): unsure at all n locations
gtgtttccgggtgccccccaggttgacgacatcccgccggagcagcacgcgctggtgccatcctacatggggggcggcggcggcggcgggaagaggatccacccgctccccttcgcagatccgagcgttcctggtgggtgatctggtttctggttggaatctggttagcttctgctgctggtggtgtgagttgctgatcgatgtgcttggtgtttggttgcagtgcaaccgagatccatggacccgtccaaggatctcgccgcctacgggtacgggagtgtggcatggaaggagaggatggagggctggaagcagaagcaggagcggatgcagcagctcaggagtgagggcggcggcgactgggatggcgacggcgatgcagatctgccactgtatgtgaccacctaactttgcttgctcaccaaatgttagttagaacatgtggttacagtgattaaatgaccgtagctgcttcccatggcctgccgttgtctaatgcttagactatctttagaattgctactaattgctatattaacagtacatgaacaaacatatatggaaagtcttgtttgatggaatgctaaaaagaatcttactgtaaaaatgctgacatactactattttttttgccaataacttaatgttttgttacttcgtagaggatactcgtaagcctataattggacagatcccagagaaggaatgcaactatttgtgctagattaacataattgccttacatggtttttacccgcagtacattatttttgttttatcttggctacttcactgtttgaccatgatttgcatttgggcttggttagtttaatattcatggaaaatattatgatgtaatgaaatactaatttttgcatgtcatatgcttggagtttcatcgtcaattctgtatgatgcatagacacaataggttataatttaattattatgtaaggatttgtcttttccttgcaaatattgttactagactctggttgtaaagtgtctctttaatctgttgaccagaatggatgaagctcgacaaccactatctcgcaaagttccaatttcttcaagccgaattaatccctataggatgattataattatccggttggtggttttggggttcttcttccactaccgagtgatgcatcctgtgaatgatgcatttgctttgtggctcatctctgtaatatgtgaaatctggtttgctatgtcttggattcttgatcaatttccaaagtggcttcccatagagagggagacgtacctggaccgcttgtcactgaggttagttaaatccccaaaccaagaaatacttgccctatccttttgctgaaggtttgaaggtaacaaactttttgcttgtctgatcaggtttgacaaggaaggtcagccatctcaacttgctccagtcgacttctttgtcagtacagttgatccatcgaaggaacctcccttagtcacagcaaacaccgtcctttccatcctttctgtggattacccagttgaaaaggtttcctgctatgtttctgatgatggtgctgcaatgctcacatttgaagcactgtcagaaacatctgaatttgcaaagaaatgggtccctttctgcaaaaagttcaatatcgagcctcgtgctccagagtggtacttccagcagaagatagactacctgaaagataaggtagcagcgtcctttgttagggagaggagagcaatgaaggtagatgtcctcatttgttcgtgcttttctactcgattattctttttatattatagctagttacacaagtttaattttcatccagagagattatgaggaattcaaggtgaggatcaacgccttggttgccaaagcccaaaaggttccagaggaaggatggacaatgcaggacggaagcccttggccaggcaacaatgtgcgcgatcatcctggaatgattcaggtaatgcttttgcaattttggtgttttactacacacgtgcgattcttctttctgtgttactttagttcaaagtgttcaattttttgtgtcaataggtcttccttggccaaagtggtggccgtgatgtggaaggaaatgagcttcctcgcttggtttatgtctcaagagaaaagaggccaggctataatcatcataagaaggctggtgctatgaatgcattggtaaaagatccttcacataatgtctcgtatcaatttccatgtagatttacagccttagcaccgtttgacatggttttctctctctttgttgtttgacaggtccgcgtctctgctgttctttcgaatgctccatacctattgaacttggattgtgatcactacatcaacaatagcaaggccataagggaagcgatgtgtttcatgatggatcctttggtggggaagaaagtgtgctatgtgcagttccctcagaggtttgatggtattgaccgacatgatcgatatgctaaccggaacgttgtctttttcgatgtaagattcagcctctctggtactaagaccttgtggtctatattatgcttgttactattatggttcctaatatttgcattgtacagatcaacatgaaaggtctggatggaattcaaggccccatctatgttggtactggatgtgtcttcagacggcaagctctctatggttatgatgcgccaaaaacaaagaagcccccatccagaacttgcaattgctggcctaaatggtgctgctgctgctgttgtggtaacaggcatactaagaagaagacaacaaaacctaagccggagaaaaagaaaagactgtttttcaagaaagcagaaaatcagtctcctgcatatgctcttggtgaaattgaggaaggtgctccaggtattgtcagcttgtctaacaattgtcaaataacataaggtaacataagaaaaacatcacagtaaaactcaaatgtttctttactgcaggagctgagacagacaaagctggaattgtgaatcaacagaagctagaaaagaaatttgggcagtcttctgtttttgttgcatcaactttgcttgaaaatggtggaaccctgaagagtgcaagtccagcttctctactgaaggaagctatacatgttattagctgtggttacgaagacaagacagactgggggaaggaggtaagaaacctagacctgattataaactgatggttaatcaattgaagacgttcctctcacctgtaaatcatgtattcttgcagattggctggatctatggttcaattacagaagatatcttgactgggtttaagatgcactgccatggttggcggtctatttactgcattccaaagcggccagcattcaaaggttctgcacctcttaatctttcggatcgtcttcaccaggtccttcgttgggctcttggatctgttgaaattttcttcagcaaacattgcccactttggtatgggtatggtggtggcctgaaatttttggaaagattttcttatattaactctatcgtatatccctggacatccattccacttctggcttactgtaccttgcctgccatatgcttgctcactgggaagtttatcactccagaggtaagcattattgtgctacataattttgtgatcttctgagtttctgtctgaatcttacatcatttttatttcaaactgcagctcaccaatgttgctagtctatggttcatgtcgcttttcatctgtatttttgtcactggcatccttgaaatgagatggagtggtgtggccatcgatgactggtggaggaatgagcagttttgggtcattggaggtgtttcttcacatctcttcgctgtattccaaggacttctgaaagtccttgctggtgttgataccagcttcactgtgacatcaaaggccggagatgatgaagagttctcagagctatacacgttcaaatggaccaccttgttgatacctccaactacactgctgctgttgaacttcattggggttgtagctggagtttctaatgctatcaacaatggatatgaatcatggggacctctgttcgggaagctcttctttgcattctgggtgattgtccatctatatccgttcctcaagggtttggttggaaggcaaaacaggacaccaacgattgttatcgtctggtccattctactggcttcaatcttctcacttctatgggtccggatcgatcctttccttgcgaagaataatggccctcttctggaggaatgtggtctggattgtaactaagcagcctacactccatatatgcggcgatacgagcttgaagaaattattttgcaggcggcgaatcaagcccaagtttttaaattctttcctgtagatagaaatacagatctccggcatttcttttgttccacagtggtagggcagcttcatctgtgtgtattagggcaaaccagaagctatgtcaattcttgtgcagtgctaccagagaagtcaaatctactcctgtggttgatccaagattatttatttatttggaggggatttccatcatcgctgagcttacttggtggaagctgcagcatgtgtaagctaagttacaaaggcgttgccttgccatttggacagaaggaaggaagatgccaattgtttattttagtaaattaaaattgaattgaattatgcacattccggagttcatttgttccactcaataccatacacagctggctggtggtacatttagcatgaacagatttgtaggtgtttagcaaatgtacctaagttggattcatccggtgtgtggtgttgtacaagtggccatacagtagcgcaagtggtggtgggcacttcactcctgtttgttttgtgtaaccatacagcatacagatgataaaactcttgttcacattttacagagagggaaacttggtgtttattttctccttctaatgcctgatggtttgccagcagtagtagtatctgttgctgtgtatgctgtttttattttcgtttgcaaaatctgttactgcctggatggaagtagaacagacacgtcggcggtgtttgaaaattgaaactgatgatgacgaagatgaagattaaattggtgcactaaaacaataaaacaagaaagctattagcatatgattaattaatttttaattattataaacttgataaatatatttatttgatattttaaaacaatttttggaatatacttttttagtagtttgaaaagcgtggtaacaaaaatcaaatcaagataaaatctgtatctcaacgacgagaaaagaacaccgatgtgtgccagcgtaatggcaaattgtcaatgcagatcattctccgtaatggcaaattgtcaaagctgatcattcccagagatgagcagatatttgcgcagaaatcgtgtgtggccggcctgaaaaagtgtagcctgaatgcgtgtctgatggaaaagtggccagcagctgtgtttacggggaccatgaccatacatgccacggacaccggcagggcaaggcagctagggttggggtcagtcagtacgagacgaaagaaggcactggcaccgaccaaggtgccatggggcctgcggggtgttaaagccgccgtgctgggaagacgagagcagagcagagcagtcgtgcgtgcagaagcagagagagagagagtgtgtgtctcacgcggtggcagcgggcgggttggcaggcagcgttggagctggagggagtgaaagcggaggacggcgcggcgcggcgcggcttttggttttggaccggacgtgtcgtggtgaccgtgacccgtcctgctggactcacgggcgcctcgtcctccggctccgcgttttggctccttgctggtcgtccccgtccctctgccggaattaatggatcatatggaccagacgcgcttcatttttctgtgagtaactgcaactgtatcacatataggcatggtttagttttcaacttttttctttaaactttcaacttttttatcacatcaaaacttttttacacacgtaattctaacttttccatcccatcgttctaatttcaatcaaacttttaattttggcgtgaactaaacatacccataagaatataagatgagaacatatagcctttgtataagatgcaacggcatgtatggggcgtattgttttcttttgttaatcctatctaagtaatttttataaaaccttatccattatggtccaaagttatacaaatcatagatattttaatacatgccacgtaactacaaatatcataaaggttcacaaaacaacggaatactcctatattaaaattttaaaaagtttagtaacatttatatgacggataaataactcataaaattgaaatgtgattgtaaaactcaaaagtgtggtggttcaaaatcaaaatgatcagtagtatggttttgtgaaactctataggtttatctatcatgtgtcaaaacccctgtggttttatacaacttagaccataatacctagggttaggtgaaatttactcatccttttatttcaacttcatgctagtttttggtttggtgccctttcttgacgaggacatcctccactatttcccgctggcaaagacgcaaaagtcaggcggcgactgtgtgagcctctgaataatcccactttgcttagcttgggaggtgaaaaccaccttaaaggggagagccacccttcccccattggactagtcttttagggagattgggcctttccccgagtgggtgtgcctaagaactgttggggtctggacaatcttaagttattgggcctcggccgaccccacctgagccggattgctatcatttggtatcagagctgggcccttgtttaagggggtgggattgatgaggacatcctccactattacccgctggcaaagacacaaaagtcaggcggtgaccgtgtgagcctttgaataatcccaccttgcttagcttgggaggaggaagccaccttaaaggggagaactacccttcccctattggactagtcttttagggagattgggcctttccccgagtgggtgtgactaagaactgttggggtccgggcaaccttaagttattgggcctcggccaaccccacctgggccggattgttatcatttctccctcagtcccaaatgtaccaaattttaaaggatgacatatgtattaaagcatgagcattgcaagctcctctttggccattcataatgctcttgcgtgatgtgtggactcgtctagccacgtagggcactggctgctgtggaggagagagtaggtgaggtccatggctctagtttggttctttgtgtcttgtttgagctacgagagccttgtcctgcaaagcgtcaggcgcagggcccactcagtgagtagacgaggaagagaggagaagcgacggagttgtacaagggagaaggggaagcggctgcgctatgcattgtggttgtcgccattgagggccgtcggggttgccatcgctgagggccaccaggagcagatcaactgccaagtcccctgcccatgaagatacaacgatgatgctacctctgcaagcatttcagtcgctgtagtcgttcaactatgctcgaagttgccattgaactcgttgcattggcacaagcagatctgaagcagcagcaagttcggatcgccacgaccaccgatgtagccaaggccacctcgaccatcggtgcggcctcctagaggagtgctacacatctgtaggcaccgtggttcctcttcttgttggtggtagcatcggcggtggccggtgagaggatgacgatgccggtgtccttgtggagcatgagcccttgggccacaccgtcgatgtcgcggccgtggacaaagaggagcacgagctcggtctgtgccatcggagctcgatttggccccgtcaaagctcggttcgtggaaagggagaggagagggaggttgttgccatcatggcctcctgtcgcccttgctgccttcgtctgctgagccgccgccgctaggttctagggaggagatgcaccgggggaaggggagaagggaacaatggctgttggtgaaatggtaactagggtacccctttccctatggatctagcactcttttcatattaattaagatgaaaaagcttacttagaccatcataaagctaaggcgcataataacggggcttgggacccactgtaagggtgagtcctagggcccctatctcgcgttacaagatggttattgtcgacatttgatgtcgcgattccggtatttgcatagtatggggatcgttggtactaggatatacgcgagaccgaggtaaaagagatggagacgaggatttttatacaggttcggtgtcatgtccgaaaacgactctaaaatatatcctttaaattatgcctagaataattaaaatccgtatgtgaaagcctccaaaaattaaaatgtgcaaagtaaaagtcaaaaagggcttagaggatttttgtatatttcctaaaagcctaaaatgtgtaaataaattttagtggaattttcagagcacaaataataattaagaagaaataaacaaagttgaaaaagttttaaaaaaaagaaaaaccctaaaagtcccccttccctcccttgggccggctcggcccatctctcctcccccctctctctctcctctccccgcggcccactcggcccctccccgcgcgcgcgccgctgacgggcgggcccgcctgccaccctcgctgacgggtggggcccacccgtcatccccgacctcccgccgctcccgccgcctcgcccgcaccctagcgccgccgccgccgcgaatccgccgcatcccgccgtccccgcgtgcaataaagtgggggggggaatactccccgtgattccctctccctttccccccatttttccgtctctctctcgcattcaaacgggcggatttgcccccgcaaatctcgccggcgccattgatggtggccgacctcccgcgccggtttccttcctccccggccgctctctcccccttccaaccctatttaaaccctccccatgcatccctcctccgtttccaacccttgccgctttctctccccgtcggaatcgagctcgcgccggtgtcctctctctccgccgtcgccgcgagctttggttcgccgccgtcgtcgccccgacctcctcccgcttcggcatcgcctccttatggttcgccgcgtcctcgtcgacctcgtccaccccttcgtttcgcccgccgaccgccggaacgccgccgtcctcgtcgacccgagccgcgccgccgcctctctccgcttcggtcgccgttcccgtcgtcgccgtcgacccagggtgagccgaggaccgccatctcgcttcccccttccctccctctctcgggcgccgctccgtcgcgccggaggtcgccgccggcgaccatcggggcgcgggcgcgccgcctcccgtcgaccgtgccggcgaggccgcttcgggcgcgcccagtggctgccacgtggggcccggccgtcagccgcccgcgccctcgggtgcggctgacgtgtgggacccacggcgccggccggtgtgagcccgggtgcgcccggtccaccgtggaccgtgaggctgccgcgtgggccccactcccgtggacccggtccgcgcgcctctccccctcggctgacgcaataaaccctttttaaactaaaatttaaatgaagaaattcgcaaatattcatttaaagagcatataaacttcaaatggccataacttggccatttgaactcagaattagaccgttcaagtctctaatttttccttaagaagtcaagaacccatttttgtgctttgttcctgcttgttatatggagtttattagagtaaaagccttttcttttccgttggtcgtgtagacgctgcagcttcggaagatccgctctttgtggaagttgaagccgacgtttgggaaagcgagcaaggcaagtcacatcatccttgaacatattggatcccatttttataaaattattttgatttaaattattgcattatcgctttacttaaactcccgcgttatcactgttttatttagccatgcctatttacctttgttatgaccttattattattgttattgatattattaacttgttcaccctagattaaacaaaaccccaactagtggacactctactcatggtaccactagtatgaatttagttagatgcttcgctggttaattaggcaacattaggtggttttacaactctagactttgggaatattctcatcacctggacactatggaatggatggattattgtggaattggattcacacctccccctctattcaaaatcctcaaaatggttttaggctgggctcggggtgcatggttttgattgtagcacctcggccatataaggaccggtcttcgggcctctgttgcaaagcactaccgtacttccacatgtctagtgggtaaggcttagtttgtggctcagtctggttataaacaaaagtacacggatggagatggacgaagtcgggggtcgatggacatctctagggcaaatgaaggctacacgagctgcggcccggtagtcgagatgtcatggcacagggccggtgtcctgctgctaggggctcagtcctgcctacctgtcccggaggttccggccgtaggtggggttgggtcggtactcttgtctatggctaggatgggttggaaactatgtcacgtcttccgtccgtataccgtggtggtatgtggcacgtggttacacgtgagaaagatgtgtcttgtgggtaaagatgtacacctctgatcagagtataacctattcgaatagccgcgccctcggttatgggcaagcctagcaatgtacccaagttagtgttttaattcttaaaaccttcttaacaactaaaatgtggaatggttggcctgggttggcttgggacgagctgggacccagggtcgggttgccagttcggtctgaatcatcgtaggccttgggttaaggtaggttcgtgtgggttcacggccttgattaataatattgtatagctctaggaccatgtttacaaagtagctttgagcaactaagtgacttttaatgttgtttactgcaaaccctaaccccctatattatggctcccttgtactcccttgcatttattctgcacttgtgggtgtgtcttgttgagtatggtggttgtactcagtcttgctcaatttttcccaaacccagaagaggagttcctggaagatgaaggctttggtgtctagctcgtgcttgccgtcaagcgcctgtggtcgtcgccctagtcttccgctgtttcccgtttgtctttgtgtatgctgggccttcgccgcccatgtaataaattaattatttacgcttccgcttgataaactctgaaatgtatcaacttttaggtgtaccttgcctcctgggacaagaaataatacacgcacgtaaggaacgcccgttgggttatttccggtcatgacattcgggcccctgaattgtcaggtaataaccctacatcctgttggccgaagccggtcgttgctcttattcaccataatcacaccagtataatatttggggtagcctatctaactgttgtcgatatggcggtctgaagttctgactcgtagtcgacaacagggtagtcttcctcctcaagtttgtgctcggcgagatcagagacagcgctagatccctacggccggcctctgaaggtaccggatagggtcgatctagacatatctctgatgtcgatatccggcggcttgtcttgacgtatgttggcttgtattggcttgtggctttgtggcgtctatggtgggtgtcttccatgctgggcgttgattgtcctctcctcctagggggtcttgtatttatacccataggtgtccctttgtccaagtagagctagggaaaccaatatggatacaatccgagtagtccttgtcgtttccatgtagaactctggttatccttccttatccggaactcctatatccgcaggttgtttccgtataggacatggtatgtggtgggtcctgccgagatttagtcaactactattaggtatgtgctatccataaccctgatagtagcccccgacttcgatgcaaatgaacgaattcatattctcaaccgtgcgcagaccttggagtaactgttatcgtgctaacgtgaccgttctcggtgagtttagagttaacgttagacttcctttatcagcctcgtgcgggcacctaaagggttttgtctgagtcaatctctgacgtcaaccaagaaagtacagaatatacgactatgtctcccatcttgctgtaatcgagaatttggattgaagtcaagaaatcttatctcggcgagtacaccatctcttcattccgtattccttgttgagatccaccaactgttctcgagtgatcgagaaggcacagagcttgcaacgaaaccttgtcaacatttgttgtgctcgccttagtcgatcttggtgtgtagaaccatagagacatggagtcttcgtcaatgtcgaatagaattttcctgaaatcaatactcagaaaagaatattagatagaaatagcccccgagcgaatgctcaaagggtgacatgttataatatgtatagaaaattgaaaatgaattgaattttacagaccaatgttttgtatatgagcgtctactcttttaccgacttcgatcagtcagtttgttgagttatacactctccctagcccctagccttgtcgtcggagaatcgttctcggaagataaggctcttggacctttgacctgcctcggttgaacaagcactgatcctagcccccagtcgtgaagttggaaaacccaatttctgattatacggcttggttaatacgcacggcgagaactcttacacaaccagctcttacatggtcttttgtctctacaggattcgacaaggccttatcggctctgggcgtccctagccgaagttcccttaggttcctcggaggccttgtcaagacagcgtaaagggacatgaggataggtttgaacgctaggtgtcatcgtggtaagggatctctgggtaaaacacttggcaacattgtgtacctgatatcaactttgttgaggtagaggtagtgggagaatcgctacacctctggtcgaggaccaggtagtagtcgtactcgactacttgaagtggaaatagtgggagaatcgctacaccactggtcgaggaccagatagtagtcgtaactcgaccactagaagtaaatgtacgagagatcgcgacaattgactggttaagaactagtgagtaggtgtctctcgatcatttggagtcgtggtatgagggccgctacgctgccggtcgaagaccagtcgtagctgttcctcaaccatctgaagtcatggtgcgaggaccgctgcgttattgctgtagtcgtacctcgaccatctgaagttaatgtgcgagagattgctacgttttactagttcgagaaccaacgagcgagtagaattatctctcgaacaccaatggaagttgcggtgcgagagactgctacgtactagttcgagaaccagcgagcgagtagaattatctctcgaacactaatggaagttgcggtgcgagagattgctatgtactggtttgagagccaacgagcgagtagagttatctctcgaacaccaatggaagttgcgttgcgagagattgctacgtactggttcgagaaccagcgagcgagtagagttacctctcgaacaccaatggaagttgcggtgcgagagattgctacatactggttcgagaaccagcgagcgagtagagttacctctcgaacaccaatggaggttacagtgcgagagattgctacgtattggtttgagaaccagcgagcgagtagagttatctctcggacaccaatggaagttgcggtgcgagagattgctacgtgctggttcgagaaccagcgagcaagtagagttatctctcgaacaccaatggaggcgctagagttggtttattacatgtgcatctcatgtggccagcatgactcacacacccaacttgtagcatatccggatgtccgttcgcaatcatgtcgggtgatcaagccgacgacgttcgcgaggaattatccgttaacaaccttttctcgagtagtccagccatggccggtactatgagataggtcgtcggtcttcgttggtaggttgggcacgacgactcagcatttgtcgagatcgttttcgataatgcggtgtactcgaccacaacctactcaggtgctcaattgttcctgaagaatattttctagaaggcaagacatatagtagataatatcgagtatgtactcaaaaaactgcatggatcttctagtattatcaggacataatgagcaaatgtaaatatcaggcattatgcaaaccgtaagcaagcatgattcatataggagagaacagagcgagcccccagcgttagaccgtagtcgatttaacatcggggacacccgcgcaacagatattgtataaaaacatgctctaggtaaacaaaataaatcatggatttgacaatgctgtatgatctgaataggtacgataaattgcagataaactattgcgtacctttgtagatacatgccggatgtatctacgaaattagtagatcaatttaaaaaaccaatctaccaattaccttgttgcgtactcgttcgatatcatgcgatctgacatcttttggtacgccgcggagcttgaggcttggatgatctcgatagaccaagttgttgatgacgatgatggttccgatctggttaggttggatctccccctcagctgaagtcgtcgagtagctcgttgtcggagaatccatctcttaaacacatctcgtcgaaaccttgaagcaccaaaagatcccctacttggcgcgccactgtcgacatttgatgtcgcgattccggtatttgcatagtatggggatcgttggtactaggatatacgcgagaccgaggtaaaagagatggagacgaggatttttatacaggttcgggcccctgaattgtcaggtaataaccctacatcctgttggccgaagccggtcgttgctcttattcaccataatcacaccagtacaatatttggggtagcctatctaactgttgttgatatggcggtctaaagttctgactcgtagtagacaacagggtagtcttcctcgtcgagtttgtgctcggcgagatcagagacagcgctagttccctacggtcggcctctgaaggtaccggatagggtcgatctagacatatctctgatgtcgatatccggcggcttgtcttgacgtatgttggcttgtattggcttgtggctttgtggcgtctatggtaggtgtcttccatgctgggcgttgattgtcctctcctcctagggggtcttgtatttatagtcataggtgtccccttgtccaagtaaaactagggaaaccaatatggatacaatccgagtagtctttgtcatttccatgtagaactctggttgtccttccttatccagaactcctcctatatccgcaggttgtttccgtataggacatggtatgtggtgggtcctaccgagatttagtcaactactattagatatgtggtatccataaccctgacagttatatggtttgaagggcacgggtccccagcctgcctagggacctgggcccacctttgctctggtaggttacacgtccctcccaaagaggagcgtagatgcctacaagatctatattttaagaataaggctgagggaagcctggatcctagcttgctctgggacctaggcccatctttgcccttgtatgttactcatccttccttgagaggagcgtggaaacataaaagatctacatcttaagatcataaaccaaggcggagggaagcctggtcccatcctgctctaggaccaatgcttgcctttgcccttgtattttgcatgttcctccttgagaggagtgtggaagcatacaagatctacatcttaagattgaaggctgagggaggccagggtcccagcctgtcccgggacccgggccctcatttgcccttgtatgttacacattcctccttggtagaagcgtagaaacgtacaagatctacatcttaagatggaaggctgaggaaggccaggaagcctgtatcaggacctaggccctcccttgcccttatagataacacgtccctccttgagaggagtgttgaaacttacaagatatacatcttaagattaaggctgagggaagcctagatcccggcctgcctgggacccggccccacctttgctcatgtatgtttcacctctttcctcaagaagagtgttgagacgtgcaagatttatgtctcaagcaaacaaaccaaggggagcttgaatcctagtccagcttgggatccggtcccccctatgtccttgtaggttacatgctcatctttgagaggagtgtcgagacatataaaatctatatcttaaaattgtaggcaaaggaaactgggtcacagcttggtctgggacttggtccctcctatacccttgtgagatgcatctctttccttgagaggagagttgagacatataagatatacacatttacaacttttcatcaaagacatcttcaagaagctcgtccaaaaataactaaactaccttttctaggacaaggggcacaaccagaaggctttgttgagtagtgaacgtgcccctctaccagctatgggcaaacgtttactgccataaatgaaataggtttaagagggaaactccaagtggcctggggtaaaagacatggaaaagacactaacgctgagtgattagggacaacgggcgtctgtacatgcgtcgcgcatgcccagcgacacacgacttttccaactggacaaaaaggagctgtggcactattttgggtaggttggggatcggtaggcccaccacgagctacatggagctggcccaaaccaatgcccggagagcctggggcaacttaatcacatatttttggtaggtttttcaagaagattggaaggaaaccaactggcagtggcaagacaaccaagagagaacatagaggaaaagcaaaaatggtaatctgagcccctccttggactataaaaggaaggggatatgccactaagaaagggatgcttgagtttagcttgaaaaagtatagtttgtatttttctagatccagatagcaaacacaaaaaattaggagtagtatattacacctccgggtggcctaaacctgtataattcttggtattggttggattgtggggaactcgtgccccatcctaggtgatttccacacatcgattgtagccaacccctggttgaatcttcatcaggggacacgtctgcacttccctgctgctagagaatcgcctctccgatagtggcggtggagaggagagacgccagtggaggggagaagcggcggcgctgtacgaggagtaggggattgggtaagagggagagtttggtggggaggagaaaacgtataggtcaggtctgacatatgggtccggcaataggctagatatatgtgtactcctttttgttgttatagggtgtaaactataaaagttttaatttattcgacaatagaaaatatcatagggattgacaaagaaatgactagggtctgaaatcctgtaccatgggttatgtgctctaaatgaatcttgtgcttatgtggcatttaagggtgcttaaatgacgatcccgcactgtgaatgtgtcaggtaggatgaagccttggattcagattcggtgatattgcgatagcatggcacggtgtgacattggagtgatctggggcgttgaaaactaatccaatggtccgctgcactggcccacctgcaggactccgttttcaccccacgcgcctacccttcttgccaaacgacgtctcctccaatctcgccccaatctcgcgtgctcgcatcgcggcttccccacgccagtctggagaggcgccaggccaccgcgccgccgcgagtgaggaggggactgggcggccgcctcgtcgcttcgcctccccttgcccgtgtcaggccaccgctgtgagctagctgggagccgccaccgcgccaggccggagaggcgcccgccaccgcgccaccgcgactggggaggggactgggcggccttttcgcctcccctcgcccgccttaggctgccgccgcgagctagctggaggccgccgcgccgccgcgagtagggaagggaccgggcggcggctgcacgaggaccctgatgtatctgaactctgtgttggttttggcatatttttgatgtttggagttccatctcgccaattctactgaacatatgctagctaatccaacagctagcactaatagagcaacagagccaaagcacccaactgaaagggaaacacacagcaaaattgatgaagcacaggggcgcgcaggcacctcttccgcaccgggaggcggttggacctcgttgatgtcaggcccggtggctggctgcctccacacgcggcctgccgcggtagcacggcagggccccagccccggcctcacgtggcagccgccagaccccctccacactcgcggcgagctagtcggcctgtcacctttccggtcacggtggcggcgactctcccagattcagcggtgacactccccgctgactcacggacgcgcacgatgagaaattgggggcatcgtgtcacgccccgaactagtaccgaccggaactagcccttgacgctccaaattaacctgttaatcgataccagtcccaggaaacagtgctggtatcacaggaagacggattatcacagcaacagaggtctctttattatagagtagaggtacagtcatgttgggctgcggacagatcccgagctcacaactgcattacaaaaggggaacggaagccaggacttggaccaaacaacacaggcgcgacttgggaattaggccgaaaccctaaaactcatcgtacccggcttgctcctggaagaactcctcatcagcaggatctgcttcatcttcttcagcaactggggggattatttatatagagcaagggtgagtacgggagtgctcagcaaaccatgggaaataagtgtttaatgcaggcttcaaggaaatgctgttgtttttacaattgattttattcaaactcttttctaaaaacaactaagtgagtgcttctcaaacgacacggatgagacagtgcgtctcatccagtcggagtatgtgcaatgtatcagtctttagaattgttcaagattggcacccggccaacaactttcaaacggccacccgggccaacaactttcaaacggccacccgggcctagctgatcccatcagctgcagatttttcaaacatcgaacccctttccaccacagcaatctcacaaggcagtagtcaaacaaaactacgctaggaatcacctcacatccgcccatgaccgtgggcacggctgttcgaacagtttgttaacctctgcagagggggtacactttacccacacgacattactaacccggatcacccagcccgtggggatcagccacgtcgggagacctccaagctttcatgacaaggcatttcgaaagccgacacaggtttaccatatgccgacgagaggggtcccagaccaacaacaggttaggtcccagaccatactgtgccaggaagcccaggggtcctccccgacaccaccccggcgaatccacatgtctctcggcatcaaggctcccctgataagctagttactcagccaggggtgtcccattccacccatgtggtcatacttgtcttatgtttggatgaaattccaaggaaacggtccttaagtgcgagagcgggaaaccgtacacccggtacgtcccccggtccgcggctttggaaattcatttagttcgcaagtaccgacccaggtgtcgggttttccaagtcttttgtaaaacccgagttttacccaagaagtttttcagattttaagtttgaaggcgtccgtcgatactcgcacagggtgcacgaatatcgagacgcaactagatggttacaaggggacacgatataacaattatcaaaggaaggatcaaatgcaacaaattaggtaggtccgccaatctgccttgcagacgggacaacagtttaagcgcgatcctatcaatgcataatatttttcaagcaacataattaaatttcaaatataggctcaagatgttcaaaggtggcttgccttgctcgagatctggagcttgatcctcgaaatcctcgcactgcgggtcttcgggctccgaaactacacgcgaaacgggacaactcaacaaacggcgaaaaaagccctattaatgacctctatgcgtgccattagatagatctcgagatttgaggaattttggaagttgaacggagtcaaacggatttacggttgggaagatattgaatttctaagattattggattttttggtctaaaagaaaaggatttaattaaatcctttatgaaaaagaaaagaaaagaaaaggaaagagggagggaatatagacttttctcgggcggcttagggcgccggcccaagagaaatggggcggccggccgagctaaatgggccggccggcccaaggcggcccaagacgcgcgcgcgcgggagggaggagaagagagccggtggaccgggctcaccacgcgcggtcccgggtgggacccgcttgtcggtgacacggctcaccatgcggagcgagcatgcggcgtacgcgcgcggcctgnggagggacgcggtgcacgcgcgcggttcgcggaggaacggttgcggcgggcccacgcgcagcctcgcggctcgtggtggaacgcgcgcacggaagggctgaccggggtcggcccgacccgatcttggccgagctggcgccgacgtggcgtctacgtggcgcctacgtggctgccacgcgggctggcgggaggaagacgaaggcgccgcccgtgaatggacggcgggcggcggcggtttctccggggcgccttgcgacgatgaggggcgacggggcgtacaccgggatgacgaggaagaaagagagggagcgagccaacggcttggattcgccggagggagtccgtcggcggcggatttcggcggcggcaaccggcggagagcaaaagggggaaacggcgatgaggtcacgaggggccaattcccggcggtgagagcatctacgcggctacgggaatccgttgctagcgtcggattgggcggagctacgccgagcgaggccggcaacaaccgggtgctacggagcacggccggcgacggcggcgagcacactgcaaccggcggtaacggtcggggcggccccggctagctacggggaggctactcgagctactaccgaaaactaaggggggaagatggagcgaggagggagaacggagggaggcactatcgagatgaggaggggcgctgtgacgagaggccgacggcgcgggagtaatctctccggcctcgggccggggaagaggaggaagacgagcgcccggagtccccttccgcgtccacgaatgcaccggctttcccggcgcttggcgatgaacggcggaggcgaaacaaaacttcgaaaggcggcaacaatggcaatggaaggaaaaaaaaaggaaggccccccgggccttttaagggcacaatgtcggtttggaaccacttgggcggtcaagcgcgagctggcgctcggcgctcgcgtccaatcggcgacagggtggagggaggataacgcccggcgggaggaaaaaggggaaaaggagggagagaaagggggctcgtccctttcttctttgggaaaaag

SEQ ID NO: 7376 - DNA, 8849 bp, Oryza sativa
tgtgtatgatagatgagaccagatattaatagtgtagtatgtaactattgtatagctattagattggttataaatgaattagagttagtagttggctatactatttaacttgcccttatggacacatctgacacaagaagtctcatgcagattgttgctctctatgcagcctggactcctcgaaatcttcgaccagcataacttaggttcgcgaaccctgaacccgttctcgacttgggtcatcgttccgtaatttcttggttcatgacccaactaatgatttttcttattgaggaggcatactcaaggtcgtaccacatttctttcaggtcgcgtcccatgaagcacgacaaagtatttcgtagggatgcaagcggagtgggcaagtcggcttttttatcccgcttgtgccacttctagtttattttttcttctaaattttatactatcatgtgaaaaatagactagcaagcgggtttttatgtgggtagcgggactacccacttgcatccctagtatttcgacccattcgactcgagttgttggtgaccctgacactactacacaaaaaattctctgtacgatgacccttataagttgtagatgaactataattgatcgcacctgtaaagattgttttccaagggaaggttcacggcgcatgcggtccttaagagatccgtcaatgaaaatagacttatattttaggtggacctcttaagagaccgcatacaatttttgcatgtgggcaaaggggtgagtaagtgggccccacgtaatatcccgctccttttattctcctactcattctctctaccgcacctttcctctcctactcttgttatacactcctacttcctctcatcccttcctctcccccatcccactctagcagctaaggcggatgcggtgggagcgggcaggcggcgtcgacggcgaccactactacgatgaccgacgacaacttccgcgacgaccggcggcattggtggagggctggatctgctagtgccaggccttgggtgagcgggatccgctgccaccaggccttgggacgcacggatctatcgttgccgggcctcggcaacttggaccatgtcggtagtgatggtggcggcctcgagcgacaaccacgacggtggatcctggcacgacgacggcaacggatcctacgtgacacgaccgcggattagggtttctgtgttatatagatctagggtttttgttttcggaattgttttgtcgccaaaattatttttacatgcagacggcttaagcatctgcttgcgaaaatcggattttcgcatgccgttttgctagtgggccacccgtctgcatgcaaaaatcacttttggccgcatcggaaaacgatttccctatcaactacgagcacaagagccacgccgccgcaccaccttggtctccccatccagcgctgcttagcgcccccatctgaagatgcgtcctcctggatccagacgccaccacttctgctgccaccaccaactggagccggcccgcgtcaagctcctccatggcctgtactgctgctcgtcgaagccgtagcccgctgcccaagttcatgtcgacaaaccacgctgcccacgaaattcttgcccttgccttgtgatttgctcgatcgattgctttggttgtagcaatccgatggaatccatgctgattttattgggtttgagttcaactcatgactatctcagaatcctcgttcttcccaatacgtgtacggctaggtttcctccttgattgtttggtatgcgtgtctaagggtctgtatgggaaagcttctaactgctgcagtttctttcagaatcagaagctcctccaaacagttcagattttgatccagattctaagaaactgtagttgtagaatctagtaaatgaactagaagccaaaagctaaacccagcttttccagattctcagaagctggctcaaccagttgcttctcagaatcttatgctccccaaacagaccctgagtgtagctccacgtccaagtaatctccatcgcaactgggcacacagaatacgaatcccacacgatctaggcttctctgaagcctgccacgaccgacatcgtccctggtcactttctcggctcagcctcgacatagatcgcacacaccgccttaaattgggtgaccacctgagcctcatgtacatcctgcagccttgagcaccttcacaagtaccttccgtcaactccgccatcgacgaagccatcgatctgtagaattctgtgcatgtcgcatgctgctggtacactgtcttcatagcaatccatcgtttaaaaaacttagtcgacaacacctccatcagcactctagggtccatctgttccgacgtccgattgaatgccatcaatctagtcacgagccgagacagacaaatcacatgtcatccttccagccaccgaacgacccaagcgctacatctagcgatctttctgtagaacatggctcatagaaaggcctgggccaccctgcccatagtgttcgattccatttactgagaacactgatcgcctgcaactttcaactcgagcatggggccccatatctccctgttgagagtagctaagaggaaagtccgggccacccgctcaaagtgtctgacccaccgaatggatcgccaatcgctttcgccgccatcaacccgagcactacgtctagtcatctttctgtcgattgcagctatcgaacggttcagaccgccgcatgaaatgttcgatccaccgattaaatcgttgctcaccgacatgctccaccttgctcacatgtcccttgctagatataaaccgcaagcggcgggatgtcaagcatctccatcgcgcctctaccatggatctcctgtaggctctaatactacttattatagagcaagcccgaaattaccatcgaaaaccaaacgtggcagaaacgccataggagatccaaaacagatgacgttaccgaggcacgatatgtgataacgaatttcagctgaagtctacatcttctgggtactgattacaggtgctcctctctcatccagcatattatagcttatcagagttacaatgaccctcgaccagataccgatggtagtcgctacctctcgcttatgtgaagttgccattgtcgtcatgcagttacaacaggtctgctctctatttaagagtgatcctcgggtagagtctgactcttaccctatttcgatatccagtacaactccaaattctaaactgtaatcaattttatacacatatttgaacaaacactaacaaaatgttagagtttactactgtggagataccttgtccggccaatacagaagttgagactttactaccgtggagcggctttttctaaaagatgagagggaaactagtgtcaatggtctatatctgcagtaataaaaggggtagtgtataaggtctaaaagtggatagattgtagggacaaatgatttagacaggtttaggccttataccaagtgtactgctcccgctagaaaatcatctcctgatgcctccccatgcatcgcagatctgcaccaactcgatttccttcctttccatttccaacttattaacctaagcaacatggaagacttgcgtattattcgcgtcttgttgcccaggaaagctagctgctatacacaatgctaaacagccttcgatcgagtaaaaagactaaacggtgcactaattcacatggaaggctgtgttcttccccctattttcccaactcagctctctcgttttccgcaagcacgcttttcgaactgctaaatggtgtgatttataaaaaaatttctactccctccatctacttttgatagtcatatttcatcttaacacacagaccaaggataagtaattctacttatcatccatttaaacatgctactagtcattcctcgtaaagaagcaattcattaatatttatatttctcaatacccatgtagccaatcatgtgtggaagaatggagagtcacacattaaattcgagaaaatcattaagaggataagttattggattaaaatatgcctattaaaaataaaattttcagatttggaaatatgactatcaaaaatagatggagcgagtatatgaaagttattttaaaaaatcatattaatccatgttttttttaaaaaagttaacacttaattaatcatgcaaatacgagcttcgttttacatgctagggaggagcctaaaaactggcctgccctttgctcccacatttattctgaactcattaccttctttttctgatgaacacactaatatatatctacaaagacttgggaaagtacaagatgaaattaaagaaaagttaatgccatatgctgggagcctgggacgttacattacgttggcgtacctgaatatatacgaaaatgaatatctggctataaatagtacttcaaagtggagttctttcatgaacacgtacatcacatgaatgagatactttctcagttaaatctgttctaatatccactgtagactaattcacatgaatggagtcatggttgcaccgggtgctctgagatacacctacaaagctaggtataaacttaatttcctcatgttattatgccatccatcaacgacgtcacatacgcataggagtgagaggcatcaggagtattttgcaaagcactgcacaatggatcagcatgggtgtttcagcgcatttatagtaccagtttatattagcaaaggagcaagtcgcttcaaattaaattacctgcaccaacgtctgaagcactagtcgccgcaggattgtcttatctggctacgtcttgttacacgatgatcactatgtcagccgaaaaatgactggagaaaccattatacatatatttctctatatatatcagtcagcaaaattggccaactgacaagtcagtatgtcttctgttagtgagcgtgccctttgttcgacgacagtgagaaaattaaccagtaactaatcctgttttccccagccaaaacattgctaggtggaaggggaaaacagatccaacagtaattgtgtcgaaggaaatgttgaggattaatagtaagtttgttcactgggtactggaaagaatcatatcatcggatatccgtctctagaaacaatcaaccttattattattattttagatgtttaattttactaaggtttacattggatatctatctatctattatatacaaaaagtccattaaacttcctacaaacgctcttaagccgccacgtggcactcctacaaacgctcctaagtcgccatatggcacaatttaatctcaccgtcgattttcacttaaattggtggacccgttattgtagaccattagatcagatctattattaaaaaataataacttttgtattgtttataacataggagcgctgtccgtatgtatgattttgtacgatacaaatactactgctgttcttcccgtatgtatacaaacgtacatgattgtgaaaacaaaacgataaaatttcctaatcttcgctggaagaaaacaaatacacatgtatacataaaaaagacagagaatttatatatgcattcataaaaatcaacggtctttttaaaatatgattttctacaatataaagataaaatatattacttcacaaatatcagtatgtttagttaaactaagatctataataaatatttaatcaatgttcctttaaaccatcttctaaatcaatctattatatactaaaagtatattatacgaatgcttttacatcgctgtatattatacgaatgcttttacatcgctatgtggctctcaaataaattagagaaatcattgaaatcttttatatactaaaaatctattatatacctgcaaatgctcttacattgtcacgtggcgctctaataaaattaaaattaaagaaatccaaaatatttagagtaaaaaaagaaaagcatccaaccttatatttttcacttaaattagtagacccattattttaaacattggattagagctcttaaaattcccatgccgctaatctctatcccggaaagaaaatataaagtgcttgtgtcgtacgatcgtctccctcccaaaaaaaaacaaaacttaaatacctgcaccatatacgatcgaaaaaacagttaaagccaaaaaaaataaaaaaagaaaacatgcactagaatcagaaagaaatactaataaggaaaaatcataagtgccggcactgatttgttgtcaacagcctttaatctacgattttaataaaataatactacacagttaaaattaatcataaacttattgtagtgataaatatatcatcacaaatgacaccagcatgtaatagcaaatgtgataataatgtttcaaataatttcatatcatattttatggtgtcaaatatcacaaatataaagcgttatcttgaatctacatatgtaataattaaaataacaaaacctagcatttttttaagtacatctatttaggtttatttaattttggagagattgagattctcaaagtatttggaattttttcaaaacttttcttatttgagctgtgagaagcataattaatagattgatgagaaacattaaattaaattttagccagtgataataaaacaacataatttagatgtgatttttaagtggatctttttaagtttattttgggtgagattgagattctaaaagtatctgaaatttttcaaaacttttttattgctctttgagagtgagaagcatacatgatagatagttaatttgctacaatacaacccttaattcatcacaagaattatgtattttctttgccaagtagtattggaaaaacatgaataatccaataaaatacgcataaaactacttatgttatattttttatagttgatagagattcttatataccgggtataattgatggacaaatgttatacaccactaaacccaactgtaagtgcactctagcgaattagttattgtaaataagtttgtgaaaataagtacattcttagtattagtaaatgagtctcgtattcttagtattagtaaatgagtctcgtatggttgcttacaacatatggtggaaacaaatttggtgctaaagtataaatctttatcaaaatataaataatgatatggtgttttgcatattctcatggtggtatgtctttttagctatagtttttattaagtattgtcaaatgattaaccccactcatttgaaatacataatattgtatgtattccattaaaatttgagaagtacttattactaacttcatatgaaaaaaatgcattttcatcaactcctcctttctgtccctctgtccttgaatgcagggtgcagtacttgctatgccatcgtaaatattgcatgggtatgtacatggtttagttaaaggtagtgtccgtgaaaggtcaccataggcagtgccgccacagtgtaactaaagtgacatacttaccatataatcatttgtgagtgtactgatagtaaactaagtgttaaaattgcactctaggatggtttttaggggtatggctacatcgacgtggaacctatatgtttcaaggcattacatacaaaagccttctttcgcagatacagtcgacttcatccattagagaggcatttatgtttattttaaacagtgttatcgtattattcggtagatatagtatatttagactatttatatatagatgcgaaaataagtgatgaacaccgggctatgcaggtagatgaattttttagtgtattaataatgtattatttgttttagtggtactaatacagtttcatttattaaaagttgacctaactcttaaaacaatgatagtaagtagtgatgacaaacgaccagtttatatatgaccaggacaaaggtatttttgtttaaatctaagaaacattcttatcatgttagaagtattttaaaatataccatctattttatggtaaatatatttctttttttttcttattgtagggtaatctaacttctcttacagtgtgtgtctctagcatatgattccttttagcattatatgattattaagatatatgattccttttagcattatttttttaataacaaataagatgcctgtgcatctgtgtgaatttcctttccgatttatattccacaaatcaaatgttctccggttcatatcctgtcgttatagcgtttgaaacacaaactataatacatgcccacgcgaatgcgcgggctaccttcctagttggtattataattagtctaaatcgcgcgtgcattttttctactcccttcgctccaaaatataacaacttttagcctttagaatttgtcccaaaatataacaacttatttaccaacattttcttctcaaccaatcacaacccttcaccattcaatttccccacctacctccacttctcaaccaaatacaatctttcaccatttaattctacctattttcttaataattgtgtccaactctagaactttcttatattatgggacggaggtaataatgcttttcccgggggagtatcttgccgacgatgcacagcattacaaggatttcctgagttgccagacacctcccaggcatatgaattgcacgcgcccaccactatggagtagaatgccatagctgctagttaaaaagttgtataagagcaccccagcagcttatccaaatttgatccttcatgtcctcatatatagatggtcataaaaaaaaatttcctacttcatgtcccttctgactaaaaaaacatccatattatatactccatatcaaaccctcatatattgagtaatacttccaactaactatacatttgtatta

SEQ ID NO: 7377 - DNA, 22213 bp, Oryza sativa
ctaggatcacctagggttagatctagtggggtggttctatttggaattgatgttttaactaaaaagattgaaaacggagagggtttaatatagaccgaccggttaaggtgttggagaataaaaaagtaccggcaatcgtcgtcgttggcgctcggttgtcgtgaatgcggcaccggtaaggtctacgccgatgacgcctgcgggagtgagggtcgtagatgtcctgccgataaggtgtggcgggcggtggcgcttcccgtcactgactgcgccccctctcgatcgaattagggtttgtagggtggagttggcggcggcggtgaatctcgtacctcgtgccgtgccggcctccacccctgttttatatggcgcagtgtgacggggcccaccagccattgggctggacgccccagatcagggcgcggtcaaggcccccttgagccgttgggctcaaggggagggagatcaatccaccaatacatacatatatacccatatatatatatatatatatatatatatatatatatatatatgcaatgtcaatatatgcatatgtgttaccaaccgggactaaagttctttagctcccagacaggggtctgacgtgccctgtcagggggcgaaccgggactaaagatcccttagtaccgttgtagttataaaccgggactaataaaccattttagtcccggctattgtggaaatcgtccgaccttttaaagatcacttctccagtagtgataagtacgtaccaaaaaaagtatacacacatatcgatcacactgcacagtaacacacgctatgctatttgcttgttgaaaaaaaattaaaagtatatactttttttctacctgattttacgagaatatatatacatgttcgaaaagaattgacaagaatataccatcgtcgtagagcaaatgtgcgaacttgcgcgccgctttgctgcgcctagcgaactgggcttctgatgagatgctaatgattcaattaattaattattaatttctaactaggaagataacccgcgcatttgcacgggcatacgcattagtttgtttcgaaaatagttctaacaaaataaattaaaattaaagtaacgtattttctattttgaattgagtgttctttatatctctctttcgtgaagaaatctcaacaactttcattggttttttttaccatcctgctagccctctctttaattacatgcaattagttatgcatgtgaatcaatatagatagaaaaaatcatttaaaaaatatttattgtagtagttataattattgggttcacctatttaaaggaaaatcaatggtttgttttttatcataatttttaggatttttaatttatttgagcgccatatgacatcttaagagtgtttctagcacaccacgcatgcgataggttgagcccgtttgtagggagtttatttgatttttactatataatagatacttcctccgttttataatgtaagtcattttagtatttcctacatttatattgatgttgatgttaatgaatctacatagatatatatgtctagattcattaacatcaatatgaatgtggaaaatgttagaatgacttacgttgtgaaacggagggaatagttaatatagcatttcttatattattgtttatgtactgagctgctagctagaaaatttggataaaaaagtgagcaggtgagataacaggagataaaatgatgggtctactatattaaatattaagtgaaaatcaatgatatgatgtttttctttttttctcagaactttttagatttctctaatttactagagcgccaagtgacggcttagtagtatttgtaggagtcacgtgacggattaagagagtttctataaagtttagttagtggacttttatatataacctggttttttcagctttatcctttttaatttcggttcatacgatcgtacgttacgttgatataaacgtaacatgtaattattttttttaggtagtacatttatacgtacattcctctccatccacatatgcataggataggaaggatgttttttgtttttttttctatttatgaatagtacatcgtacctttatctccatccatttgcatcagatccatattagaaggaatgattttaatatatttaatctaatggcctgaaatatcggacccactaatttaagtgaaaattaagggccatatgttttactttttttctcagaatttgtaggattttctctaatttattagagtgccactgtagcacaccacacaatgataggttgagagtgtttgtagagagtttatttgatatttactatataatagatagttaatatagcatttcttattatttatgtactgagctgctagctagaaaatttgggtaaaatagtgagcaggtgatgtaataggagataaaatgatgggtccaccatattaagtgaaaattaattatatgatgtttttctttttttctcggaattttttagatttctctaatttattagagcgccatgtgatggcttagtagtgtttgtaggagtcatgtagcggtttaagagcgtttataaaaagtttagtgacttttatatataacctggtttttttggctttatctttataatttccgatcttacgatcgtacgtgaagttcatacgaacgtaacatgtaatttgttttttttttgtgttttaggtagtacatacgtacattcctctccatccatatgcatcggataggaaggatcttttttggttttttctctgtttacgaatagtacatcgtaccttcctctccatccatttgcattagatccatattagaatgaatgattttaatagatttaatctaatgacccgaaatatcgggtcctctaatttaagttaaaattaagggctagatgttttgttttttttctcagaatttgtaggattttctctaatttattagagtgccacgtggcggcttgagagcatttttagaaagccacgtgggtgcttcatagcgtttttagtaagattaatggatttttagtatataatagatagatagatagatgatgttgcgagagatgccaatatgagagctgcaaaattttgcgagatctttagggatattgttggagctagtcttttacttgtaaaaatggtaaattttgatgtggggaatgattttgcaacacttgctaagccaagctacgactcaaagcacaacttgaatccctcaactagtcatgtttgtttcggcttaagattaattactataatctagattattaagtcagattactattaactgaattataataagccgacatagaataagttgttagctgtttgtttctgtggattattagttgtttgttagttgttagccacctaataattaaaaaagcacttttaaagtggattaccatattatagtaagctgtctgtttgtttcagcttactccgaataatttggattataataatcctaagctgaatcaaacagggccttaagttagtcacatagataaccagacacagactatgtgttcttgcagttcctttttccacattcctacttggggaaaaaaatcaggatttttgaaatttaaataccattaggccaaaagtaaatatttttggaccaatttgttaaaacaaaattccgaggctgaaagtttcgaaaatgctcaaaatcgggcgcccgaacagtgcaaaaaatcgggcgcctcccactcgtgcctctgcctcgcctcccacacgtgcgtgtcgcccccaccatatgtccccaccactcgcgctccgttgcaacaaccacccgatataacggaaacgcactatcaaggggatttgttttatttttttccaccaacaatatttcaggtagtgtactcgtgatgtttcactatgtatggatgaaatgttgcagtggattttggtactatttcataatttcatcttaatggacatgtgatttgttgatgtatacgtggtttaagtgttgcaatggctttaaattgtttgctgcatacgttgaaccaaattattttatctagtgatcttaatgtttttcatattttttaagaattgaaacattctttcgctatttgctgaaacattgtttttatatagggtgaaacaacgcccaattttttttggaaaccgttgtttcatacatcttctattatatactaaaagtccatttgtcagggttacgggttaggtatatcctttacccttcgatatacgtcgcatatcggtatggcatacctacgcgtatatggatactctctgcatacactaaggaaatcctttacggagtttatagaaggaaagaatcctactcggacaagactgggtcgtcagtgtatcatgtagggtctgatgtctccgagttctacttggaaaccgcctgacctgcgatataaaagggaccccccggggaggacctaaggcatcgaatctcagagccagcacaacccccacagcctacgaagtcggagcctgcaggagccaaaccgccggagatctagtcgaaccaactcgattacgatcttgccggatccatcgagttccatcgttccttttgtaacctgtgttttccatcatataatcccacatcaactggatttgggctattacttattaaggggcctgaaccagtataatcttcgtcttctgtttgcttgatgtcgtattacgtagacccttgtaccaacgtaccccaataccctctatatccggtctacgggtatcacccgtcgacagtggcgcgccaggtaggggaacatggtgctcaaggttctactactatgtcatccagcttcgccgacaaccgcgtcaacaccaacctccaccggggatttcctgcttcaataatgctggtgtggactcaagtcgacgaaatcgtcttcccggtttacaccacgatcccgatctcagccgacccatcaatgatcagaaacgagaacgcaatggctacaacccaggacgactccatgtcgaaggatcctcccgccgaagcggagaacggaacatcgacgacatccgagctcgagaaggattctaatgcgaccaaaccttgtcgtttagacaagagccacgagccaacgagaatgacttccgaagcgacaaggtcctggtgtcctatccacaaaaccatgaaacacactttgcaagcctgctgggtttttctcaacgtccgcgctgaaattcgcgcctgcaaagagcgtggaattcagcgtatttctccaactcgtgatgtctattgtcctattcacaagacaaagaatcacgacctctcaagctgcaaggtcttcctcagcgccacgaagacgtcatctcctaaggtccagcagtcaggcatatcccttagagatgaagacaaggaacaaggaacgacgctggtttcagatcgattcgtaggcgtaatcgacatcagctcacccgaaccatcagtcctgcatctactcgaggactatggctcatcgccagcaagtacgccgcgcgaggtattagctatcgacggaaccagcacgtcagcacacgctaatgcggaaacacaaaatcaaatggctacaccggcccagcacatcaggaccatcaacgcaatactgagggagaccccttacgatcccgttctaaacgatgatctcgcacaatggacagaacggctacgggaatcaagaaccaacctcaactacgcgttcgaagaagccgctgctgcggcgcacccggaacagccactaactggcggtgccaatggcgaaaatcccaaacagcaggagtcaccgcatcgagctaccccccacctcgcggcaccggcgatctccgcaaccacctcaatggccgccgagaggcacgacgcacatgagacaacggggatcgctcccgataccgcgtctcttcacgatgtcgcgataatgaaagacaggaaggccgctcgaacgaagaccgagactgtgttaatcgccacgatcgtgagaggcggacgcagggcgacgctggtcgaggacaccgccataatgacgaggacgacagagatcggcgccagaacaagaccggagggcggcgacaagattctcgagaacctagccgacgtcctcgtaatcctacactggaaccaagtgatccatcgtcatcgtcgtcttcttcttcatcctcatcattagacagacatccacgaaggacacacgatcgccgacaacccaccgcccctagcgctgggtgtagagctttcagtcgttccttgcgtgatgtccgatggcctgagagattccgacccagagcaatagagaagtacgatgggagcaccgacccagaagagttccttcaagtttactccacagtactctacgctgccggagcagacaacaacgcattggtgaattatttgccaactgcgttaaaaggctctgcacgttcatggctgatgcatctcccgccctactcaatcacttcgtgggcagacctgtggtagcagttcgtcaccaacttccaaggaacttacaagcgccacgcgatcgaagacgacctacatgcgttgacacagaactcgggtgaatccttgagggaatatgttcggcgcttcaacgagtgcagaaatacaatccccgaaatcaccgatgcttctgtaattcgcgccttcaagtccggtgtcagagatcgctatactacccaggagttggcgacaagacgcatcacaactactcggagattgttcgagatcgttgagcgatgcacccacgcaaatgatgcgctgagacgcaagaacgataagccgaagaccgggggagagaagaaaccagccatggacgcacctgagtcaagcaagaagaaaaatcgcaaaaatgggaaaagaaaagctcaagcggaagttctcgcagcagaatacgcgaaccctcccaagcgcccagatccacaaggtagcgacgtgaagaaagcatggtgccccatacacaagacggacatacattctttggaagattgtcttgttttcaaaaagtcgctcgagaagcacatggcatttgaaaaaggcaagcgagtacgcgtggtcgagaaggatgcggaggcggctcctcaggaatcggactcaacatatccagactctgacatccacgtttcacacattttcggaggttccacagcgtactcctcaaagcgagaatacaagaaagtggaacgtgaagtctgtttgacatggcagggggctgcacccaagatgaagtggtctgaacagaagatagaattttcggaagaagaccatcccaagactgccatcatcccaggatgctatccgatcatggtcgaatccactattcggaacatcaaggtcgcgcgggttctcatcgacggtggcagctcaatcaaccttctcttcgccagcacttaagacgtgatgggaattccacgaagcgagttgacacccaccgatcaacccttccatggaattactccctagtcctcgtccaaaccattgggcaaaattacattgcctgtgacttttggccaagcaaacaacttccgaatagagcagatcacctttgatgtcgctgaattcgatacagcgtataacgccatcatcgggagaactgcacttgcgaagttcatggccgcatctcactacgcgtatcaagtgctcaagatgccaggaccgaagggaacaatcactattcaaaggaacgcaaagctggcggtacaatgcgacaagcttagcctcgacaaggttaagcaaacgcctagcccacccgccacaactgagccacccaagaaagtgagaaggacaaacaagacgccaaaaccggacggcgcgatcaagatcgttccactctctagtgccaaccccgataagaacgtcaagatcggggcatcactaagcgagaaataggaattcacgctcatcaccttcctccgcgacaatgctgacgtgttcgcttggcagccgtccgacatgccgggggtccccagggaggtgattgagcacaaactcatggtgcgacccgatgccaagccagtaaagcaaaaactgcggagatttgcaccagaccgaaaacaagccatacaagaagagctcgagaaacttctcaaagctggcttcatcagagaagtacttcatccagagtggctagccaatccagtcatggtgcggaaggccaacgggaaatggagaatgtgcgtcgatttcaccgacctcaacaaggcgtgtcccaaggatcaatgccctcttcctcgaatagatcaattggtggactcaacagccggctgtgagctgttgagcttcctcgacgcttactctggctgccaccaaatcagcatggcgaaagaggacgaagagaagacagcattcatcacgccattcggggtattttgctttgttaagatgccattcggactgataaccacagggaatactttccagcgcacggtacagggcgcacttagcgaccaactcggcaacaatgttgaggcatacgtcgacgacattgttgtcaaaaccaagacaagtgactcattgattgaggacctgcgggaaacgttcgacaacctccgacgatatcgcctcatgctcaatccaaagaagtgcacgttcggagtaccgtcgggcaagctgctcggtttccttgtctctggcagaggaatagaagcaaatcccgagaagatcaaggcaatcgagaacatgaagtcacccacaagactcaaggaagtacaaaagctaaccggatgcatggcagcactaagcaggttcgtcgctaggatgggagaacgaggacaacccttcttcgctctgcggaagaagcaagacaaatttgtatggacacaggaagctgaagaggcattcgttgcactcaaggactacctatcaaacccccctgtacttgttgctccccaacctaatgaagaattattcctctatattgccgccatgccatattccgttagcaccgtcattgttgtcgagagagagaaagtacaacgaccagtctactacatcagcgaagctctccatgacgcaaagacaagatatccacagatccaaaagctgctttacgcggtaatcatgacatcaagaaagctacgccactactttcaagcccacagagtcacagttgtctcctccttccctctcggtgaagttgtgagaaacaaagactttgtcggctgcattgcgaaatgggtagtcgagctgagccagtttgatgtccactttgtgccacgaacagccatcaaagtcccaggtactcgccgacttcgtagccgattggactatgcctgataacaaatcagacaaccaaatcgataacgaaacatggacaatggcgttcgatggtgcactcaacagccaaggagcaggggcaggattcatcttgacatctccttccggagaccaattcaagcacgcaatccacctcaacttcagggcgaccaataacacagccgaatacaaaggactactcgccgggataagagctgcagccgcacttggggtcaagcgactgatcgtgaaaggggactccgagctagtcgcgaaccaggtgcacaaagattataaatgctctaaccccgagttatccaagtatctcgcagaagtcaggaagctggagaaaaggttcgatgggatcgaggttcgacacgtataccgcaaggacaacatcgagccagatgacctagcacgacatgcgtccagacgagaaccgctcgagcccggcacttttctggacatcctgacaaagccatcagtgaaagaggttatcgacgaagttagcccagccgcccccgacattagctcggaggccacagaggcagaacgcgccgttgtcgatatcgagaccacagacgactggcgcaccccactgatcaaattcatcaactgcgaagagttgcccgaggacgatgcagaggccgagaaaataacccgtaaagcaaaaatctactgcatgatcgggaacgatctatacaagaaagcaccaaacgggatacttctcaaatgcgtctcgtccgacgacggcagacaccttctccttgatatacatgaaggcatctgtgggtcacacgccgccggacggacattggtcgggaaagctcttcggcaagggtttctctggccaaccgccctcaaagatacatgcgacatggtccagcgatgtgaatcctgtcaattccatagtaaacacacaaagctacccgcgcaagcgctccagactatccctcttacttggccgttctcgtgctgagtgctagacatactcgggccattcccacgaggacagggcggctacaggttcctattcatgacgatcgacaaattcactaaatagatcgaagcaatacccacgggggaaatcaaggccgacaacgccatctaattcatcaagggggtattttgcagatacggactaccgcaccgcatcataaccgacaacggctcccagttcatcagcgccgatttccaggattactgcatcggactgggagtcaagatatgcttcgcctcggtctctcaccctcaaagcaacggacaagtcgagagggcaaacagcatagtactacaagggatcaagacccgcgtctacgatagactcatgtcacatgacaaaaaatgggtcgaagaactcccatcagtactatgggccgtacgcaccacaacgacaacgtctaacaaggaaacacccttcttcctcgtgtacagctccgaggccatgctccctagtgagctacgacatcatagtacacgagtacagaagtattccgacgaggaccaggaggagcagcgaaacgtcgatgtgaatctactcgaggaacatcgcgaacgagttgccgtcagtgcagccagttaccaacaagccctccgccgctaccacgagaagcgcatccgagcacgcatactttcgatcggtgactacgtcctctgacgggttcaaagccaagcagggcgaaacaagctctcacccaaatgggaaggaccttacacgatcacacaagttttgcggccaggcgcattcaaaatagcagacggtgatggttgcgagttggcaaactcttggaatattgaccaactacgtaaattctatgtatgagtcaatatcatccacacctgtaagacgccttacaacatcaatggagcctatttttaggtgcatattacaatcaaagtgttcctgcccgatgatcccttacccagatgacacctagcgttgaaacctatcctcatgtccctttacgccgtcttaacaaggccttcgaggaacctaagggatcttcggctggggacgcccagagccgataaggccttgtcagatcctatagggacgaaagaccatgtaagacctggtcgtgtaagagttctcgccgtgcgtattaaccaagctgcgtaatcggaaattcactttccaacttcacggctgggggctaggatcagtgcttattcaaccaaggcaggtcaaaggtccaagagccttaccctccgagaagaatcctccgacgacaaggctgggggctggggagagtgtatgactcaaacgattaactaaagttgtgaattgagaacacactcttacacacggtacccagaacatccatcatagggtacaaagactaccaagaaggccaacgccagttcatagactggaagaccttctccgccaacggcgccatcgacttcgctaggtggtctatctccgtcggagtcctcctagaacgagcgaaaccttcatggagaaactcaaggtccagtcgcggacgatgatttcgtaggcaagccaacacgtgccctccggcatatcggctcgatcgacgacattcctgcttcaagggttcgtcaatgcgtttgccgacgccttcgagctgagtacacgccccattcagccacgagatgtatccggccgccgactcttcgggatccccacggggtactcggagctctctacaaaccttggccatggacgtgcagcaactcttcaagtacgagttgaaccacacctcacgacctcagagcgtttccacagcttgctctttctttacttccagcatagttctctcgagttccgctacttcaaatttcgtcttccaatattggatacgacgatcttggccagcaagagcactctcgagatctgttcaatatggaaacaactaagtcaagctgcacccttctttcgggaacacggctgatcaagtcggaggagcaaaaagggatgaagggaccactaacctaaggaagtcgtcgccatcttcgtcctcgcggctaaaatctgatctacatcgtccggcgacgcgtgtggctcaaacgcaagagccggaatgatcgccggcgacttaggctgcccacgctgctggacatcctcgtcatcaacatctctacaaaggacaaaaaagtactcgagatcaaaatgctaaagaaaactaaggtgatgactgcatgcacaaaggcggttggaacccattggagttttacacagcatgtctaaggaatacaagagagtcaaaatcctactctttaaaaagggggagaacatattcccccaggtcaccgacttcttccatcacctccttacgcgtgtcgctagccgccccctgatccaagatctcgcgcagatcgagttcagggtgcgtcagcctcaaacacgcaaggacgtggcacgccccggtgtagatcccgttggatgtctcctctccgatgctggccgcatgcttggagggaatctcctccatcaccgccgccagctccgcaagagaagatgtcagcaagaactcatcgggattcgccgggatagtagacttgataccgcattccccagcgagttggtgcagaccagtataggtgacccgcaacgagccacggatttccgacaagttgttcccgagctccgacatgcggtgctcaagcccctgccgttgtcgctcattgccagccaccaactcccttatcttcttgaggtcctcacgagcctccgccaagtcgtgcgccagccggtcggcgcgctcgttcgccgatgccgccgccgacctcgcctccataatctcgtgaccaatgccgcgagcactagcctcgaggaggcgccccatttcaacctggagctcctcccaggtgaggacggcagccggtggaccacgaccagccgcgagatcgctggctgggccgcttggtgtcgcctcgcggcttccgggcacgaccacgacatccgtcgaggttacagaaggaggcgcgccggaagtccctccagactcgtcttgcgccgccttcgcccgcgccgccctacgagaaggctgtggtttagacaaagttcgacgaaatcacgaaaactcaaattcattcacttacttctcgccgagtgtcacaagccgctgccgtcgtggaggcgggggagacgcgtccgaggcctggagtataatcgatatgaagtcaggtggaagtattctgactacgtgatcaaatgacaggagaacttaccgagggggtaggtgcctttcgacgatgtccgattacagaggagaatttcctcccctttgttggaacgtcgccaccacttgttgtggcagcaacagcagcagcatcggacacctccttggcgactttctctttcagtgacgccgccacctgatggtccgcgagcggctcgatgatatcagtcagaggaacaacctacgctttattaagtcgtaaggcgatctcggaagaaaaacgcagaaggcccactgagtacacttacattgatggcagcgttgcgtttggccgcccccttctcgcaaaggggaacggggacattgctcgccgtcgtcgggccactgatcatcacctggccgacacgatgtctcacggcttcgccgctcagacctgtgaatcgagaaccaaagttcgataatgtcacgaccggaaataacccaacgggcattccttacgtgcgtgcattaatccttgtcccaggaggcaaggtacaccaaaagttgatacaattcagagtttaacaagcggaagcgtaaatagataacttattacatgggcaacgaaggcccagcacacacagagacaaacgagaaacagcggaagactagggcgacgaccacaggcgcttgacggcaggcacgagctagacaccgaagccttcatcctcctggaactcctcttctggggttgggaaaaattgagcaagactgagtacaaccaccgtactcaacaagacacacccacaagtgcagaataaatgcaagggagtacaaaggggttataccataaaggggttagggttgcagtaaacagcatttaaagatatttagttgctcagggctattttgtaaacacgattctagaactaaacaatattctttatcaaggccgtgaacccacacgaacctgccttaacccaaggcctacgatgattcagaccgaactggcaacccgaccctgggtcccagctcgtcccaagccaacccagaccaaccattccacattttagttgttaagcaggttttaagaattaaaacactaacttgggtacattgctcggcttgcccataaccgagggcgcggctattcgaatagattttactctgatcagaggtgtacatctttacccacaagacacatcttcctcacgtgtaaccacgtgccacataccaccacggtatacagacggaagacgtgacatagtttccaacccatcctagccatagacaagagtaccgacccaatcccacctacggccggaacccccgggacaggcaggcaggactgagcccctagcagcaggacaccggccctgtgccatgacatctcgactaccgggccgcagctcgtgtagccttcatttgccctggagaatgtccatcgacccccgacttcatccacctccatccgtgtacttttgtttataactagactgagccacaaactaagccttacccactagacatgtggaagtacggtagtgctttgcaacagaggcccgaagaccggtccttatatggccgaggtgctactatcaaaaccatgcaccccgggcccagcctaaaaccatttttggggattttgaatagagggggcggtgtgaatccaattccacaatactccaacaattccacagtgtccaggtgatatgaacattcccaaagtctagagttgtaaaaccgcctaatgttacctaattaaaagcgaagcatctacctataatcatactagtggtaccatgagtagagtgtccactagttggggttttgtttaatctagggtgaacaaagaaataataacaataacaataataaggtcataacaaaggtaaataggcatggctaaataaaacagtgataacgcgggaatttaaataaagcgataatgcaataatttaaatcaacataattttacaaactgggattcaatatgttcaaagatgatgtgacttgccttgctcgctttcccaaacgccggcttcaacttccacgaagagcggatcttccgaagctgcagcgtctacacgaccaacggaaaagaaaaggcttttactctactaaactccatataacaagcagaaacaaagcacaaaaatgggttcttgacttcttaaggaaaaattagagacttgaacggtccaattccgagttcaaatggccaagatatggccatttgaagtttatatgctctttaaatggatatttgcgaatttcttcatttaaattttaatttaaaatcggatttattgcgtcagccgaggggaggggcgcgcggaccgggtccacgggagtggggcccacgcggcagcctcacggtccacggtggaccgggtgcacgcggcttgcgccggccggcgccgtgggtcccacgcgttagccgcactcgagggcgcgggcggctgacggccgggccccacatggcagccgcggggcgcgcccgaaggcggcctcgccggcacggccgacgggaggcggcgcgcccgcgccccgatggtcgccggcggcgacctccggcgcgacggagcggcgcccgagagaggggagggaagggggaagcgagatggcggtcctcggctcaccctgggtcgacggcgacgacgggaacggcgaccgaagcggagagaggcggcggcgcggctcgggtcgacgaggacggcggcgttccggcggtcggcgggcgaaacgaaggggtggacgaggtcgacgaggacgcggcgaagccgaaggaggcgatgccgaagcgggaggaggtccggggcgacgacggcggcgaaccgaagctcggcggcgacggcggagagagaggacgacggcgcgagctcgattccgacggggagagaaagcggcaagggtcggaaacggaggagggaggcatggggagtgcttaaatagtgttgggagtgagagagggcggccggaggggaaggaaaccggcgcggcgatctcggctccatcaatgacgccggcgaagtttgcgggaggatttccaaacgaatccgagagagagagagagggaaaagtggggggaaagggggagggaatcacggggagtgatttccccctctttattgcgcgcgggggcggcgggatgcggcggaatccgcggcggcggcggcgctagggcacgggcgaggcggcgggcgcggcgcgaggtaggggatgacgggtgggccccacccgtcagcgagggtggcgggcgggcccgcccgtcagcgacgcgcgcgcgggggaaggccgatgggccgcgggggagaggagagagagggagggagctgggccgagccggcccaagagaggaaaggggggggaaaaggacttttagggatttttctttttataaaaccactttaactttgtttatttcttcttaattattatttgtgctctgaaaattccactaaaatttatttacgcattttaggcttttaggaaatatacaaaaatcctccaagccttatttgacttttagctttgcacattttaattgttggaggctttcacatggattttacttattctttgcataatttcgaggatgtattttagagtcaatttgggacgcgacagataagtcaggagaaacgcgcacacaagtaagtcagggtaaatgcaagaaagataccccgaggagaaacccgggtcgtgtcctccggtccagaatagtcaaaggctggatgggctcgagcctggagcggctggatccgtctaccaatgaagtcagcagcgacttcataccccgacaaacctcgtactcggagatcgtcgacaacatcgatgaaggactaaagggaaggggtcaaggtgggctttgcggtccaagacgaaatcttgtctggttgttcctcaggaacaacgaagataggatccgaattttctatctgaagatagaaccacctcctccgccatttgctgcgagaggaagggcactggaaggggatataacgcgacttcaggccatcccgaagtcggaatccaacgcatccagacaccctgttggattctatccaacgcaactcgtagtagaagcgaaagagatcaagaaagggctctacgccaatgtaggcctcacaaagatgtgaaaaaatactaaggaaggcaatagagttggggttcagatagagcaaagaaaggccgtagaagttcaaaaccaagagaagaaattcagaaggcggagggagaaaaccgcagagaatgtagtcctcgatcgcaaccatgtgacctaggacaggttggggttcagtacctcctgcttctctttccatggtcccgcgaccaggaagggcgccatcctcctaaagcttcttcagtgacgcgctggtggaggaagatttgccgagatccatcgctgactggagatcgccggaggaaggactgagattgacgagctagggttttgcgggagcggagaagacgagaaacgcttggaggctggaggttttcttcacaacaggcggacttcaaaatggatccccaaaattcccttaaatagacgcacttccgacggtgcgaattccaaggaaaggagagagatagccgccggaaatttctgggtccgttacgcgtggaaatctttcggacttcagtttaaattcactcatgaccgttgggcttcacatggtgttctcgactatgtcctgtctctacggttttcacaccgggaatgacaacagcctcgacactagaagtcgcgaatggttacacgagttcatttaagcagaagtcgggggctactatcagggttacgggttagttacaccctttacccttcgatatatgtcgaatatcggtatggcatacctacgtgtatacggatactctctgcatacactaaggaaatcctttacggagtttatagaaggaaagaatcctactcgaacaagactgggtcgtcagtgtatcgtgtagggtctgatgtttccgagttctacttggaaaccgcctgacctgcgatataaaaaggaccccccggggaggacctaaggcatcgaatctcagagtcaacacaacccccacagcctacgaagtcggagcctgcaggagccaaaccgccagagatctagtcgaaccaactcgattacgatctcgccggatccatcgagttccatcgttccctttgtaacctgtgttttccatcatataatcccacatcaactggattagggctattacctatcaaggggcctgaaccagtataatcttcgtcttctgtttgcttgatgtcgtattacgtagacccttgtacaaacgtaccccaataccctctatatccggtctacgggtatcacccgtcgacaccattaatcttactaaaaacgctctcaagcagccacgtggcttcctaaaaacgctcttaagccgccacgtggcactctaataaattagagaaaatcctacaaattttgagaaaaaaaatcaaaacatctagccttaattttcacttaaattagaggacccgatatttcatgccattagattaaatctattaaaatcattcattctaatatggatctaatgcaaatggatggagaggaaggtacgatgtactattcgtaaacagagaaaaaaccaaaaaagatccttcctatccgatgcatatggatggagaggaatgtacgtatgtactacctaaaacacagaaaaaaaacaaattacatgttacgttcgtaagaacttaacgtacgatcgtaagatcggaaattataaagataaagccgaaaaaaccaggttatatataaaagtccactaaactttatataaacgctcttaagccgctacatgactcctacaaacgctactaagccgtcacgtggcgctctaataaattagagaaatctaaaaaattctgagaaaaaaaggaaaacatcgtatcattgattttcacttaatatggtggacccatcattttatctcctattatctcacctgctcacttttttatccaaattttctagctagcagctcagtacataaacaataatataagaaatgttgtattaactactccctctgtttcataatgtaagtcattctaacatttcccacattcatattgatgttaatgaatctagacatatatatctatgtagattcattaacatcaacatcactatgaatgtggaaaatgctaaaatgacttacattgtgaaacggaggaaatatctattatatagtaaaaatcaaataaactccctgcaaacgctctcaacctgtcgcatgcgtggtgtgctacaaacactcttaagatgtcatatggcgctcaaataaattaaaaatcctaaaaattatgataaaaaacaaaccattcattttcttttaaataggtgaacccaataattataactactacaataaatattttttaaaagattttttctatctatattgattcacatgcataactaattgtacatatatgagaaataattaaagagagggctagcatgatggtaaaaaaaccaacgaaagttgttgagatttcttcacgaaagagagatataaagaacactcaattcaaaatagaaactcaattcaaaatagaaaatacgttactttaattttaatttattttgttagaactattttcgaaacaaactaatgggtatgcccgtgcaaatgcgcagagttgtagaaaaatatttcatgaggtaatttggttgtcttttagctttttatataattgaaacattttcgatttactaaaaatatgttcgatctactcggtgaaacttgatattttttcccgattcgggaatgttttcatgccgcggggtctgaagttcctgaattttcggaaatacgggaagtttcgaaccgaaatttcagggctgacggaaccaagctgccgcctgttcaattcctatttcagcgccaccttccctcccatcctcggcgtctcctcgaccatcatcgccgccgccgccgccgccgccggcggctcgcctcatcctttctccggccagccggtcgacctctccgtcagtttctccgcgccctgtcctactcgctggggtaaccaccgccatcgtcttgctactcctcttcgttccctacaaaatcctacgagccatttttcgttttggggttttggggttgggcaagggggaatttgagggctgtgatgataatgatgctttttcgttggtgatgccgctgatccagttttgcaatgggggatcgatcgacgccgttttctggatgaatccgtccttgaaatcggccattttacttttccttttttgggatcaaagaggtaaaggggttcttaatcttgtagaagaaatggccttggcaaagcagttgttaagtgttgtcgattaggtttccagcaatctgcggaggtggaatgatttggggactaatgtggttttgttatttgaggcctcaaagtctttagattggtgggtgaacataacggaaatttgtgtgattgataaatcaggtattgggatttgtggattggaggaactgggtgtgataggttatttttatcaacgtccgcaagggatttatggttcttttaggtatggtggcactggcaccagttaattaagggttcttgttgaggttgatcatttcttgtgctccttgttgaactgattcccgatttataatggaaatataggagaaaaaaatgtggaagagtggtgaaaattggtcttgttgcttttagtgaatggtaggagcacatgctttgcatctttcatataatcatattgcttcaaggaaataattgtgccctacccgtgagaaggaattggttgcatgttttagttgtattggcatatatctctgatgtctatgttgtaatagttcagagcatgagtgcatgacagcattgtgttttctttgcggatgtgcctgttgtagtggtagtggtagatgattcttttcctctttagaaacatgcagtccgtatatcttttaggaagtcatataacagtggaaattcatcatattgttctctagcccatttttcacttcgattcttcactaaactttcaatagttccagtgtgttttattgtttaaagcacaaaaacttgatgtttgattcttctgatgtagaagtaacaatctaatgttagttagtttgatgatattgggtgccttgaaattgtcgattccgttggattaatatattaatcaaagtatggtgagtgtgtggattacatacagcagccagactcttatatttctggaaactccgatccagcgttaagactagcgaattactctgttgtagaaaccagactgtaatttttaccgagtcaagtatttttttttggcgtaaactgggaagcttctttctaattacttaaacaagttttttgatccagccatttgaatatccatgtattggatgtgtattctgttacatattcagttagatccttgattttccatcctgcagatctgttcctttcatataatcccctcaatttcaaattcttgttccaaactttatcttttattatggagttttatcatataataatagtaattttgataggtttgtggtgacaactttgttcttattaaggtttgcagcatgtgtacgctctgacatgatgtagggtctgaataggaagagctagcacctgtgtggaactgcataataattttgtaatctgaaaaatgttacttacatgctaaattgtaattttctacttctcttgtgctttctatttccaccttatattaactgaaatctcattcttgttaccaaaagcgagctaacctatctcatgccatatctgaacatgcttgatcaggtccatc

SEQ ID NO: 7378 - DNA, 38219 bp, Oryza sativa
ggcgccgccatctccgtcgtcgccgttctctctctcacttcacgcgggtggagggcgagagacggtggggggagaagagaagagaaaaggcgctggccatggcgcggcgggcgcgaaggtcgccggcgatggtgacgccatccacgcggtcgcgcgagagagagaagagaagagaagctagggttttcggcggccggctgggagaggggggtttttgatcctccgatctcggcgcccggccgtccgatcgaaaccctagctgatcggacggtcgacgccggccgggccgaaatcggcccaagagggcgcgcgcgggggggcggctttcctggcccaggcccaggttgcggcttggggaagggggcgcccgcccgtgccaaaaggccacgggccgaccggaaaaagtctgtttgaggtccctcggggccgaaaacaaagaaaagagaacagtagcattttttccaatttattttgtcgatttttcatgcaaatttcaatagaattttgaatagatttttgcatgttttacctctgtttaaatttgaaccaacgggagaattttcacagagagagaattacagagattttgctactgttcatatgatttttatatagttttccgctgcaaatagatgtaattgatgaaaattagtgtttctaaaattaaatttcgaaccaacgggagaatttaattttaggaacattaattatgtgctatgatgttgtaattttctgaccaacgttgttaattgcattattatagttatggttataagtgttatgtctaatttctgcccaacggtgatgtaggcttaatgcataatattttaatgttaattttgttctcaccgcacatgattatttcaggtggctactccttgatgggttgcattaaagatattccgaccctaaaaggagataactacgcagaatggaaaagaaaactcgaccttgcttttatcttgggagaggtggactgggtgttgactaccccatgtcctatagaacctgctgaacttgtcagaggtgaaaatgagtcagatgctgactggcaaaagagacagagggacaatgctcctctcgtcatgtcgtatgacattgaacaaaagaaatggtccttagccaacaagaaatgtttggctgtggtaaagaatacgattgagcctaccatattgggctcgatcccagagtgtgacgctgtctcagagtaccttgaaagaataaagagtcagtttactggctcttcaaagacttatgctacacagctgatcaagcagcttgtgacagaaaggtaccatggaggtggtgttagagaccacatacttagaatgagcaacatggcttccaagttgaagccaatggatttgggcataacagatgactttctggtccatctggttatggcctcattgccaaagcagtttgacaattttattgtcaactacaacataagtccagagaaatggaactttgagaagctcattgctaattgtgtgcaagaggaggagagaatcaaagaatcaaatggtggttcaataaactatgttaaagataagaaaaagaaccacaagtctcccacctcaaaaggtaaacagtctcagcatctgcctcagcaacaacagttcgctgttgagaaagatcaatgtctccactgcaagaagacaggacactacaagaaagattgtcctgactttctgaaaatgatcatggcaaagaaaggtgagaacattattacatttgtaaatgaatctcattatgttggttactctagatccacatggtggattgattctggagcaactattcatgcttgtaattgtttaaaggcattccgttcgacgaggactacgcaaggaagagaaagctccattagagttgccaatggagttgaagaaaaagttgaagctgttggagatcttccgctagagctcgcgaatggcttcacacttttacttcgagatgtcttttatgttccttctttgcaaagaaacttaataagtgtatcaaagttggattttgatggatatgattgccgctttggaagtggcaaatgtgaactatggcataataatgcatgtattggtcttgctgtgttgcgagacgagctttatttgttatctctttctgagaatgtgaatgttgtgtcctcgttgacaaaagaaaacaagaaaagaaagcgaacttccaatgtctcatcgaaattatggcactgtcgtttgggccatatttcgagggggagaattgagagactagttaagaatgaaattctttccccattggagttctcagacttagaacaatgcatagaatgcattaaaggaaaatttgtaaagagcatcaaaaagggtgcaaaacgaagcgcaggaattttagagatcattcatacagatatttgtggtccatttcctgtgaaaagtatggatggctatgactcgttcataacattcacagatgattactcccgctatggttatatttatccaattaaagagcgatcagaagcactggataaatttaagatattcaaagctgaagttgaaaatcagcatgatataaagattaaagtagtaagatctgaccgtggggggagtactatggtcgacatacgccttatgggcaagtccctggaccttttgcaaggttcttgctagagaatggaatagtagcccagtattcaacaccgggcgaacctcaacagaatggggtagctgaaaggcgcaaccgtacccttatggatatggtgcgcagcatgatgagctactccacactaccactcggtttatggatggaggcgttaaaaaccgccattcatattctcaacagagttccaagcaaatcggtgcccaaaacaccgtatgagctatggacaggaagagtaccctcgctaactcacctccgtgtgtgggggagtcctacagaggccaaagtatttaacccaaatattgggaagttggaccccaaaacagtcagctgccattttattggctatcctgaaagatcaaaaggctatcgtttctactgtccaaacagttatacaaagtttgtagaaacgagacacgccgtcttcttggaagacgaaatgattagggggagctcggtagttcgagaaattgatcttgaggagaggcgggtgtctgtacccgctccgtcgactcaggaacctttcttctctctacctgctgatgttgtgcctgcaatgcctgtcattgaggtaccagcacctgttgttacccctcctgtggcaacaatgaatgagagtgaggaacctgttatacaggattcaacagaaatggttgccacaccagaggaggagctacaacagcctcaaatagataatgtgccagtacaggagactcatcaagagcctcaggtacaggatgtggcaaatgtgcaggcccctagaaggtctgaaagagtcagaagatcggctatccgtgatgactataaagtttataatatagaagagtcgcatatggaggatgatcccacctcatatgaagaggccatgagaagcgctcgctcatctgaatggttggaagccatgaaagatgaaatgaaatcaatgaaactaaacgatgtttgggatttagaagaaattcctaaaggagccaaaacagtaggctgtaaatgggtctacaaaaccaaatatgactccagagggaatatagaaaagtttaaagcgcgacttgtggcaaaaggcttcacgcaacgagaagggattgattacaatgagacattttctccagtctcttgtaaagattccttcaggattataatggcactagtggcacattatgatttggaattacatcagatggatgtaaaaacggcatttctaaatggagatttggaggaaaaagtatacatggcgcaaccgaaaggttttttcatgaaaggaaacgaaaatatgggatgtcgtctaaagagatccatttatggattaaagcaagcttcgagacagtggtacttgaagtttgatgggacaataaaaaaatttgggtttcaagagaatgtcgaggacaactgtatttattcaaagtttaagaatgggagatttattttcctaattctgtatgtggatgacattctactggctagtagtgatgtcagtctactgcaggaaacaaagaaattcttgtccacaaactttgacatgaaagacctcggtgaggcttcatatgttttgggcatagagattcaccgagatagaacaaagtatgcattgggactttctcaaaagacatatatagaaaaggtgttgaagaaattcaacatgtacagatgcagtgctacacctgctcctataatgaaaggcgaaaagtatggggcatcgcaatgtcccataaatcagtatgagctcaatgaaatgaaaacaaagccatatgtgtcagctgtaggaagcctacagtacgcgcaagtgtgcacacgacctgacttggcatttgttaccgggttacttggcagatttcagagtaatccaggcctagagcactggaaattggtaaagaaagtcttgcgttatttgcaaggaacaaaaggcctcatgctgacttacagaagatcagaatcactccagatagtggggtactcagattctgactttgcaaaagataatacaaagtcaacatcgggatacgtgtttaccctggcaggaggagctatttcatggaaaagctcaaaacagactatcactgcagggtctactatgtatgccgagtttatagcatgctatgaggcaacggggcaggtgaactggctaaagaagttcatacccggtttaaaggtggttgacagtattgagaaaccactaaagttatactgcgacaacgaacccgcagtaatgtacgctcacaacaatcagtcaagtggtgctgccaaacacattgacataaagtactatgttgtgaaggacaaagtccgggatcaaacaatcagtctcgagcacattaaaacagaaaggatgctcgcggatccgctcacgaaaggcctaccacccaacgtgttcaaggaacatgtagccggcatgggtttaagggaagccttatgaatcctggactacagggcccaaaagtaaagtatctgtttctgaatagagatgtgtatagtggctgtcgaatccatcggtgattgaccgtgacgatgaaacatgctctatttacaaatctgtgatggaatagaaaaagctaaaagaaaaagtgagatcaagggggagaatgttagattgatctccctccccttgagcccaacggctcaagagggccttgaccgcgccctgatcgggggcgtccagcttaatggctggtgggccccgtcacactgcgccatataaaagaggggtggaggccggcacggcacgaggtacgagattcaccgccgccgccaactccaccctacaaaccctaatccgatcgagagggggcgcagccagtgacgggaagcgccaccgccgcgccacacctcatcgccaggacatctacgaccgtcactcccgcagccgtcatcgccgtcgacctcaccggcgccgcatccacgacaaccgagcgccaacgacgacgatggccggcacttcttcatcctccaacacctcaaccggtcggtctatctaaaccctctcccgttttcaatctctatagttcaaacatcaatcccaaatagaaccacccgactagatctaacctaggtgatcctagtgcaaagtccaacatgtatatatatatgtatgtatgtatgtatgtatgtatgtaccataaatatctctatatatatgtgtgtgtgaagcaggcagcacaaccaaattaaaaataaataaataaaatctttagtcctgattcctggttggtgttaccaactgagattaaagatggagctttacttccgggtatttgaatcgggactaaagactgtcatctttagtcccggattcttcctcccggttcgctacacgggagtaaaggggttacgacctgggagagatgagcacttctccggtagtgtgcatcgatcgtttggtcgtccctccgacaagttgcgtcgggtgaagctagatggagacaaatgagaattgactcaggactccattctgatcgatacctatagctagctagctaatgagcagtgacgatcgcgaattcgggatcaacatggcagcaaaagaattgacactcgatgggatgcctttgactgatcgaagtgctgaaatcaatgggctcgatctgctagcatatcatgactggaagatggcttatcgattattggtcatcccttcgcacctatgaattgccgcgttggtccagcccgtgatgtatggtgaatgatatagtatcctccctccgtcccacgatataagggattttaagtttttgattgcaatgtttgatcacgtgtctcattcaaaaatttttttgcaaatataaaaaacaaaaagttgtgcttaaaatactgtagataataaagtaagtcacaaataaaataaataataattttaaaaaaatttgaataaaacgagtggtcaaacgttgcaagaaaaactcaaaatcccttatattataggacggaggaagtaattatcggagggtcgaaacgaataaattgaatattagtaagttgataaggtgatacagaaattaaagttctctaagagaaaaaactgataaattaaaagtgccaatttgcaaagtatgcctacgataatccatactattattatgatcgaccaataagctgaaaagaacgggacgtacgtaagcgttgcgacactgtcatgtgaagtagcgccttgagtcatcatcgtcaacgctacggatcggagctccttcaccaattatgtgcatattcttagatgacgtaaagagctccggaattcttcacttccctaacttgaaaaaaaaaataatacctccatattttaatatatgataccgttaattttttatccaacgtttaaccattcgtcttattaaaaaattatataattatcatttattttattatgacttgattcatcatcaaatgttttttaagcatgatataaatattttcatatttacataaaaaattttaaataaaatgaatgatcaaacattgttcaaaagtcgacgacgtcatacatatacgaagtgagtaatagttaccgcgtactccctatacaaggggcgacgatgctgtctgttttccaaaagaccgacgaagctagctagagtcaagtcaacatgcaagtggtacatcgtgtattcacatttaagctggccccgactaatcatcgattcattgcatgcatttaccagccgtgcctataaattaaggtaaccatacctgcaaacacactgcaaactcgcatatgtgcacatatcaatatatcatactagtaccattctgccggcatcaagttcgggcttcgagtgcccagctaccgcgagctgtaagcttctcttctgtagtctactttcacttgttatcatgggaagtaggaacatgtcatgttattcttaagttaagcattcgcatcttttctaaatatccaaatgttgatggctgtatgaattatctacagctagttcattacaaaatataagccgtatatatatatatggttttaacgtggtcttcattattatattttgacaatttatttgtttcaaaggacatcattaacaaccagaatcatcatcgtataaaaatattttaaaatttgaatccaaaacactatcacttgtgtagttctacaagccatgcacctcatatgtatggttctacctcgatcaaaagctagtcaaaacgatcccatctcaaaccgtgttcatcagacgcatttagattgctaagcacacgtatataaaagtttatttttcagcctttgcatttagattgctaagcacacgtatataaaagttttatttacaaattacaaatatgttgtttcgcttattccacaaataaacgaaacgatgggtccgtacgttgatcaaacaagctcactacgaaggttactactgtgagtcttgtgtacgttcttggcctcgtccttccatatctagttagtttttttaaaaaaaaaaagataatgtaaatcgtttacatatctagtttttgccatagggtatatagactatagacataaaagagcattgctaaattagaaaaaaacagaatagggcgacgggacagatctcgacactccactcaaataaacgagaattcgattggaagtcatatggtccgttgattgcttataatcgaacagtctataatggattgggcggtatatatctataggaggggattaaaatgtgagccatgtattaatttaaacatggaaggaaaacactgcatgcaataaacacattgcatagaattgtaatttgaggcttagtaatccacaattttttaaacctagcaaatccctttaaatttattttcttgcacatggaaagcagcgtttacaattttggttcgaaatttcgataattttggtccccaccggcaaatcaatataccgatagaaattttcagattttctcttttttttgtggaatttggtcaaatttactcaaattcgatcaaaatctttcaaaatttcaaaaaaataatggtccgaaaagtgccgaaaatcatgaaatttggtaaaatttcggtcctaccgaaatcaaaattgtaaaccctggtggaaagtcgaaaggatctctgcaacaaaaagaaaaggggaagtcaaaagtaatatcactggtcatggactagccataggaactgccactggtgtctcatgtaagcatggactaaattatgcaatacaacgttcggtaaccaggaaggagcctataattagtcaactaatgttttcatgtatgcgtcgagtagtgaatagtttaattagaaaaggcacactactaaaaaatagttttcgctgacagtcaaaatggattttcgctagcggctagatgtgccgccagtgactaaaggcaagtgaaaataatgctggccgccagtgaaaattgagtttcgcaagcagctatgctaagacaaccgctagcaaaaataccattttggctagtggcaaaattagaccaccagtgaagacaattttggggataaaaaaaattcaaaatggtgctgccaactgccacagccgcaaacaccgccggctgctgccacaacacctcaccgtggccgccgcctgccaaagcccaagccatggtcgccaagtggtagatgggggggaggggttggagtagcctagccatcatcgtcgttgtggcagcccccatcgtcgtcgtcgtcgtggcagccgccgccggatccacctccttcaccgccgtggaggaccgcctgagcaccaccgccggcggatccgcgcccaccctcctaccaccatcgcttcccactccgttggcctcccccgttgctgtggcggcggatccttggtagccgctagcgaaaatcctattttagttgtcggtaacctataaaaagatctctatttttgcaagcagacctcttaagtgaccgccagcgaaaatcaaatttttgcaagcggttgataaccggaatccctccaattattttcacaatcgtattttcatcaaacccgacagtaaaaataaaagggtaatgctataaaaaataatttttctagtagtggcagcttgaattgggtgtaatgtatccttgagctgaaagagatgatgactagtagctttcttgtgtgcaggatttttatgaagaaaactctcaactctgtacagcgctgaaaggaagctagttttcagataatcttagcctaattaagctaaaccattcttcaggtatttcaactactaccaactgagtgtccgaacattttatacaacattgaaaatttaaactttccgatccgtttcaatgtatgaacacaaccaagatcgatcgaaattcgagcaaacaagctcgccatgaccatgaaggttaccactgcaactgcacatttcctcttggtgttcttggcgtccaccatctcccattcagtcatctgctcagctctcggaaacgaaaccgatcagctgtcttcgctgcttgaattcaagaacgcgatcagtctcgatccagagcaatccctcatctcatggaacagcagcaaccacctgtgcagctgggagggcgtctcgtgcagctccaagaacccaccacgcgtcaccgccattgatctagtaggtctagtaggtcgcatctctccttcgctcgggaacctaacattcctcaggaacctctccctggcgacgaacagattcaccggccagattccggcgtccctcggccgcctccgccgcctccggtcactctacctcagcaataacacgctgcaagggaccataccgagcttcgcgaactgctccgagctcagggcgctgttcctcgacggcaatgagctcgccggaggactccccggcgccggcgacctgcccgtcggcatcgaggcgctggtgctctcgtcgaaccgtctcgccgggacgatccctccctcgctcggcaacgtcacgacgctgaggaagcttgcctgcatgaacaacggcgtcggcggcggcatccccggcgagctcgccgcgctgcgcgggatggaggtgctggccgtcgacggaaaccggctgtcgggtgggtttccggtggcagtcatgaacatgtcggggctcgccgtgctcggcctcagcaccaacggcttcaccggcgagctgccgtccggcatcggcggcttcctgcccaagctccggcagctcaccatcggcggcaacttcttccaagggaatatcccttcttccttagcaaatgcttcgaatcttttcaagcttggtatgtctgacaataacttcaccggtgtggtgcctgcctccattggcaagcttgccaagcttacattattgaaccttgagatgaatcagctccatgctcgtagcaagcaagaatgggagttcatggataacctagctaattgcaccgagctacaagtactctctcttgagaagaatcaaatggaaggacaggtaccaagttcactaggcaatttttcagttcaacttcagtatctttacctggggctcaatagattgtcagggagttttccttctggcattgcaaaccttccaaacctgataattctggcactggatgacaactggtttacaggttctgtaccacaatggcttggaggtctcaaaacattgcagagcctaacagtgtcctacaacaattttacagggtatgtcccctcctccctttccaatctatcacatttgatggagctttttctagagtcaaatcagttcattgggaacatacctccaagccttggaaaccttcagttccttacaacaatcgacatttccaataacaatcttcatggtagtgtgccagagtaaatcttcagaattccaacaatagagcaagtttggttaagattcaataatctcagtggggaacttcctgcagaagtagggaatgccaagcagctcatgtatttgcagctttcatccaatatgttgtctggagatcttcctaatactttgggcagctgcgaaaatttgcaacatattgagctggatcataataatttaagtggaggtattcccccttcgtttggcaaattaattagcctaaagtttctcaacctatcacacaacaagttaactggatcaataccaatgttacttggtgatcttcagcttcttgaacagatagatttgtcattcaaccatcttagaggtgaggtcccaactaaaggtatcttcaagaattcaagtgccatacaaattgatggaaatctagggctttgtggaggtgcactagagttacacctacctgaatgtcctattacgccatcaaatacgactaaacgcaagccatctgtactagccatagtgattccattagctagtatggtgacacttgcattggtgatattggtcttgtttatctgtaagggaaaacaaaagaaaaactcaatgtctttgccctcatttggtagtgaatttcccaaagtttcttatagggatcttgccagagcaacaaatgggttttcaacatccaatttgattggcgaaggaagatacagttctgtataccaaggacagtcatttcagggcataaccgtagttgctatcaaggttttcagtctagagacaaggggagcacaaaaaagcttcattgcatagtgtaatgctttaagaaatgtgcggcatcgtaatctagttcctatcttaacggcgtgctcaagcattgattcaagtgggaatgacttcaaagcattggtatataaattcatgccacggggagatttgcataaattactgtactcaactccacatgatgatagatcttcaaatttgtgctctatttcactagctcaaaggttaaacattgtggttgatgtatctgatgcattggcatatctacaccacaaccatcaagggccaattattcattgtgatctcaagcctagcaacattcttttggatgatagtatgacagctcatgttggagactttggacttgcaaggttcaaaattgattctaaaacatctttgggtaactcagtttcaacttcttcattcacaataaatggaaccataggatatgttgctccaggtatatatgatccatttcacacagtattttcttaacaattaattgaagacaacagtttcataatttgtttatatgacatctaaaatgaactctcttcctgcatacgatatgtagaatgtgccataggtggtcaagtttcaactgctgcagatgtatacagcttcggagttgttctcttagagatattcataaggaagaggccaacagatgacatgtttaaggatggattgagcattgcaaaatatgcagatatcaacatccctgacaggttgctgcagattgttgatcctcagctggtacaagagttgagcctcaaccaagaagatccagttgctaccgatgaaaatgcagcacactgccttctttctgtactgaacattggactttgctgcaccaagtcatcccccaatgagcgcatcagtatgcaggaggtggctgccaagctgcacgcaattagggattccatatctcagaggttactgaatcaacatcaacactgttagttgttctgttttgtctgaaactccgaataattttcagaagacatgctgtacgccaagcaccacctctagactgagccggcgccaattcagttatatcgatggcgaccaccacaacacgtagggatctgtgctcttggacatggagcagagggtcctcatggaggagatcgtcacactactccccgtcgagagggccgtcgccacgacgaggttcgtgctcggacttctccgcaccgacatgatcctgcacactggcgtggcgtgccgagacgcgttggagatgagagccagcaaacagctcaaggaggcaacgcatgaggacctcctgatccccaacactggcaactttgtggagacgctctatgacgtggactgcatggagcggatgctggagcagttcatcgtcacagttcacgaactcgtcggtgtacgttcaccggtccgtctcgccacagatataggacgaaggctaggtggttgacgcatcctccggcgagctcatgccacggattagaacagtggccaagctcgtcgacagctactccctcattccctaaatattttacgccgttgactttttaaacatgtttgatcgttcgtcttattcaaaaatttaagtaattattaattcttttcctatcatttgatttattgttaaactaggaaggtagcccgcgcagatgcgcgggcaatttattttatgtttatataaaaaaatctgaaaaaaagtcatatatcatcatattaactataagaacagtagattacctcgtaaccttaccataaaagaaggaaatatttataccgtgaatttgataaggtaaatgatagtgtctatcatattcaaacaaaaaatcactttgtttcggttatatgtaaacttacctatcatcattctttgcaaacataatatgagttttgatgttttttttcttttattatacatgtaattcacttacgcatgttcatgggtaatgtacaaagaaatactctatattgtcaaaattatttgtactaattgttaacacaatttatatgagaacgacataattaaaagggataaaatatgattccatatgacattttttattgtacgtatgtacgtaagttttttttctcgaatggtagtctctcgtatgttcgttctttttcatgtttttttgacaaatatttctctctcataggaggtagggtgtgcgtatgtgtattcatagggtgggtgcacacacgtttaaatgaccacctatgattgcgttttacattgttagtcaaaaaaaatattttcaagaaaattggcgagggtgacatgaagcggcgccatggcagcgtggcttctttgacaacatcgcaaagagtggtcgctacatatatgtataatttgggagaaccttagggctacaaagaaagaaattgaaaactaccagatggggtgaaccatatacacacacttcttttttatttttgacattgcgtatatgtacgtgcatatatatacacacacttctttttttatttttgtcatctcttatatatgtacgtgcatagagagggattagctagtttatagaagcaagggcttacctgaataaatctaatttaatggttgaaaataatggattcatcggttgaagtgcaaatcgatgggtagatgttttgttttctccttatattttttcttaaatttcctcctatttattagagcatcacatgacatctcacaagtgtttgtagaagtataggaacgctattgcttaaactcacagtctacttgtagtcaactactgtttgttgtgattttgtgtcatcctctacttatatatcattttttttattaatgggttcccactaagtatcatcatatatcttcggtgcttgatgacgcacgtgcttattggatgtcaactaattattaagtgcattgtgcatggatgtatcataaacaatataactcgacgattgttgacactggtttgtatatagaacttattacatagaatttatcggggacatacgattgatatattatactatcctagattcacaaagtatattatacactacatattaagttttagtgcatatgtaataaatttatggttaagttctaaagtgcttatcagagtggctacttcattatttatcatgaccatgtttaccgaattgttaaacggtgcatattttacaaaatattttttattatagaagttttctaaaaatacaaataaatccattttcaagctttcaatatttaatactcgattaatcttgtgctaatgacttgtgacttttcgtgtgccctggatacgctaagtcaatgagctagatcgaacgaaggctaagtaggagaaaaagatattgacgtggtgtcaaatgaatatatttgatcttcaattttctaataatatatgaatagagtaaacacataatacataaaaaatatttatgataaatttataacatcatttttccatatcagtattttttacaagagagagtgagtaatttttgaaattctacacacacttgaagttgttttattttggaaaatgtaagtctaatttaactatcacataatctatactttcaatttatttatattttttatgggtgtttcaatgacatgcgcctaatttgaatacaactcgaaatagcatatatttttacaacgcaaagcatagttgatattagtttaaattattagtttggttttccatctaatccaaatgatgagaagaaaaaaaaataaggatgtgggacgcggtgtgtatacgcactgtttataggaatagctgtgtacatactctacgtaggtacgtacttttcttaagaaggaatacctacatacctacgtgcatgtatattggccggtcgtgccaatacgacatgggcctttttacaagtaaatctattttgtagttttaagatagatctaatagttgaaaataatgggtccaccaaattaaatgaaaaccgattggtcgggattttttttattttatacaatttctatgatttattagagtgccacatggtggtctatgagcatttatagggtactatgttcggattagaagcgtttgtaggaagtttatcctcttgattacattttctccctttttctctttatgaaaatatttgcaacaataatttttaaataaccacaaccttctgaattatatatttatttgtaacaatatattttaactcattataatttttaacttttaaatcatacctttatttttttatctatttggaccattgtgttatttatgataaaaatcacaattagaattcatacgtaagttatctacttcactcataaaatgtttattcttccatgttccatttactatcctatgcatgtcattcaaacgtatatgaaaaattataaaaagaaagtgactatatattgtttcttccagtaccacttcacttgcacgcataaataaagtcagtcactgtatatactgttagatcaactttttaaagaatgcccgtgtagctgaaaacatatattttcaaatcatatattttttattgtacgttttttaccatatttgtgaagtaataagttttgtttttctactatagaaaatactattttaaaaaaccatctgtttttttgtctacgcatacgtacatttttttcttggttttgtctacgcatatgtacgttcgtttctaaagtttctgtttttttaattgtgcgtacgtatgtagatttttcggtctaagcggtttcactcgtatggacatgattttccggtatatacggcttcaatatacaatgtagtactttttttggctttatagctgcacgtatattagtttttttttaagcgagcagtacgtatgggtttatatccgatcggaatatactttaatttttctcgtaaaactttctcatgtataaagcttatacgttaagggagtagcaatgacttttcaagtagatctaatctaatggtgtaaaataatggggctaccaatttaagtgaaactcgacggttagattgaaaatagccatgtggcgatttaggagcgtttgtaggaacgtcacatgatggcttaggagcgtttgtagggagattaatggacttttagtatataatagatagatatgcttttatgtatacatatagttttgtatattttaaaaaaaattgaataagacgaacggttaaacgtgtttaaaaaagtcaacaacgtcgaatatttatggacagagagagtacctcgcagaggtcgcgaccaacaccatcctcaagttctccaagtagcatcactaataagctcatcccagactaagcgggccattgtgatgttgctacaggtgcggttaattgaagcgggttgttgtttgtttgctgctgatatactttgaggtgtacgttgaatgttgctgaaatgctagagctaaatggtgttgttgctgttgatatgaatgatagctgatctgatatgctgctagataattcaaaggctgtttgcttgtggcaagggagggagggagaggtcggtgggtgcgtgcaggaggaatcgacttttgggcgaggggagcacgtgtgggaggaggaaaacatattttctgttggtagttttatggaggtcacactttttagtttgtacaatcaatttagccttgatttatggagggcacgatagttttagccttaatttaggttaaagaacggagatagtaaaaatattagccccagaacctaaattttttacctactccgtatttaacagaaggaaggtaaacattatgtcacccacaaacactcggccactagaatcctcgaggtccctacggccatcacgtgacatcacgatgatcaaggtcatcgaggtccctacggccatcacgtgacatcacgatgatcaaggtcatcatgtcaccatactcatcgaatttcctcacgctcgtcttctttcctcgctctacacccaaatcccaaccaccctcacaacacctcccgcttcatgctggctaaagtccccaaaaagatgagaacaacatgcatcgcgcccacgattaatcctagtgtcactagtagcgatcttgccaagattgcgctctcgtaggtgtcgttttggtgagagacccatggcactgttggcaacaacacccatcaaggccgcctccattgagcattgcaacctctagtagatgagagggttagccctgatttcactttcggtcgttccattttttaaagaataatgattatagctaaatcaaagggagttgagacatgcatacctttaaatataggaccaaaagggtatgaattgaaatggactatgttaggctcaacatttgcatcgcctcgcatcggtgccgctctcgcattgaagtaatcattttagcaaaatgatgtgtgtacgtctcgtaggactgaattttccaagacatgcgggactagagagggaatgattatttccgtcactagatttgatgaagtggtatgagatgaaatcttggactaaggatggggtttgctaatttgtttatagacgtagagaggaaaagttcacaaaagaggaagaaaagggaaatacattgcactacaagtggaatgacatttaaaggcatttttgtaaacgctcctcaaatcatccccttttaaggcgattttgataaaaatgcttagtaaaatattactaattggatgaccaattggcggccatccgacggttgggggaatcgcccttcctcaaaaccaacggtttggatccgtcctcccgagcacctatagcctatcaccgtcacgctcgcacacgtgcccaccacgcgcggttgactcctccccctacctctcacctcccccacctcgccgtcgccggccgccgccgcctcccacctcacctcctcttcgccctctcccctcccaccccaccaccactccggcgagccatcgcggccctccgccaaaaaccctagggcaacagcgatcgccggtgcgcgggggcggcggagtcggagtcggagtcgggggccatggccatggacggcggcgcggcggcggtgctgcgcgaggcccaccgcctgacggggcacaccgaccgcgtgtggtccctcgcgtggaacccttcccccggcgccggcgccggccccgtcctcgcctcctgcggcggcgacaaggccgtccggatctggaagcgcgccgccgacggcgcatggcagtgctcggtaactatcacgcccgatcccctcctcgttcgagctgatgctgctgcagctgcaacgcgtgttgattgacttggggttcggtttgggtaggatgtgctggaggacacgcacaaccgcacggtgaggtcgtgcgcatggtcccccgacgggaagctgctggccaccgcgagcttcgactccaccaccgcgatatgggagtactccggcggcgacttcgagtgcgtcgccaccttggaggttgaaaatggctctcgggagtttcagatatggggttaagactgtttgttgttgtggtgcattgtgatcgtttggttgtgcgtgttgaatttactacttctgttgtgggggtgtgtgcagggccatgagaatgaggtgaagagcgtgtcgtggagcgcgtccgggtcgctgctcgcgacgtgcagccgggacaagtcggtgtggatatgggagatgcagccaggaaacgaatacgagtgtgtctcggtgcagcaaggccacacacaagacgtgaagatggtgcagtggcaccctatccttgatgtcctggtttctgtcagctacgacaattcaatcagagtatgaacgctgttaatttcaaacaaatgcctagatcgcacacaagcatttcttgctgttcccctatgctttgtagctgtgatgcgtttgcttatttcatttggtagtgttcaagtgtaataatggctgatttcaaattttctgtggcgaaggtctgggctgatgacggtgatgatgagtggcactgtgtacagacattaactgaagctaataactggtaactagccttggtatccctgtggcctttttttcatcccatgtttcatagagctggtactaggttgtggtataatctgtttgacttatttagcatgtaacatgcatcactgtataatgttaccaaatcatcaaatttcagctggcatgatgctctttattataattaaaataatgtaacttctgctccatggccattagttatttgactttccctactttcctttctccattagacattagttatttgatattttgtgctgtttctactttgctacagcaatattttggcttctatgtcacaataatgtgtttgtgttatcttacaatagacaattagggatcttcttcaactttcctcgataataactaataagatcactttgctgccatcctgctttgtaattagttaaacatacgtttttttttctccttttcaatgttcacttcaattgttgatgaactcatttttctctgtttggcatgttaatacttatatgttcttcctactttcagtgctcgactaattgttgtatcttttccttgtctaattgatctcgttctttttaattccagtggtcactcgtcaacagtatgggcattatcttttaaccagaaaggtgataggatggtcacatgcaggtctgttttgtaatagctactctctgttttaaatgatattcaaggcctcttatggaatgtggggtttccccggcttcttgtcgattgtgaaattcctgcgttccaaacaggtcacccgaaaagttactaatgtcatacagctgttattcagtgatgaccatacattgaaaatatgggacacaagtgctgatttgtctcaaccaaaaactagtgacaaccaggaatcatggtaagagcgtgctattaatacctattttctctacttggcttattcttgaatttattgactcatatttgctgtataaagtttgatagctttgaaatatcgtagctctgcctaaaagctaagctaaaacttagttataattccctggaaacagctatgccactactatagcaaatctattaatgccaatattgcttttatacaatcttatttttgtaatttatatttttgtattctctagtgtagttctgtgaggctgtgatcaacgtacaccaataaatgaggataggcatgtccttcagagagtagaattgtttggtctccggctagcataaattcttttctattgcagaacatgctaatttagctgtactatattttagtgctataacggaaagatctaatttaccagtaagatcaatatcgattaaacttctgctgccctgctttatactggggtgaactaacatgtatggtggctatttccttttggataagacatacttgttactccctccatttcatattataagtcgcttttacttttttcctagtcaaacttctttagggtggacaaagtttatagaaaaatttagcaacatctacaaaaccaagtaagttttctagaaaatatcttgaatcttgataatatgtttgttttgtgttgaaaatattgttatatttttctataaacttggtcaaattttaaaaagtttgactagaaaaagaagtcaacgtgactcacaatatgaaacagaggtagttccgtgcatcactgaataataatgacttcagtgtaattgccctagttcaattgatactgctgttacatcacagcagtgaagtgtcaaaaatatctcttttccataccatgtctccttaacaggatggttgttatttgatttcaggcgacatctttctactctcacgggatatcataaccggaccattttttcagcccattggtcaaggtgaggtgatctctaagcaccaagatatccttgatacacatgatttttatcatagagaactaacaagttaactctgttcctcagctaaactgtgagcatgatttatcaacaagtatatttcataaacccaaggttttcggggcactagtaacaccagttttcacaaaactacgagttctcatgctgttacaagccctgttgtatttggagtccaccaaactgtcaaagcaactcaattctcaccatagggttccagttttatatcctaaaattttcaatataaggaaattcatgaacatatggattttttttttactgcagaacatatggaattttataaacatttattttgttcatagcatgctggatttttacccatctagtttcatgccaaataataatatgccaaaaataacaacaataaccctcaacggtgtcagtggcaaagtgatcgaatgaataatagaaagcaggaagttagacttgctcaagtccacattatgcttggaggttagtagataaattcaagccaactaacaagacctatggtttgcttctactagtgtcacgaaaccacaaattcgtgaaactatggttgtgtttactaatgcctcaataccttgctttttaaaaaattttaagttcgctctattaattcagtacgtcaatatgaattttataattattagtttattgattctatttgagagcgctatatgttctttaaaaggatgcacttgttgtgtttatgattttatgctgataaactttatatacatcaagatacctattcaagcaaaacagggctgtttaaagtactaaccttgcagtccattctttctttctttttcctattcttgttatttatttatctgtgtctcttagtaccattgctgcattcttaaatgttggatgcccattttaaggaagaaattttactaccagaaattctgtgggcactgatggtggtttatctgatgtaatttcttctcttttaatcattattgtagttttccaatattacctcagcccatatgaatcaagatgttaaaatgaatagaatagtgtatttactattctttgacattttcctgttcattcttggcatgacagcgaggatattatagccagtggcgcaggtgatgatgcaatctgcttatttgctgaggacaagagtagtatggtatcatacccttcctagcacattcatattctcaagatttttggtctttgcattctgtgcttagcctgcctgtttgtcaaagttatatcttggtaaatatttaataataaataatggagtgcaatgttctgatagggattccataatttcctggttgtcaaaattttcctaggagtaaaatgtgaacatgaccaatcgataaactgttgtatcattttttggtaaccagtgctgtgccatttgttttgattattggcaaattatgtatgactattttctccaaaaaactgtacaattattattccctctaccataatgccattttattttgcgaaagctgaagaaggatgctaattccttaccttcattgctgcaggttgagggaccttcatacagattaattttaaagaaagagaaggcacatgacatggatataaactgtgtccgctggtgtcctcaggtaatatcagggaattaacaaaaatataagtattgttatattaagttagtgcaatggaatacttatgtcctcaggtaatatcagggaattaacaaaaatataagtattgttatattaagttagtgcaatggaatacttatgtttctaccaattaccacccatttcgtggttctgtttatcttttaaacttcagataaatgtactaatcttctcaaatatgttttaggacccgaggatgttggcatcagcaagtgatgatggcacagtgaaattgtgggagctgagggggaatgcactggattgaattttgttctgtttactgtattataattatagttctaggtttgtgaacgaaatgaggcgtctcctttgggtttttgttttgcttaacaatgctctgtagttgttaatacttctatcatgaacttgcgtggtgattgtcttttaacagattttccatgcaaagctatgagcatctgttatccagccataacatgaagaaattgcttgtgtatacattatggaacaacgcaagtgtgctcatatcatttacaaataagctattgaacattttgttactcaagtgtagaaatggtactaatttcttgttggacgcttcttctctatcagttgtagagagcagatttacaatgtggctgcctcctgcatgatgtaggtgcatctaattttgattgcaaccttctggtgttgggagtgcatttttctgactaattagggccgggcagtattgatgaatgatggtgaccacattttcttttgagttcatactaaaaacttagaaacaaggacatggtgttaatttgttaattcttagtttggtgcagagaatttatactagactttaacctgtggatccgcatgggcaacctgttttatggttacgtttcattttttttctcgctttttactatgagagtttgcaatttctgcttaatccagcaattcctaatgacttaatacacgttattcctagaaaatagcagagttaaaatagagctgatgtatgtcctgacatattcgtgatcatattattattttaagacaaatctttttcctacaaaacatcgtgattttacggttttaaatatagaacatcacacgaagtaacttttggggaatacacattaaaagcttttttttctctacataacaccgtgactttacggttttagaggttttagatataggacatcatttggggaagacactttacaagttggatatttattggtggacactaataatattcggttgaagaggagagagaaatcacgtgaaagttttgaaatgccttgggcccacatgtcagctctcccatctcttttctatctctatcccctccatttgactagggaggatgccatggccagcgctgctgcctcctccttccgctcctttctgattggcgagctctgcgaccacctccgccgggagctcgagctcgaccccaacctcgcccaatgcctgctcctccctgcctcgccgtcgccccctccatcgacgccgactcccagccccctccccccgccccctcctccctccctccctccctccagcgtcaccaccaccaccaccaagaagaagtggtgcgcatcaccaaccgtgttgatggcccatgctgatggccgtcaatatctggcaatgggaggatgccatggcaggtcaccgcggcgccactggtggtcacggatggcagcgagcagacgccgtcagggacgctgacggacgcgtttcatctgtccaaggcggatttggagtggttttgcgtggaagtcgtcgctgttctcgtcgtcgtcattacacgggccgacaatgctgaaggtggcggtgtacgcctcggctatggtactggcattgatggtgacaacgttcgtggccttgccggggacagaccgggtgagtcgctccaacccgagcacatagctcaacctccgccccatcgataacaggttgtgagagccatggggccgcctcgagtgttggtgcgagcgtggcagggcaggcgcctcaaacagcctcgactactgctttgaccttctccttcccggcgtcgaccacgctgtccccttggtggagtcctccatcgccgcatccaagggcgacaagttcgccgtcgacctcacctcgatgcagccccagagctgagacggcacgccagggtgcagcccacgaagcagcgaaacttcagccagtggctgctcacccactacagctatcgacctactgtggcgacctatcacggcatcctccctagccggaagaaggggatagagagagaagagagataggagagctaacatgcaggcccaaaggcatttcaaaactttcacgtgatttctctctcctctccaaccacaaattattattttaaagcgtgcggtgtccaccggtaaatatcaaactttaaagagtgtatttccccaaaagtcactttatgcagtgtcctgcagctaaaaccacaaagtcataatgtcctttatccaactataatgaaaatgttcggatgataaattaccttaagaaaaaaaaagtacgaattatccccctgaactatttaggtcgtctgaattacccccttagactttaaaactagacatttgacaccctcaactactaaaactagacaaataacccccctaacccaatctggagtggttttgatcctacgtggcatacgcgtgacagtccagtcagcaattctttaaaaaagttcggtgggcccacttgtcatatctatccctcacctctatcctcttgtctttctcaatccgtatccctctctatctcttctcttgaattcctctcctcgctaaagcatgcgacagcggccgaccgtcgagcttgccggccgggctttcttctcctcggcacaacaagcacaccaccaagtcgccactctcgaaggcagttgccggagaccgtcgttgttgaggagccacggtgaggagctcgatccccttatcacgctcgcgaattgaggagaaggtgtcgtggcggttgccggtcgagagctcgaaggcgccacggcctcgtcgtcgtctccacctccatcttgatctgcctccttcgacgctgctaggtcggcctcatccctggaagctgcacggacgtcttgtcgccaaccttcgccgcttctccccgtccccctgacctccacgacctcctatgcaggaagttgcagagctcatgctcgaggaggcggccaccgacgtggatctccttctcggccacatgcgtggatctcctcctcggccaccggcgcggatctcctcctcggccacaggcaccgattgaactccaccgccggctccctgaggggaccagcctccgtcgccatgtgcctcctatgcggctgacggacgccacttccggtcaacacgccttggccctatctcttctgccctctctctctctctctccccgcgcgccgccgtccacccgccgccgcccaccgcccgttcgcagccacttgctcgagcgcgttcacgggagagagagagagcgagcgagcgaccgggtaggaagagacatgacatgtgggcccatggattctttttgctgattgaattgccacgttagtgccatgcgtgcaagatcaagtcaaaactgctcaaaacagtgtcgagggggtaattcgtccagtattgaaagtttagggtaagcaatgtctggtttttgggttaggagggtaatatggtcgaccgtaataattaaggagggtaattcgtacttttttcaagtttaagtttagcatacaacgtttggaactcaagtacatacaaactcaagtacatgcaacggttaattgcacattggcaagaatgggagttcctgaaaacaagtttggaactcaacaaacatatatttaattagagtcaggaaaaaaatacactcaaacatacactgtaatttcaataaatgttgtaagtgcttttacgtaacaatctaacgcatacgccctccgtcccattttccgttttatttaaaaaattttaaaaacgtaagtcacgagtatagcactatttatgttttatcatcttataacaacaaagatattaattataaaaaaattcaaataaaacggacgatcaaagttggacgcggaaactcatggttgcactcaaaatgggatggagagagtatttttctttgctccccagcaaatcctttgcttcatgcacaagcaaaggagaaggatgtttagggttgtgtttggcactcccttttccccatatctactttctcatttttcatgtgcacacttcctaaactactaaacaatgcattttaaaaaaattatacctaaagaattcggaacaaaatagatgtagtacttaattatgtactaacgaatcaattcatgctagggagaaaggttccgaatccttttacccgaacgtaggaactttaaccaagcagcccttggtacagtggcagtaatatgttacgggaccacctatacatttgtcgacaaattttctactaaaaatttgacagatgtaattatagtacaatcgtagtgtaattacaatataacttgtatgtaattacattgtaacttgcatgtaactacagtgtaacttgtatgtaagtttcacgtaattttgaatcgttagatctattacaagatttgttctatggaggaagaaaaaaatcacatcacacacatatatgaaagaatttgttcccgcgacctctattttactgaaataacatgttaccgagagattcttgaaagttacatacaagttacattatagttacagtgtaattacatgcaagttacagtgtaattacactacgattgtactgtaattacatctgacaaatattagggggagaaatttgatgacaaatatctagcaaaatcgatatgttacaacacatatgcaatagatagatggactgtattatattgcaagtcttcacgaagcctatttaaacaacaagaattaattaatgtatatgcattaattaccaaattgttaaaaacaggtgttaacaatacttaacatggcttatttagtgcggaaactttaacataaattggtccattagaggtgaggcccattaatgtcgtttggattcatattgcttatccatatatactacactagtataatataaggactgtagcctctattatctgttataatagatgggccctagctttttcctttttaaaaaaataagaaaggcagaagtccaatagaacagggataacagaacttgggggaacatcttgtctctcttgcttaactttttatttatgcatgaaacgcgtgttcattggaaaacaaataattataatcataatattgcatcatatatggattctccattctacctcatttatttggtagacaacaacccatcaaatatagaacaaaatagatgtaatagtgtatgagaattggtgttttaggctttagaattccacaagtagctatataaattcaattatcttaccgctcatcaagaaacccttacaaaggggtgtgagctccgtttttcccatgcattcaagcgattgcaccacctcgttgctcacacaaactacaccgcctcgtgcagcctagcttgtctcaacctccacaatcctagttctagttatcagccgagcttcaccatctaagatctggtcattagccctcctaaggccatgctcaaagcgtggttttaggcctgtggttctagccgccaactaggtttggatgcgacagtggagatttgggaggggctacatctgtgtcagagttaccttacatgagctacggtggtttgggaagaaaagaagcaaaagtgtggtccagtcggcaacaatccgaagagaaagtgggaaagagagtgcacctcatctcacgctatcgggaggacccccatcaccatcgtcgccgttgtcgagtagaacgacgactagggaagaagaggccaatgacctagggtctgtttggttgctaccctgatggagatttgcctggcctgtagcaagcctgagcaacacacaactttgtttggttgtctccctgaagacttgcctgactcaggccaccgaaaatggacgcctgatgcaggcacggtgcatgcctgcttcttcttcatagattattcattgatgtgactactaccaacacttttaatcatcctaactcacacaagtgtactttttatgtttaatatattttactcaggcttggatcatcaaccaaacaacaaattttcaacatgcctggccaggtagaactcaggcacataactcaggtcatcaaccaaacagacccctagtgtcctgatctagcggctagcacactggaggttggggagggaacaaagcttggttggcatcaacagatctaacgattatttgggcgccacatccgctatcactaagaacttggctgcggccgccgtacctggatccgcaccgccaatagcccggttgctagattccccccacgcctggatccgcatcacttagcagcgtccggagacatgaggtgataacaatccggtccaggtgaggttggccgaggcccaataacttaaggttactcagaccccaacagttctttggcacacccactcggggaaaggcccaatctccctaaaagactagtccaataggggaagggtggctctcctttttaaggtggcttcctcctcccaagctaagcaaggtgggattattcagaggctcacacggtcgccacccgacttttatgtctttgccagcgggtaatagtggaggatgtcctcatcatgagggttttcagcaaggatgaggaggagagggcggtgtggtttcttgtaacgaggaatcatgaagggatggtgggccgatggcgctcgaggtgtcgggatgatggcaacgctcgaggtgtcgatggaggaaagggaagagacaattaagaacgagagagatgggtggtgggataggtaaaaaaatagaaagtgtgactgacaggtggggtccatatgaggggtccatatgagggtaagggtatatatgtgcatcttttttcactgcgatagggtctaaaatataaaagttttaatttagtttattacaagaaataccccaaggaccttcatataaataataaagggttgaaatgcaaaatatatattagggtgttctccactatgggttatgtgattcttgtgtgattttaatccacatggcaccttgagagttgagaccactggtagtgttctccaacgtgcgtgccctaagttttagctcaaccttggcctctggctgtcaccaacacacaccagaggcccttggcctactgcctcggtacaccccatcctgagaagccagctccatgtgtggagaacagaaaagaagacagtgcaccaaaggaaaaaaaaaagaagaagaagaagcaaattatgcatcggatgggttgaaatggtgaaccgtggcaaataaacaagcgtgcacctgaactttagagagcattttagcaatggcaacaaactatgaggcatattagagtatgccatccaacttgtgcccatctgagcaattttccccatgaaaaagaaaaggagaaaacaatgcatccaaacctcagccgcctctccacatgtgcgcgtcggtcggactaagtttgtgggggccgggagaatcggggaatcgatcgatcatgcatgtgaagtgagccgaggcgaacagagtcaggcctgctccgtgacacacgcgctgcttcgctcgtacgtagccctaccagtacgtggcccagcgcaacaaccactcgtttttaatactccacggggccccctacccacacccaccaccaccaccaggaggcggtctcgctcacaaaagctgtaagcaatgtgcccatgattgacctcgctagcccagtgcggcttcggttgctcacaaaaccaaaaaaacaaaagaaaaaccatagtagtagacgagcgcgagtgatgcgggggagaagctgccaaagtgtcggcgcctcggcgcaggcggggcgggctaccgcgaaatacgaacgaacccgcgcacgcacacgcgcgcgcgcgcgcgcaccgcacggaaacgtcggaaaggggaggaaaacgcgtggagacctggccgatttgggtggtgggagcggccgggattaagggacccttcgcctcgcccacggccggcgtggagtactcgtactggactagtggtactgcacgcgctagcaatagctgctgctgctctctcgttggctcgcacttgattacgagatcgatcttctcccacttctgaacagctgcttttcttttttttttttttgttagggttggaaatggatcggattcggaccgttaatagtcctatcatattttaaacataatttttaagtggatctggaacgggtgcgaatagtatgcggatacgaagcggattgcttcagatgtcagaaatggtacaaagtcaatacggacccagtttagaaacgaattaaaaattatcagatgtcacgtatatgtgtaattaatacaacatcaacttagcgatgcaacaaacaacaatacaataataatcaatgaacgatctatcgtatactggagtgctaaacatcatgaatagatgatgtccataattttaaaacacagttacgtaagtataaggtgagacagtaagagcctcaaattaaagtgtctaggttaattgataaattaggctattttattgaacggttcatgttgtattcaacagatggagtggttacgtggattgacaatttcggattatcaggcaaacagcctcctggataatccgatagagatatcggataatccgtatccgtcggattttagataccacatccgtatccgcattagcatccatattcgtcggatttctataaactcatactttatccttgtttcggatcaattcagagcggattggatcgaataatattcgatccgttttcaccactcaattctcgtttccacgagcacatctatctatctattatatactaaaagtccattaaacttcctataaacgctcctaaaccgccacgtggcaccccctacaaatgctcctaagccgccacatggcgttttaatagacgagaaacatctaaccctcaattttcatttaaactggtggatccattattttacaccattagattagattaaaaccaatagtttatcccttcctcttctgtccctgcacgtacatctactcttccctccctccctcagtacacgtactgacgtacatattccaccctccctcacacgtatgtatgtaggcaggtagtacgtactcatcccctttttttttcttcccattcaccctactgttattttttaacctaggatacccctaaatatttttatattacttttttccgctattgacttttgagcatgtgtttgattattcatcttactaataaaaatacgtaattatcatttattttattatgattttacatggatgtcttatattcgctatattttagcacaaaatacattgtggcagatgacatccacatgtattaattaactccacaacaatttttcaaaagtaatcacatcaaactatatactttatggtatcaaatattacttaacaaatatataacggtagtttgaactatgtaaaaatgcaaaccatgtaatttagttgtgtttttaagtagatccaatttaaattttaatttgtgtaagattaacattctcaaatcatttggaatttttcaaaattatttggttggtattttaattgtaataaatcctaaattatacatatatgcaaagaaaattcaccaaaaatattttcaacaggtaaggtatatatcattggttttttcatatttttaataattatttaaatgatatgaaaaaagtcagaatataacaaaaaatacaatatttattttagaagttcaaatatagttaatatgggtcctcgataaaaaaatagttatttattttaaaagattataataaattagggttcatgattaatatatgatgaaaacatgagagacaatacatggggagagggcatgaatgagggcagaggggtggatgttgggcgatggtgcacgtatgtacatacatacaatgcccctcgggctatattggtacaatcgatgtttactttatgttttcactgccaatacatatccagaatgacatatttggttaaggtcggcttttgactctagctaccataacaattataattttatatctttatttgtgattgatcgaaaaatgtagttttgccagttagaggaaacaatcgaattcatgaattctctaaaatgtgctcaaataatccaagagtgccaaacgatcttctacataagtgctctagaatatattctatgtaacatttaaattactttattagacggtatttaatagcattttagtatatggtacatatatatacttgccggtggctatgtgcttatattccataccttacgggtatgaaaataaagtatgttttctctatgcacaaacctttaaaaagatcttatcatccatatatatggacattaactttctataaacatgtcaccatgcacatattcacttgaagaattaaattttgaatccatttatgtgttacgatacaccgagacatgaaaagaaagattaactaaacatgatcgaaactgtaaacactactacaatgaatcgtatggtaacctccgtgtctcagcatatatacaagttttacaaccatgcaacatgatgacttggaggtgcaagaaaaccattatcaccaaacaattgtcatctactagacagaaaaaatttacaatgtattgtttagactttggaacccaaaaattttcttgcgcaaactagaatgagacagcaagcaaagcagggagacactgagtagaccagttttaatgagataataatagtgcatcaatagaggataagaggagtgctattgagtccagctaggccttactttttgtcaccatagggcatattgagtagaaggtgcaagtggattgtatagtgaccaaacaaattccatgctacaaatgcaaaaagctttcaaataatttatctgatatttgaaacacatattttctagggtcttttagaacttcatagaatatgtgataattatgacaagtggatagacattataggcttcagataaacgattataaaatctaattgttactaattcatgcccaatgcaagctagctaaacaaaatatttgtgggttggttactttcgattacataattcctaatatttaactaaaaattttattaaaaaatgaaattatgggaacaatcatataaaagctcattccagataatgatatgtttgtagtaatatttaaccatccaataattgtgttctcgctagcctcgcacacttatgggttgtctcctacactgcacaatagaattggactctacaagaatatgtatttaacatagttttgaatcccctcaatccatgaataaataaacaacaggaacctattttagtattagatgtttacacaaaagttgattcatatttataaaaatgttgacatataaagctaactaattagatgtttacccattagcataagcattgcattattttttagttcttagatgattagactgcaataagtatgtaacaaaaagctaactaattagagggcacgagctttattgtgcaaatagaacatgtttattaaacaataatggatttggaaaaaaaacatttcagaaaaaaataacccttaaacaaacaattataaaaagttcgtaataaaaatttaagcaacatcaaacaaagtgcccgcgcaactgcgcgggctaccttcctagttttctaaattactgaatgatgtgttatgtataaaatgcttttatacataagtcttttcgaaagttaaataaattattttcaaattataataattaatgctcaattaatcatatggtttactttatctcatttaccgtagaacagctggttcgaatgagtctattctcgaatcacttcatcagagtatgtatgtacttcttccatataaaaagaagtctacttctaacaattggtttaggcaaacacttatctatatacataggtagattttttttttaacggaagttttatgggtgaagtaccatggagtattatggactagttgccgggggtgaaattgcagtggacatcaagtgctgggtatattctgttttgcaactaggaaacgtggttagtccacggcaatgttttgtgtttctttaatcaagtggccgggatgccaactgatcacagagaggatcagaggattccacgcacatgttgtttagacatcttgccggtgccgggtgtctttctcgtcgctacctctttcgcaggacacgctcatactcatagtcataggggcgtacgactacgagctagtaagagtggaatgcggaccgatctagggcagtagcttgctagtagtagaattctgaagctgaggcgaaacgaacacaaaggtggtgtttttttttccctgaaaaagaagaggaagattaagttttttttatgcataacgaggtagtattaatgtacgattgattgagttttaattattacaaacttaaaaaaaatatattaatatgatattttagagcaactttcatatataaagtttttacacgaaacgcatcatttagcagtatgaaaagcgtgccacgaaaatcttaatcttcatccaacttttgtgggagaaaagaacatgaccaaaatataatgacgatgtcaaattgatgcgctctccaattaaagcatatgctaaatgtgtagagtaatggccaaactcgtgaaaccttattcggttaatcttctcttcgagcaatttaatcccctcaactccttccatatttcaacccctttctcttgggattaataatttcgaagcttcgtttatgtgaatataattaaccacacgaaaaataagataagtgattagagcatgattaattaagtattaaatgttataattttgagaaatggatttatctgattttttaagaaactttcatacagaaagattttacaaaacaaaaaatatttagcaattttgaaaagtgtgttcacaatagtccaaggagttgctatcctaaaacagctcaaacaaattgagtttaatcaatgtatctatacgatgttctgcgacatgatgtgattaaaattggtcctttaatcatctgctattaattttaactgttgctatcgaaatctttagtcggatggcacgcaaacaattataaaggtcgcgacgaacgatgaagaacgcatgcgactacaaagatgacgatcacgatggacgaggcgaactcaagcatcggtgacggctgcgacggatgtggaagagggcgaaggtcgtggctgacgatgggcacgaaagacaagggcatcgacggatgaggtggatgcaagcaagttgacggtggcgtagcgtggatgtctagcctacaaacggtcaagcggatcccacaactttaagctacgtgtgccgctaggcgacaagttaatcatccgctctcgttctctctcctctcgtcttttttactcgtcctcacaaaatcctacgtgaataggagtttttatcatcaattattatacctgctctaactattgtgcatattgctgttattaatcccgactcccgaggtgatcaccgcgccgctccaccgaacactcgctcacactcacgtccagcaacaacacacgccacttcactaccgacgatcccaccgactactcgctgtcaaaacaacatggccatcccatacaacctttctttaaccacctctccacctcactaatcatcatcatcatcatcaaatcaatcaatcaacgccccctccccctaatttaatcaacccccccccctctccatccagcctagcatcgttagttagtctcccctggccccacccaccagacattccaccaacccccttcctttctctctccctcttctaaacaaaaacatctcccgtttcagtcgcccacacaccgacactctcctctctctctctctcctcgtgaaaatatttgtcacaaaaaaatttaaaagaaaaaaaaacacacccttcgctgagctagcaacgcggtggttgctgctctgctctctctccaagcaaacaccattattataccaccacctccccttccccccatttcctcctcctcccccacgcggcgcaccagctatcgccgccgccgccgacgaggagggtgcgatggaggcgagcgcggggctggtggcggggtcgcacaaccggaacgagctggtggtgatccggagggatggaggaggagggggaggggttggggggaggagggcggcggaggcgaaggcggcgtgccagatatgcggcgacgacgtcggggaagggcccgacggggagccgttcgtggcgtgcaacgagtgcgccttccccgtctgccgcaactgctacgactacgagcgccgcgagggctcgcaggcttgcccccagtgcaagacccgcttcaagcgcctcaagggtgagctcttcctccgtcgccattgctctctctgctctctgcttatgcttcgctctgacaatgttgacacggcatgatgaagtact

SEQ ID NO: 7379 - DNA, 22598 bp, Oryza sativa
cgatgggccgagagaaatccggcccatcgaccccaggggagccaaaatagacttttgcgaaggaatttgatttggaaggatttggattcggaaacgagctcgacgatagatcggggattgagatattgagatggcacggacactggacgacaatcaaagaaacaaatttcgcaattagggtttttaagagataactttcccgctaggcgccacgacggaacgggcgctacacatcgtctcccgcccgtaagtccccgctacggggatgaaaacggcgatattttttgcatgcgtgcgggcccaactaaagcagacgttggattcgttttggatggctcagatgcatggtatgtcatccggtgacttgccataccaatgtcaccaaagctgaatccgatgccttggggtctatgctaaagtggggaccggcttagttactttcttgagttttgttagcaagttttttaaaccgctaaacaacgtgttttatatgaaaacttcatatataaattttgcttttaaaagatcaaataaatttaggttactcaccttgatgtcaagttcaaattttaggaccctcatctcgacgtcgagttcgaattacatttttgaattgcaataccatatataatatgtctcgggacttaaaatgaacttattccaaattttaataatttatattcaatcatatgctaatcacatttaatcatattcaatcatctgctgcgcgacgccgtccgatgccgacgccttcgcatccccaaacagtgattgcgcgcgtctgccacaacctcgcatcttagggacgcgacgaaggtatattacagcaattaattccttttcaaaccaatatattcatgtagattcagaaaaaaactatatttttaaaaaacatttcacctgtccaagttcaagttgtagaattggtacgagtgctcatattcggtaattattttcttaataataaacaacctaatattcgacaataaagtacccgcgagctaatttaatcaatctcaagatatgttgatgaccataacaagagtgcttatatatagacataagaggagtaatatgtgcgtatgcatgttcctagaggtgtgtagtatgtgcgagtgtatactagcgtccgcttctatattatttttctgatatctggcatacacgtgcatgctcgcatatattttcaaataaacgaagtcacctgtagcatccaagtagttgtgggggtgaatcatgcacatggttcgacctgactgatacagcagcaaatgcgtaggcgaccgaccgaaatacgtggccattattattactgttattttgaaatttcaaacaaatagagagggcgagggcggcatagggcaaacttttatctatcctttcttggaaccttgatgatcagtaccgacgatttgcccatggacagcaagttaaattaagacccaatgctgccagcgagacgaggaagttctagagcaattgttgaatttttgactgcacctgtgaccaagctgattggttaaaactagagccaaaaccgtttgtgcctcgagcatttaatgtcactagccgctcacccgtgtggtgcacggactattattattattagtgtttaattataatagtacatatgacttaataagtttgttaaatatttaagaacgaactaaaatcagtattaaatattaaatcacttagaagtgttgtaacttctaaactgggtatgtatgcaaggtcgaaataattataatattgtttcaaatagacagttttatacttgcattcgacagatatttcacgttttcttatcctacaggactcatgttttattttttttacctttccttacaagatctatagataaatgggatctgtcacttttttcatgattaaggtaataatagaagacatgaaatgcttttagtaattcatcctacatacagtacatgtccacgcgaatgcgcgggctatcttcgtagtttctgttaatagctaaatcagtctatatatcgttcatctttgattcttttctgtaatctaataggtcatatttttgtttatactaccacatcaaatgttaatagtagatggaataactcataaatcaacagttaagatcattgctatatggaatagagtattatatatggtggcctcatcttttgcattggttttggggtgtttagatccagtggtgtaaaattttaacgtgtcacatcaggtattatatagggtgtcgcatggggtgttcggacactaataaaaaaactaattacataatccgtcagtaaaccgcgagacgaatttattaagcctaattaatccatcattagcaaatatttactgtagcaccacattatcaaatcatggagcaattaggcttaaaagattcgtctcgtaaattagtcgtaatctgtgctattagttatttttttagtctatatttaataatttatacaagtgttcaaacattaaatggcctattctgttgtgaacggtactgaatggaatcccccagtccacattcgatcgatcctcgtatagctctgactgtagtgcaaagttccattgcatggacgtggttgatttcaaggagtcatggagattatctgagcccttcacgtcatgatcatagacccggcatccatccgacagaattgaccggcccttgactagatcccaactttttttttcaaactttcaacttttacatcacattaaaatatttctacacacgtaaacttataacttttttcttcaaactttcaattttagtcaaacttccaaatctattatattattaaaggaatagaaaaaggagcctccacgttcgctctcatggcctagaaattctcacattaatcgaaaaaagaaaaaacagagtccatatagaaatataatttagaaatagctgaaattcggaattaaaaaataaggaatattagaatagaagactagagtccatatagaaatacaatttagaaatagttgaaattcggaattaaaaaataaggaatattagaagaggagactagagtccatatagaaatacaatttagaaatagttgaaattcggaattaaaaaataaggaatattagaagagaagactagagtccatatagaaatacaattaggaaataactgaaattcgtaattaaaaataaggaatattagaagagaagattagagtccgtatagaaatacaattaggaaataactgaaattcggaatttaaaataaaaaatattagaagagaagactagagtccatagaaatacaaatataggaatataatttagaagtaactgaaattcaaaaaattaaaaaattaaagaatattgaaagatgagtttagagtccacatagaaatgcaattagaaataataaaaattaagaaataaaaataaataatattggaagaaaagcatagagtctatatagaaatacaatttatagaaaatttagaattaaaaaaagaaatattaaaagacgagtcttgagtccatataggaatatatataatttacaaacaactaaaatttgatattaaaaataattaataattaacacgtatataaaatataatatgaaatataagaaataaaaataaataatattggaagaagagcatagagtctacatagaaatacaatttacagaaaatttggaattaaaaaaagaaatattaaaagacgagtctaaagtccatataggaatatatataatttacaaataactaaaatttaatattaaaaataattaataactaacacgtatataaaatataatataaaaattaagaaataaatataaataatattggaagaagagcatagagtttatatagaaatacaatttacagaaaattcgaaactaaaaaaagaaatattaaaagacgagtctagaatccatataagaatatatataatttacaaataactaaaatttaatattaaaaataattaataactaacacgtatataaaatataatatgaacattacacattagtagttttgtagagttattgcaaaatttaaaattatattgttattttaatatatttgaataatataatgagaaaacatataaaaatataatgatgctagccgctcaatctgcgtgggccacaatactactttgatatgaaattaaacacaccctcgatcatcttccgagtatagatgtggcgtacgtgaacatggatggatttgtttctcctgattttaccccgtttgcgtgtttcagaacagtgcctgtttctggtagttgtaacatggagaattttgcttgctgtaaatctgtaattctctccggcagcgcgctctagctcctggcatcagcggtctttcttcaccattatggagctcatgaattttttttaaacacatcacattttattaaaagacaaagtttaggggaaatgaattccgaacacatcaccaggagatagataagagttgaaccatctttaacaagagagaggtcaactgaagaaagaaagcaaacttcctaatgaaactagacagcaataaaggagcaaatctacagggtactgcagcaatgccgtgatgactgcatcgtagggcctgtattgatattgatgtgcactccgcttgacaagccgttaaatcccttcgactgcctccaccggaacaacacatatgaaaggtttgttgctgagccgtagattttggtgtgagttccaaaagtttccatatccatacctgttttcaaaaattttaaggccatataataaacactaaatctcccaaccctatccaaaatagtatactactgtaagacatctcaatttttttcctctggagggggggggggggggctactcattttgaaatggctagagatttctttgagtgaacacaatccaaagtctcccaaccctatccccgatgagatgttatgcttatgatatagggtggtactgttggttactaaaatttggaattttttgttttaaagaaaaattggaagcttagtttgcctaaggttgttagaactgaggggatcacctatacatttgtcgataaaatttctcctaaaaatttgacaaatgtaattacaatatagtcgtagtgtagttacactgtaaattacgtgtaattacactgtaactacaatgtaatttgtatgtaactttcacataattttaaaccgttagatctaagtcacaacacgtacatgtgagaggatttgttcccatactctattttaccgaaataacatgttacgtagagatttttaaaagttacatacaagttacattgtagttacagtgtaattacactatggctgtactgtaattacatctgtcaaacttttaggagaaaatttatcgataaatatatagcaaaattgatatgtaattatgacacacttacgtcggatatgaatattataaaattatgatacaaaatgggattagaaccgttctatcttggtaggtaagataccatgatttaaatcgacataccactaaccttacttctaaatacccctcatttaacaaggggcatcgatgtcatttttctcttttctactatctcgtaagagtagttattttaaatgttagacttatactactactacatttgtttcatattataagttgttttgagatttttaaatcaatctttttaggtttaaccaagtttataaaaaaatatagaaatatcttcaacacaaaacaaaagaactatcaaaatatgttaatgaaactaatttaatgctttaagtgtgtactacatttttctataaattggttaaattttcaaaaagaattagaaaatcgaagggaacttaggctgtgtttagttcacgctaaaatagaagtttggttgaaattggaacgatgtgacggaaaagttggaagtttatatgtgtagaaaagttttgatgtgatagaaaagttggaagtttaaagaaatattttggaactaaacacggcgttattttgatacggagtgaatagttccagttagcagcttgtgtgtacatggcacagtacataccagctgggtttgcagagaaagtgtgacagtgtgacagatgtgcatcatgtgggtcacaaactcatttcacagtcacacaccagataagcttcctcccctcccctgcatccactccacagtccaccacaccacaaacgtatctgcggactgcggcgatcgatttgggaggagaggattcagacgacgatcgatcgctcagaattcagatgaccagcgtgaggcgagcagacaaacgcagctgattcgacggattcagaatggcatcatcagttgcaggctcagtgactcgtcgtcctcctcccgtgctgctggcttgccgatcgcgaccaaataatcgtcgcctcatcagattgttaccgctcctcttcgccgtcgtcgtcttgcttgctcttcttccaccatgcgttcatggagctcgtgctctgaatgatgccaaagaagccaaaggtcagtcactgttgttaagatttgctgctagttgatctgcttcgtcaggagagtgagattagtgtttgtgtcaagtgtttgatcgtgaattgcagttgcagaggccagcgaccagacgacgacgacgacgcacgccgcggcggcggcggtggctcggtggtctgtcaccgtgagggaaggaggaggtggtggtggtcacggcagcggccatgccggcgccggccacggccacggcagcggccacggcaggccggagccagccgagcaccacacgggcaggcgcagcgcggcggccggatccgtgcgccctcccatggcggcctcctgcgccgccctccttgtcgccgccgtcgtcgctctgcttcgcttctgaatgaatgaattctggacccgaatcgctcccgatttcgcatttgaatttaaatcgattcatcttgctgtgtgtacatagaatgaaatgaaatgaatccaaatgaatcgccaagaatccgcccgattcggggattcccggcgagatttttccgcatcttcaatctgcaattttgtgtgtgcgctttccaagaaatcgagattttgttgaatgcgttcttggaatcgtataatccgttgctaaacttaaaaaacgtactcatctttccacgaattgcatttaaatacgtaagctgcggccatcctacggtacaccgagcaaaataaaattcaccaaccatggattcaccggtcaggaaacaatggctgctcctcctcgtcttcttcctcctggcctcctcgtgtgttcttgcagccggtgattcgtctgcaattggcagcaacgaattaacgggcaagcaattcaattcattctctccattgatctctctctctgctcgtggttagattgatctgatcccagtggcgtcttgtttgtcttgaatcttgatgatgagcaggagctgaggagaagaagacggcgagcacggcggcggagttggcggtcgtagtaagaagctcccacggcgatcaccatggccgccacggccgcggtggccgcaagcacaagggcaagaaatccggcgccgccgcctccgaccgccgccccggaggtagcacggcgatcgcttgctgcggcgtcgcctcgccgctgctgccaattggctgcttcctctctagttcgatgtacttaggctcaatggtagtagaagattagttgatcaggggttaattttgtttagctatcctttttggtattctttcactatctttttcacattttcatgttagagtgatttcactggtttgtaaggcggcagtgttaatttatggcattgtaacttaacaccgtattgagagatcatcaaaatttaaattagaactgtacctccttaaaagcagtagaaaatctcatttagttaacattctctctgtctatactctaaagaagaatgggtttacgaaagatattgtcatatttttcacttaattttaatcatactctttctactatagtaggtgttatgaaactacaaggtgatctcatgatgggatcgcaaccgaagcaaccgcgtctcttccactcgatgatccgtcgcaacgggcgcgatggttcccaaccttcgcgtctacggttgccaccccttcattgatcaataaagaacatccgattcattcgctcaattctctcttactcgttctcaatcgattctattcactttcaacagtaggtatgctcagatggattcttaacacgtgttttgatgagggctcagcttgaccccttttttttttctaggcttgaaataacccaagacctaaatgtgccatttgagcattgtaagctctagactacgtactacatcgcaaaacttaattacaatataagttgtaaaactgatttaactatttatttttaaaatgtgccgtcgtaaatatagctaaaaaaaataattctagccatgcaactggctagaatggggacatagataatacgtcatatatatgttttgtgtcataatgccgtgctaaaacatgtttttatttttcactcattttttgggtgttgtcgtttttttaggtgtggctgtatacatccctgggatgtaatggcaaggttttatttaaatccattatttaaaaaaaaggtttttaggtccggtctttcttttaaaacgagccaactctccttgatatatcccgtgtaactcccctcatcagagttttaatttttattaaaggtccttatgatgtgcatctaaaagaacaacgatttgaatgtattttcttttgaaacaaggagtcccatcttcatgacaaaaacaatgaaaccggagtacaaggacccaagaaagaaaaagaagtacagaaactctgcacaaaaagaaacaagtatagaaaacttagcatgattactactttatgctccaaaaggatctaaacaagctaagctaaatatagttttaaacaagaaccattaacaaaaacaccatgccaggccaaaattcaatcccataaaaaaaatggaagactaattgtctgtatggaaggagctaactctgaatgttgctgccaacacaatcattactagttttagttttgtgcctaaagttgatcttacaaaccatttgagcttcctggagaagttgttacaaccatttgaagagtagatgttctactgattcgaggcactgaacaaaacatgctcctcttggatcctttccacactttggggatcaggttttctttagtgagaatacaattctgcagcatcaaccatatgagcaccttaatcttcagaggcaagtttgtgttccacaaatacttgtgtgtgaacgctgcctgagtgatttgatcaaattcaaagcctacctatgcatatttgcctaaacagcacaagttagtgttctacatgacttgttccattctgaatagctctggtccttagtaattattggctgaatagctgaatgatttgtgataatatttcatgggtacaaacaaataaattaactatgataaagttggaaaatggatttaaaatagtataacaagaaattcgcacatatatatttttttctacaaaatcgtaccgtttaggagtttgggaagcattcatgttaattctattcattacaaacgaccaggtcatgacatttcataccatcaattggtacaagacccacatgcgtaattgggcgggccaaacaacacatctaaaatgtgcaataatagtactagtccttaaaaaaaacaacttggtgcatatcttttaaatatgaccaccttttgctgcattgttgcttattagtaggataatgcttttggggaaagaaagctgaggataagaaaaaaaaaaacaggaaacatgtattagtgctggatgttacaaaataaagaaataagaaaaataaacaataaagttggtgtccatagctctggcagtacaagtggaaagttccttgaagaacttattctatctcatttttaaaggatttttaagggaaggatgaagagtgttggtagcagaggcagagtatcagttcagtttacactactactacatcattagctctgctcattgcagccatggagagtgcaaagagatcttgccttgctatctccctcatcctactcctactccttgttccaagtatccatggagcaaggcatgttgctgcagctatcaagggtacaggtacgcagtgttccttctcttctctgcatgtctgtcttagtaggtttcttacaccatagtatccttatatgcatcgtttttttcagctctatgtttctatgaaacaaatgatgacaactcccgtgtatatatgttttgtattgtatctgcatagaactgtatgtttctgaatgtttgtaaagttgttattaacatgatttctatggttctgttggggttggacatgatgttcgactattcaacttaactttcgttccactacttacaatattagttttgtgggaaacacatgaagatttgtttgtttattacaagcattatgcacgatgaattttttgattatgtcaaaagtacaaccaacaccagaagtgggtccctaaaaaagaaaggcaagattatagctgtggttggttccctttggctaattgccataagtttagataagcaaaaccttagaaaatatttgaaatttatctacaccgtgtatttcttgaggaaattatctacaccctattatttgtaaaacgtttctaatttcattttgggtagcctcgcataagttgtcgtcccgtttatctatctatatatcttccttcctcactaatcaaatgcatatccacctgcaaaatgaacaaaagtaattgcaatgtcaagcatggccctactgattaattgtgtccgtcgatggaccgaagaattcagtactaaattaaaatgttcagatctggaagaaatttcttggaaaacaaagcagttgatttccttattgttaaaatattattcagtccaaacatgcctatattagttagtaattaacttattcaaaacatatcaagggtctggctggcctagatacttgaatctccagtcaaaaatcaataaacaagacaataataataataaaaacttgatgaatactcatgtggtgtgtgagcgcgcagatcaggcatcctgcctgaaaaccctgtcaagaacagatgctctgtcctgtccatgtgggggaacacagtataattaatgagatattattcccctgcatttccggagacccttgcactgcacgccgttaatgatacttaattatattcctaactaatgctctcgtgatatcacacaaagtgattattcaccaataataaatataacatggcatcatcacgtcctgtttacaaacaaacaacctgatgatcatgtgtcatgctcgatccagaacaaaccataaaaaagagtagaaaaaaacaattttaaattttgaaggacatataaaatcaagtactcgctctgtactactccctccatttacttttgatagttatatttccaaatctgaaaaatttatttttgatatgtatatttcaatccaacaacctatcaaattaatgatttttttggatttaatgcgtgactcttcattcttccacacaagattagctatataggcatcgagaaatgtaaatattaatgaatcgcttgtttacgaggaatgactagtagcatgtttaaatggatgataagtaggattatttatccttggtctatatgctaagatgaaatatgactattaaaagtagatggaggaagtagaatataaggatttttagggttagacacgtgtaactagataaaattaaatgggattgagaagtggaggtagatgaaaaaatttgaatggtgaagggttgtgattgattgagaatagaattttggtgaagaagttttatattttgagacaaatcttaagggttagaaattgttatattttgtgatggatggagtaattaacttgaatatgttattttatgattatctaaaaaaatatgttattttgtggcacgtgaagaacagaaacttgctgatacaatttcaattgatactatacgtgtgtttttttttatatacaggcgccgacagcgagatggtggtgacggagaggacggccggcggcggcggcggacatggacgcggttacacaagccaccggtcgcacaaccccaacaatcccaacgacggtggctccggcacgccggtggtggacccgcacaatgtcgccaccaggggccaccaccaccgcggcgcggcgacgaggacggccgccggcggcgacccccgcctggcagcctgcatgcttcgtctgggagcgaccttcttcctgctggttcttggctgaattatttattggaggatggatatgtggttatttttcttaagtttttttactgctttttaaatttaatttttctgcgtttttgatatagtgtggtcatagttttgtgacatgttaaataccaagagatgatacaaggtgtatatataccatgtgcatgtgaagttgggatgtgtgtgtgttttgctttgcgtgtatgaagacatatgtatggagtttgtttggcagaatgtgtggtttatatgtccatatcatattgttcaatgtagtactaggacctagagatcagagagcatctcaaatcctagtgctatcagtacagatcttctatacaccttagtgtaatacacccattttggatttgcatttatacacttcagaaaattttatatgcaataaacaggtaaaccatgcttgtgcatactcaaaatttagtgtaataacacaacaatatgtgaatatatataaattgaaagttgcaaacaaatacaaattttgtttttttacgaaacacagtacaagcacacagatgctcatatacacacgcgtgcattgatcccaatgaaagcacacgcagaaatcctagccttaccaattccgagagattgggctggcatattttgaaattgacaaagccaccattgacatcttgttgtcaataacacgtcgtcaccatggaaataataatttgctgtaaatacgatcactcatgccaagtctagcacttcagtgtcagctatcattggcaggttccttaataaaaaacagccgagctaacctcagtttgccaagtttcgtttctttcaagattggggaaatatgtttataaatggattatttcaaagccgtgaacaaattattagttgcatataggagtgtttagaacttgaaagtttcatcaattttggaatgaaaataaattttcttgtaaatatttatttatttggatcaatcaactattttttgtggtttcaatcgtactttgctatgtatgtaggtctcttaatgcaaatgagaaacttttggagaaaaaggtgtaagcactcagaaaatgtttcagccataggctcggccaaatccccaaaactaactaattagatccatgtacgatcagacatggatcgtccctggtttcctttcacaaactagcgtgacctgaattttgcaacctatagtagatgtgctacataagtctagtttgatctagcaataggagatatcaataagtacgaaacgaagaaagaacaaaaaattaactgtatttaataagtaaaagaaatacattgctttggaccagctattggccactcaacacacattttaatggaaaaacagatagatttttaaaccatatgattaacaacacgtagcttacactagacaatataaaacacataaaaccaattaataagattaaaataataagaagttaattagaaaatacatattcccctgtcccaaaatataaaatttttttatggatgcatggacatggatttagattcgtagtactatgatatcctattcaactaaaatcacttatattctgtgccacaataaatatgccattttagaaaaatgccactactattcacgattttgcggatggcgtcaaggatggcggcagcggcggcactcgagacctcccatcgcggatgcgatcgatgacagaaacggcggcggcggctcccgagccctcccacgcggatggcatcaaggatagtggcggcggcggcggctgcaggttccgagccctcccgtcgcggatggggtcgaggatagtgacggcggccggggctcctgagcccttccgcgtggatggcgttgaggacggctgctcccgagcctcctgccacagacggcagtggcagcaacggctcctaagtctcccgccgcagatagggccgacgatagtggcgacggtagtggctcctgaggccttcacggaggtggccgatgacagcagcagtgacggtggtggtcgacgacagtggtggagagagaggaaggggaaagagaagagaggggagggaagtgaagatgaaactaacagctaggtccctcgtgcagttggggttagcggagatttttgacggaaaacgtgatggagtggtatggttctaattttttcaaattccaatggcacgtagccaatattgtgaatagtaatgatatttttctaaaatggcatattttgtagtggcatgatccaattaacccttaaaaaaatatcacttcatactgcatgcacgcaactggccctcctcgccttctcttccctttcctttaatcttttctttatagtagttgagataatatttgttatttatcatattaaattctaatcaactacaaattcaaaattacacataaaatttttacatacatataatgtaatagttgagataggcttaaagtggtgttgacatattttaaattataataaataaaaatgttttttgggtcatataatgacccttttcatcatatatgacaaacaaatggcgacatatattattttattatatatcacttttacaaacatgcataactaaattcgctctacaattgaaaacgaagtttagaccatcatattatttaccattaaattaatattttactatctgttttgaatatatttcaacttataaaataaaattatatttcaggttgcattttgattcttttcatataatccaaacagacatgaaaattatataacaaatgacaatataaagcatatcattatatatctgttatcagttgacaaatatttatgactaaataggatgacaaaatccaaaaatgctattgacaaacgcccaatttcaaccaatgtcatcaacaattttatttataaatactctacacaaactaatttcatttatataattgctctcttatttcaattttaaattcatttttccaagaacatagtaagtatatgaaaaaaggaggtagcagaagtaaatataaatttgttataattggacaaaattttcctcttaccatatatatcttaatagaaagttttttccattaaaatatcctaaattccataaagatatctatagtacacaagaaaagctattacttaaagtttagaaactccaaaaatatgatatactaaatattaaaaacacatatagtacaaatgataggtccatacgaatcaactccatttccacgacacgatattttctcataaactcaagattttatgaattccaataaataattttaatgtagaatttatatgttgatagggtagttagaagaaaatcatgaccaacatttaaagcagcgatcctaaacaaattatggacaaaaacatatttagaatataataaaaacatattacaaaaaaatcacccacatgttaatattattcataaaatttcaagcaacattaaacaaggtgtcagtaatgtgcctgcggctaccttttctagttacaaatataaagacgggacaagtttttctggagctacctaattaagattcggcaatctccattattcgttgttgaagcactctacataagagttatgctccctgccttgatcaggtagttaatatgtactctcttcttggtgatttttctccggtcgggaagatgaaccctaataaaacctttatgtagcatcctgagtttgactcctttacttaaaaacgctttttattacgttttaaatttcaaaattttgaaatctcgtgccattaatgatttcaaatttgatcaatatatccctccatctaatgttccctccaaaattcatcaagttttaaattcataataaaatcctgaataaaaaaaataaaaactgtactccaattccaatcccttaataatctatatacttactgctataaaaagcaccagttcatcgaacacttatctttttcgacccttagatctattcatccaacggattatatcaagagttggatcaccctgcaattagcgattcacctctgctaatccgcggttagagcgatcggtaaaaaggagagaggaattaaatcccacgtcgtccggcgagagagagagaggaaaaaaaaaaaagaaaacccacgaacaaccgctcgctctgcggcttctccccacgccgagcgccgacgcttccctccccttctgtcgacgcgtgatctcctcccccaccacgagccacttccctcgatccctcccgtcgaccgcgcgccgcctccgcctcggcgagaacccagccacgggcatgcagggagggaatcgctcctcctcgccgaccgtctcccatgcctccttccatcgcctatgcgcctcaccggtctctgccctccccttcgccgttgcagcacctcgccggcctccacccccggttgaaatcccgtttttttttttgttttccatcggttacctgcaaatttgagcctacattgttttattgaaacgtggtctgtggatttggttgtttcagccaacgtggtttatggattttcaagtgatctgtggatttagtgagttgcattgtaatatggtattgtagatcatgtattttaggactgacttttacattaaacatgccccatggtccatggatctgtgcatcgtaatatggcctttacttatctgaaaattgcttgtgaattttgcttctttatattcatcagaattttacttatctgaaaactacttgtgaattttactttattatttactaataatagcttatttgtatcctgaatcatttgaatagcttttagatataagggaagaaaaatggaggagctgttggcctgtgcttggctaacaaaattggtggagaggtatcatgtaaccaaatcaagcacataatcccttttcccttttaacatttatagtttctaatataaagtgttctaattggggtgagactgttgactggcttaccatcttggcccctcttagtacaagagaatatatcacatcgaagttttccttctggacttcatgaaggaattaatttttcacaagtatctttggcctaatcactaatcatcacactttgtgcgaagaagtcgagcatttctttgtcggtcatctcacaagtatcgttggcatggatgtcatgctggcctaccccctgaatggtgctgcttcagtatttggtggacttcaatttcagaatgatgtggtgctctaaattttttttccttttttttatctcaggtttgacctttggattgcatcttaggcttttgcatggtcttcgactggtaataatcttcagaatattcacatttcctgtgaccaatacatacctaaagtctagaatgtcactatactttggcatggtgcaaactttggcgagttctgaaataaatattcatgaatcatgagctaacctctggttaataagttttaacattaagatcattgatttactacatccaacattgatgttttaatttgttgggataaaaatacatgaattgctggttgatcaaaataaaagttattgcttagggagcaaccatagaatttgctccagggaatttttttttgtcctaatgacacattgattttcaaattctatcaatccttttgtgtgtgctgtgcaaatctaattcattggaaaagatgttagaaaaaggttttccgaaaatgattgataggttttgtgcaaatctaccccacaaattggatttgaaaggctggttgcttagttagatccaaaaatcaaacttttctatggccttgggccctaatagtcaaccttttttcagaaaccaaatcttcatttcgccggcacaaggattgctgcacctttacatttactaataacactcttattccatatagtccatgcaccgctgccaaccttgatccacatcaagcctccgcctccaaagctacaggagaagatggttgcatcaaactcctgccttctttctcttcaagtaacatcttatctgtgttttgatggaattttggaacatgcatggataattttggtccgtgttttgatgatttctctaatttctaagtattgaccatccagagaaaattcaggtcttctgttactcatagtaaatatcatgatgataataatagtttactcctaatggttctctttgttccgctagaaagaagtggacgattgtttgaggaagtaggggagagagtgaagcatgtgatttttcaggcaagtttgtcaaagccatttgaatgagaggctcaggatagctggtggtaaagcacagaacagcattggcgctgctaaggaggctgatctccgggcaacctaatgttcattcatttgcgacatcagatttgggctgcaactgtgagttcttttcaatcttataatcaaactcgatgcattcttgaatgtggtgcaacagtttttcttttataatcatactatattatataaattcatattgtgaatataatctagatatagactaatataaaaagcacgagttgtttagttgcaattagcgcttaaccctccaattagcgcttaaccgtcgccaaatcgaaaaaaaccgcgccccgcacccctcgcctcgcctccgcctcctccgctcgtgcgcgcgtgaagaagaaagaggaacgaggagagaagaaatcgagaagaggagaaatcgagaagagaagaaaagggacactgtcaggtgggacccatgttcctttaattaatcttgcacagtaatcatcctcttaatcctgcattattatctcattgacacgtgggtccggttgcacaaattcttgattaaatctatatctatactctatactaatctactaatataaaaagtaccagttcattaccaatcccgcaatcttctagacccactctcacgtgggtcccacctgtcatccctaagaaagaaaccgcaccgcgcacgaaaaaaagaatcgctgcgaaaggaagaaactgcaccacacgcgccatccccatgccgccgctccgccctcctcacctcaccggcaaatcaatccaccgcatccactggccgctgccgccgttgccgcgatcccagaagattatgcgggcaccaccacatccatccccgacgacgtgttcttctcccacatcttcgtgaacctcccagtaacatccctcgcatgtttcagggcagtttgccgctcgtggcacgccgccgtcgacgaccccgccttggtccgctgccaactcgagcggttgcgcgcgaggcagctgccaacgtcatccttgcttgctgtcgcgagcacggaagatatatgggacgagaaagcacactctccaacttcgaggttgtcagcttcaccggctaaggcttaccctgcgggcggcggctagaccaggagcgagagcggtggcggcgccgccgctagacatcaccgccgagactgatccgatgcaccacaagtctatccctaacggcggccgtatcacccgccatatcatccccacccactgcgacggccttgtcgccttcgccacctacggcagggccatgctcgtgtgcaacccggccacccaggagctcgttgtgctgccgcccggcaacggcagcggcccatgcccacggtctacagaatcaacggcggcggttggcttcgacccgtggcggaacaggtacgtcgtcgtcaggtgcttctactgcaagtcccacaacgatccgccggtctacaacatcggacacgagatcttcacgctcgacacaggcgccggcgatggatggcagcgcatgcaagacccgtcgcgtgccatcagtcccggcgggaggagacccgccgcctgcacgcgtgggggttccttctactggttcatcaacgagtctcagccatgcgagctgctgtgattcaacctgcgagatgaggcgttcgacgcggtcccgtcctctctgggctgcacggcctgacacaacgacgaccgtctctcggacctcgccggtgagctgtgctacgtgcatcacgtccgcacgagcgtggccacccacgaagtttggatggcggcggcagtcgatgacgatgactaggagtggtggctgcgataccgagtggacctgtgacacaacccgtggggcgcggcggcggcggcaacggccaacgctggttccacaacttcggcaccacggtggccggcgacgatggcgtggaggaggaggcgacgttggtggccatgttgtacaaggagctgtggtggcacagggagcggagcaaaccggtggtgaaagacgtgaacatgcaggggagccggtgcagttgtgagtcggctcatcttgaaaataacttacacacgttgacatgtttagtcagtgtttgttgctgcttcagacatatgcaaagggaaaaatgtcagtgtacggaagaaaaatgtcatagagaggcatgggggtaggggtttatttttacaaattcaaaataaatttgatcaaacaagaaatctttaagtacatacataacctcaaattgatatggtaagctcgccaacatgtgaaaagataaccaatgaggattgatatgggacttactatcaacatcttcaggaatgatttattccaataagataacattaccagaacatagtttttttatgatttatgttaccacatactaaccctcatgattgatttaggcagtggatgtatatggtcaatatatgtcgacgtgcctcactagttattaataaagtagcactattcatcgtcctctttcccctctctctcaggccgggctagccttctctctcctatccttttatttttcagcccatcagtaagccggcccagtccactccctcctctttttttcctacgcggcccagctagcacgggccagaccgaccaacacgtgcccacgcacgcagcttgctcgacgcatgccgcgccacacctcacctcgggtcggccctgcctgctgcagcctgcatccctttagggcaagcttcacagtggagatgatagtctcccttaattcagttcacatcattaactcattaatgaaaatgtactactccctccgtattttaatgtatgacgccgttgactttataatcaacatttgaccatttgtcttattcaaaatttttgtataaatataaaaatatttatagcatgtttaaagaacatttgatgataaatcaagtcaagataaaataaatgataataacataaattttttgaataagacaaatggtcaaacgttgattaaaaagtcaacagcgtcatacattaaagtacggagggagtatatactacaacaaattacctctagcacacttaccataatacatcatattaattttgatttatttgtttgctatcaattcattggtctcttgttcttatatctcttaaagtttgtatagaggttgttccttatatgagaggtgtctctttctctctcctttcatctctctcatccacctcatcatgtgagcttacatggcacctaggggtaagtgtgtagaggcttagaccattcccaacccaatgattaggatggtgtctatagcattaaataagctgtcacctaggatgaaagatgatgcggcaagtgaataaatgagtaaagagaagggaaacaagtttggtacgagacatggtttctacacaacatccaatacatcatatgagataagcagcattaaatttaagtatggaaaaattgtgtttgcgttgaaagagtagtgtagtttattgattatgtgaagtttatgtaaactatgtctagtgttttgggttgagactggccttatactactggccactatccacttctccccaccgtcacaaagaagacatacgcatgcattagagtaagttggtttaatagtgtagccaactactagctccaaatcatctatggccaaattaatagccaatttgtataatacttactcactacgctattaatatctggtcccacctgtcatacacattatgtcttggagtccatgctgtaggcctgtagctggctatagatctgtagcccactgtttttctctcatcttttatctctttaaaatatgattatatctgatttataataatgctattgtacctgctcttgtatcgaagaacacggcaagatcacactttctgattcactttcttgtatgattttattagatacaagagaaaggtactactgcttttaaaagtaacgagctaaaaacaatcacctagactcattaaagtacttgactccttaattacctaactgactcttcgattatctgaaaaaaaaaatccttggttacttaattgactgctgtatattattacctccggattgataatacttatcgttttagaaaggatgaggtcaaac

SEQ ID NO: 7380 - DNA, 1127 bp, Oryza sativa
ttcataaaagagaaaagagaaggaagaagggagaaaaataaaaaaaatccatgtcatcgtccacgtggcatgccacgtaaataagaccacggtcaaacgcggctttggaccgggatgatacaataaaccaagtttagatatctcaatgtgcgctttgcaagttcgtggacctaagtaaaatctgctgacaagtttaaggaccgctggtgcattttactcttctaatatctttggttgtaagttaggctttcttcctgtcaaatatcttggtattccaatacattttagaaagctaggtaacaaagactggaaggttattgaataaagaattgagaaaaaacttagtagttggaaaggtaagtatatgtctgtgggtggtagattggtgttgattaattctgtactttcaagtttagctatgtttatgatttccttttttagataccgaaagggatacttcaaataattgattattataaatctcgctttttttacaaggatatgatcataagaaaaggtacagacttactagatgggatatcatttgccggcccaaagatcagggtggtttaggggttcataatttggaaatacaaaataaatgtcttttgagcaaatggttgtttaagttaattaatgaacaaggggtttggcaagacttattgaggaggaaatatcttcataataagtctattactcaagttgataagaagcaaggtaactctcatttttggtcaggtctcatgaaagttaaggatactttcttaaacatgggttccatgattgtgaatagtggggaacaaactagattttgggaagataaatggttaggtaacttagcctttaaagataagtatccctctttatatgccattgtccgaaggaaatgttcttcaattactagtgttatgagatctgttccacttaatgtttcttttaggagaactttagttggtcagaatcttattttttggtatgagttgtgtgcttctattatacatatccagctaaatcattcttccgattgttttagatggaactttaataagaatggaaggttctcggttaggttaatgtatcttgctttaattaataatggttatattgagagaaataaaatgattggg

SEQ ID NO: 7381 - DNA, 1071 bp, Oryza sativa
ctaaagatggtactgaaagggaatcttggacaataatgtctgctgaagcatcacggataattagttaagcaggccttccggtgatggtgctgctctaatctcaccaccagtcgtatctccacttgccaatacatggttctactatgtttgatacagggagggaaaaaaatggatttgctgcttggactaagattgaaaacccatttttttacaaggtagaaaatggcaccacggaatccccgaagtccaatatgatgttcaactcagttgacaatagttctgcccatggaagtactaacaatggcaatggaaataaagcacctcttgacgaagagaatgaagaccttcttgcagattttattgatgaagatagtcagttgcctagtaggttagcaaaaacaaaaattgtgaaaggcaattcttcccattggaaggatggggacatttcatcacagacaggatcatcgctttctttattaaggtatcaaatatgccataactttcagattgttcctgtaacataacttcctatgctaaggtgtgatttcttcactggaatcaggatgatggataaatatgccagattaatgcaaaagctggaaattgtcaatgttgagctttttaaggttagtttaagtcacccatcgtaagatattcgacatgtagaatatttcctattgttcatgctagacaaaattttcagggtatatgccaactgtttggcatcttttatcactacatatacgagacatttgggaaccaggacaggggtcaaagtggcaagtctttacctgatcatcaatcgtgtaagaattaggtttgctctgtgcagttttttatgattcttttctattgctgcacaaatgcaattatacttttgagtcttaaatatcctttgtgacgcttgtgatgtattcagttcggcttagagtggctttgtcaaaaataacacaagactctgaccagtggatcaaaccacagagtatttcatattcaccttcatcacccgtatcaatggatgtgatgcctactgcgcctcccagctcaatgttcaccttgtatggtttgaag

SEQ ID NO: 7382 - DNA, 6970 bp, Oryza sativa
tttttctcccctcttctgcaggaggcggacgagctgatcgtggggctccccgtctccgccgacgggagcgagacgccgcagtccaacaaggttcggagcgtcgtcgggaggctcgccgtccaagcggccgacaggtgcgttgcattgcgtgtggctgcaaagctgcagactgcactgcactgttcaatgttcagtcagtcagtgtggttgccctgcatcaatatattagaagaaaaagagtttttgttacacaacgcaattagccggaccggcttatgctaggggaagggagaaaaggcaaaataaaaactgaaactatgaaaagacttacgccggcaaaatgcaactccgaaaggttgccctgcaatgtgcaatgttcagtgtcgtgttcataatcatgcgtctatctgaaaatgtgcaggggattgcgggtgtatctgcaggatgagtacgggacaacgatcgacgccctcgagttcatgatctccaggtaaatcatggctacctgaatcctcgctgtcgtcgtcctaacatgttctgtaaatttcagtactagaaagcattgttcagagtctggaactttgtttttcaggggagtcaagaggtctgcacgtgatgtcaaatctgatgcgtattctgccatggtatttctatgtttcggaatgcttcttcagacttctctccttgtggcagtttctacctgaacttgaccagttttactttggttgtagatgattttggagagatatttctcgtcatcaggtcaaggggctaagattgttcttcctaaacaaccacaactacagagcaaattgttagagaagtcaaggcaagatgctcaagtttaggaagccgtgtacgttctaatctctccaaccatagatagcagacttatcacaacagcgttcttgttgttctaccagctaacttcaattgcgtagtacagtattttatatagtcttgttcgccgtactcatatgattaaacgaagggaggatgacttgttgacattctgccaatttatcaaaattacaagtttcgatcaaaattcttcatttgctgtttcaaatcaaccagatgtaaatcgtgcaacttgcccgatgataaatctcgtggtcagttctgagtctggatttcgttgctagtagacttcttgttcagatacttgtatgtcacttaataataatagcattatggtttccaagtccaacaagattgtatatgcgtagttttcatagagaaggaatttgagagtaaactgctctaaaactcagctttggaaagaaagaaaaaggtaatgtacaacaatcccccgtcccattccatgtgctaaacacgcactttacccatttgagagtatgactgatctatctttactgtatctgcatcaatcatggttgctgcaggcatacattgctgctgacacaaagtagaatgcctgagccaaaatcgtcagaatgaatcaagaattagagaatgtgattctgtccaaatgaagatgcatctgaatctgtacaaattgaatcaaaacagcttgctgaattcggtttcctgggccggttcaccaagccgagggaagaacggttccctctcgagcatagtctgcaacgagtccatcaccctcaccagagacgcccacaagaacggcgcagaacaaaatgcgtacccgaagattgccagaaccctcacgataccaccatggtaccacgggaatgccatgacgaagaacatgccaataatagctaaccagggcgtgagcacagcaagcaatggaagcaagaaggcattgctcacgagcactcccaatgccaatgcaccaaacaggtacatggaccagcccatgaatgggtgaaccgtgcgtgggattataaagaacgggatggcatatgcaattagcatggccacgattgcagacatcttgatcagcccctgcaccatggcattttgcttctcgggccgccggttatagcacagttttgtcatcccaggctttgccaacctggtaatggttataatgactgcgtacatcaatatctccatcaggatcactggcatttcagcggcatacctgttgatgtgaacatgcaaaggttaagtgaacagtaaggatgaaagtggagtttagagtctgctcaagcacattttttcagttcagttcttgtctttactcacccaagatcatcccaccgttgcttgtgccaggaaaggcccagtggcaagattggccatgaccaccaataccaaggtttaaaccaaggggcgctggggaatgtgataacgctgttgggcccacaagggacatgccaatgcaacttgagatctgcattattccaccaaaagggtgtcaaagataatctttgagaggcaagagcaaaatgaaagtgagaaatgtataacagtagtactaacagtagtaggatgcatccatctgataaccaagaggaaggcgatatgtcccgttgagcttgctgccattctcaggagggtggaacattggtctatcaagcaagtctgggtagcagccgacaagaaacccttggtcagcaccatcagagttggcacggccaatctctaggtcatgaagcatgcctttgaagacatccatagaaggctgtaaatggaaaatgttgccgatgtcagattactgtaacaggaaatagtaccagcatcagattacttgtttgccactacatatgtgtgagcagaagatattttcaggtgtgacaacttaacactgattatttattaatgacatgctatttcatcgtagtacttccctaacggatactatattctaatgaatatggaaggaaaatatccagtctgtgacctgccaatggctaaaatccactgtacagattggcagaatacagctcatatttcatcaaaccctccaaatggccaatgcatgatcaatccagtggtagtggctcaactgtcatatgacccattaccaatccaatgccaccatcaacacagctgtaggtatggtcaaatttaagaaacacaccgtttttactctaatgaacactatgtaacctggcagaagcaacttattttaatcatcaaggcaacagaatctcaaccagcatactccttctgtcccaaagtaacccaacctaaaataagatgtgaccaaacctagtacaacgaatctggacaaacctcctatccagatttattgtattaggttagatcacatcctattctaggttgagttacagaacaggtggtacagactagaaaatactgtacaaagtacaggaattgcatcatcgtacctggagcacgaaaagaccagtgtggaagtagcaagggttgatgaaaacggcacagaactgtccacactggaagagctcatcggtcttctgaaggaagatgttatcggagtcgatcatgacgacgcgctcatagtcaaccagggtccacgcatagagcttgttcagcgtcagcttaaacctcctgttgatccctccaaggttgctctcataaggattcttcatattctccaccagcaccactctcatgccatcctcttccctcctgtttccattcacaataaaaaaggtgtcaagttccaaaaaaaaaagatcacatgaagatcttgtaataacaaaccacagcatggaaagttttgaacaagaaatgtgattgcaaccatctttgttcgcattgcatgttgtctgaaacgttttgactatgacaaagaagccattgattcgaagtttcgaacaaatcatttgggatttgaccgtccctgagaatatccatcggtgcaactgattcattttttcaaagaaaggaaagttgaccacattaattgaactagtactccttaccaaccaaggcaagcaaacagatagtcaaagttccaaagccagcgcaaccgtcccaaatcacaactatttttcatattggcatatatagcgactagccagaaagaacaagtaactaacggtaatgtaatcagacaagaacatcaccagttgaaaccgagcatatgcagtgcacatctcatatcgtcaaacacattgagaaaatccgatacactaaaatattaatcagataggaagcttccccttctgcaggtgggcccggccccctcccacgaaaccatctactagtattaaatcctagttgaaaaatacccgaaatgccctttccacgtcatcttcttcttcttccttgttcccaactccagaggaagaaaagctctctcaaaaacagaaacctccataggaagaaacgcggctttattgattaattaagaaactagcgtgcgctggcaatggcttagcgagggtaattacccccgcgtttcgacgattagcgatggtgaggtgagcatcggagaggcggagagagagactcacattgcgcggacccagtcggcggggacgtcggcggaggcgatgaggacgcggtcggcgtcggcgccgatcctggcgagggagcgcatcatgacgcgcacggcgacgtagaactcgtagtccctcggcgtccccatgtacatcatcgccgcgtacgcgtgccggtgcctcggccaccggccctgcgccgccgctgccacgactccactctccctcccttccaactcctccttcaccgccgccgtcgccgacaccgccatcaacgccgccacgacgacgaccaccaccccccaccgccggcacgcagccggcggccaccaccccatccccgtcgactccaccaccaccacgctagctagctgctgcctggacttggatcagacagagcaagggtagtagtagtagtagtagagatgcggctgatgcttctcgagttccttcaaaagcagaggagagaaaaaaaatggagaagagaggagacgaacgaggaggaggggaagcggccggcgcggcgtttcccttatttatgggtgtgctcgtggaggggtggggcccacacgtgcctgacaggtggggccggatcgggagtgggcccacccccgcagcgacggctgggtgcgcgtggccgtgtcacgcgcgcgcggatgagaaagagagagagagagagagagaaaaagaaggtgcagcaaacgctctgtgcgccgcgcggctcgtgaaaggaaagaggaaagacgaaggcgaagtaaagacgcgtgcggggattggacggctcggattgacccgttcgtcgcccccggccgacctcgtcgtcgtcaacacaaatgctacacacgcacaacggcacgagctctccccttttttatcagcgaatcagagatagagtgtttcttttagccaaaaaaaaagggaaaaaatacgaattactattttcttctccttttttgcggttaaaaaaaatgagccaattcagaacaaaaagaattgatgctttggtttggtacagagatgtgtgtgaaaatctttcgccagagatccgcatcatcagcatcggtgacggcatattaaatggcagcggcaagctaagcttcaattaatcaagctgcaaatggagtagtattaaagcttatgttacgcagagatttagccaggctgcaggcttagtgcacgtaaacctgggcttatgttattcggaaaattatttttctattcccatgacgtgtagacgagctgttcaacggctcaacctctccaaggctttgcttctcttcaggtacatctacgatcaagatatttaattttgttgctcaatgtcaaatttaaaggagagaatcgttctctttgtacgtcaccgtccggcagttgcataatctctaatagcgggcagggaatttaatcgtacaggaatcagttgcaaactctttgctgtttgctcttcaatcaatgtaccagccgcaaacaaaattgaaatattagaatttcaccattaaagttgattattgttatctttcatcatgctttatttcttacattgacctttagatcactaaaaacgtactccatccgggtttgtaatattttcattttagataaggatgaggtcaaactttagaatctttgattatgaatcattttttaaatatttatcttttaaatattgtaactatatgtatagattagtcttaaaaaataatttaataaaatcatatatttgttagcacttttatactccctctttccctaaatgtttgacgccgttaacttttttaaacttgtttgaccgttcatcttattcaaaaacttttatgaaatatgtaaaaattatatgtatacgtaaaattatatttaacaataaatcaaatgatatgaaagaattaataattactttttgaataagacgaacggtcaaatatttttaaaaaagtcaacggcgtcaaatattttatgatggagggagtacatattataaataaaataatgatcaaagttgtttttttgagaccgtactattgttcaaaacgacaagtattattaactcagagggaatatatatagaaattttatctttagattattttacttataatcaactgtaaacgacacaaatgacggcttttagataaggtagtatcggatatagtcagaggaatactttaatattttgggttgagctattaaaggtggcatctatcattgtaaagaaaaagcatatgcctcattggtctgatcctttgcttgcccctttccattagagcaagtttaatagtatagccaactgctagtttcaattcatctatagttaatttaatagcttatccatacaatagttatatactacactattaatacctggtcccatctgtcatacacatattgtattttggagtccgtactataactggctacaaatctgtagcccgctgctcttctctctccttatttatctctttaaaatatgtctgcagctggtctatagccagctattgtacctgctcttaattccaactgaaacgatccaattgaaacctcacacgtcaggattaattaaacccgtttctatcgtgtgctgatgttaactcgctccatgattcccctcccacccc

SEQ ID NO: 7383 - DNA, 5650 bp, Oryza sativa
cacttggaggaggacttagagccatggaagatcatcgaggacgtccaagtcaaggtggaggcccaaaccaagtcgacgtcgggtgcaattcggagtccaggaccagtctgcactaaaacgggtgcccaggtcgcatacatgctcggattggggcgttctttatatggatggaaagctaagaagatacctttccaatggttttggtcccacgtccaaattctttccgagtcaatgggaattgaccgaacaagttggcgtccagaatctgtcccagtgctgcgtcaccgtatttgggcctttggcccgtgtatcgtgttggaacccattagggttgcgtcgagaggggtttgcacgaccctaaactctatatatcagtacccgccaccatctttaggtttttgggttttgcttagattaatctgtcgagaacagtttcgcagctagatcggtttgtaagaccccaactcgtgagcttaatcattcatctgcaattttggttgttttctatctcgttcttgtttgtgttcttcgattggcaaacagggattagccttctcggcgaggtcatctgcgtttcgacacgggtgataaccagaggagacatggtgctgcgattgcggggctcaagagcgtgcgcgttcaagaagccggatcgatttgtgtcgctactccgcccaaatcgttgtttatcagaacctttcggaagatcgggaaccctagtgcacatcagtatgttatactagttctagagcacaacataaaacactattctggtgcagaatctggatcataattcaagaagggctacttacaaccttggaggagatactcaaaagaagcggtactatattaccaaatactaaaacaacacaaaatcaaatcatattagacaaggccactgcataatcctttgaatgtatgaatgaaaatttctttagcaaacagaatgttgtaaaaactactccaaatagctttaaacaaccaaagtaccaaaatagagtaaaactgttaatcaccaaatgacagaaatttcaccgcagataaaaatttctcactttcaattgaagaccagtggtaaactctatctggtgcgcatttccaaaacactagaaatttcttgtctagagatggtgcaatcaacatctcacacaaacagataccaaaacaagtgtaagttcaagaagaaattaatgattagtcgatagcacataaaaaggaacaagaaaaaacaaggaattgtaagaaaacggctagccatgtgaattatacaagaagatttcagaagccacaacaagcgttggtttgttttcataattattaagaagcctagagatcagtagttaatctgcaaggaaagcggtagttaatctgttatactagttccagctacacaacatggaatactactccaatatggaatcatgatcctcggcactttgatttgaaaagtggcatctgtaatctgtttactccttccgagaagctacacaacgagaagtatactagtactcctatacaacactaatactaaatactaaacacaaaatctattgacattgctttgcaagacagtaccgttgtacaatcctatccaaatcaaaacgcaaaaaagcttcctccacgaatatgagaaactaaataacgacttcaaacagcttaaaacaaccaaatcacaaaactacagaaaattcaccccaaatgtatgtttctacaactttcaagtaaagatcagaggcattttttgggtgggcgtcaaagtatcttgtttatctccaaaaccctagaaatccatgataccctatgaaactaagtacataagaatatcttatccctaactcaaaattaccgcttaacacatgattgaatggtccatatccttcagaaaactctaaaacacaagcacataattcacatgaaaatttgcaggctaaatccaataccgatgatttcaccgaactatagaatactcactttgccattcgctcaggaaacaccgtaaaatccacagatcctgaattgagagagagggcgaggggaggtagagcaccttccagagcgcgtcctaggcggtggaaaacccggaaccgaagaggaactcggatacctcggcgacgagcccctttctcgcatagcacgtgcctggaaacggcgtggtcgcggacgacgacgaaaccgcgcggccccactcgaggagagggaggagggagaacgcgccgccgaggaggtcaccgcacgccgtcgagctcgaccgacgcgatgtcacccccacaccttatgcggccgtccaccgacaggagaagcgccatgatccggtcgccgccgccgccgcctctggcactggcacaccgctcctcggtgggggaggcatgcaaggggcggaggcggccgtcgccgccgcagccgcgtggaggtggccatcgcggtggccgccgcgggctagggtttggttgatttgggattcgcccgatttgggggaagagacgaggcaagaagagattgagagaggaagcggaagggaagggattgcagtgcggagtgggacccacctgtaagcggcggaagcgcatggcacagggcgcgagttttgaatgctacggggggcaacgcggaatcccgttctagaagctaggaagcatatgggccgaaacctatctaaagggctaaagggaggtgttatttcggcccatagatatgttagttgaaagtttttgggattttggattgaatgaacttttttatagttcaatatgaatgtttgaggacgcaattgaaagtttcatatgatcttgagttaaaagttgtatgatttgattataaagttttgtagctttcaagttaaagtttcgaattttgaattgaaccttttgtaaattgtaattcaagatgaaagttttttaggctatggcgtgtatgatgtgagttgaaagttctgtgaaaatactactaaaagaaagaacaaaaaaaagtgtgcgctacgaggtgagtgtagctcaactgattaggtttcttgtgatggaaccagcctatcagagtatgcgaggtgtgcgtgtgtgcattcataggggtaagtgcgtgcgatttgtgggccctacgtttgtattgtgtttcaaaaaaagagtgcgcgctaaggtaacatgtgcattagtttgcaatctccgatatcatgaggccataatgaatagagtatataataaagtctttcttgtaggggtgtatttacattaagatggacaagagtaaaacaacagagaaaacatatgtatagagagaaaaaaaagaaaacaagctggagaagatcatgaaagtgccttctggaccatatataaaaaaaagattcaaaggatttagtattaaaccttagcactccactactcttctctatagaattctgagattccatacgtccactggagtattttagatatgccagcgacaacgacatgtcagttcatcatgatcacgcataaaagtagagtcagagtcaagagaaaaatgtcttaagttatcaattgttgaatgcctaatggaatctccacttcaagtaaccaagatcaagttaattagaccaagatgttaacataaactttgttttagtttacgatgtgcagagaccagaagttatcacttccatcgcgtcaaaaggaaattgaactggcctttcgaaaaataaatttgaacgtctcattcaggtgtgcgtgcggccgtgtaaagtccttgtccagcttgtgaacacatcatcgaaaaaaggaggaggaaaagaaccacgtcgcattcgaacgatggattttttacatcaaaatacaaaaacttgacatggaagctgatgtgtatgtcagtgtttctacctccttttttttcttctttttgttctttgttctaactagaaccaatgcagcaaagcttgtgtatatatccatcgccttcgcgtttttgatttgtaggtggggtggcaacgtttcattccattgcagaggtcagaggtggataaaggcacgccgctgttgacagtgctacctgggcccagtggcagtcgcacacccatggctctccattgcttgggcccacagagaacgcgagtgaaggctgatgccctagttttttggttgataaagtgatagccagggtttacaatcccgaccaaaaccagtcgaattctacgaattttcgatgtttcaacatggctcggtattaagtttcgattgtaatttcgaatgttaaatagtagatttgggttgtgtttagtttccttcaaacttccaaaaattctgtcacatcaaatgtttggacacatacatgtagcattaaatgtggacaaaaaaccaattgcacaatttacatgtaaattgcgagatgaatcttttgagcctaattacgccatgatttgacaatgtggtgctatagtaaacatttgctaatgacgaattaattaggcttaatagattcgtcttgcagtttacgggcggaatctgtaatttgttttgttattagtctacatttaatacttcaaatgtgtgtccgtatacttcaaaatttttacacctaaacaactaaacacggcattggtcaaaattcagtcgaaatttatcgaaaaccgtgataccgatggagctcgaaatttagtggtcaaccgataatgtaaaccctggtgatagctatgccaagatttacaagcaagctaataaatagcgttagcggccttttgtaggatcgagatgtcaactagagggggggggggtgaataggcgatttaaaactaaatgacacctaatcaaaactaacctaagttgctaggcttggtgagggtcaactctaactaagcaactaagttatgttttgcaaacctagggtgatagtggctcaattatatctctaggaaagtaaatcacactcctatgtcaatgtttagcaatcctagggtgatatgatctcaagtttgtctctagaaatgtaaattgcacaaatataaatgcgacaatcaaatgagactaggagacaagagatttttcaccgaggttcggaaactcgccggtttcctacttcctgttgaggcgagcccaactccaccactcaaccacgaagctaccgcacgcccccttcgtcaaggggtgggcaaggcgggagccggcccacggagaggactacccaagcctcgatcactagggtagttcttccttcactccgaaggtggtgaactccaaaccactcacaaaccggcgccgggcctcctccacaatcttctcagagaggtcaccgggcaactcctccacaagccgtctagaaggcggcaacttccaagagtaataagcaatgacccggcatggagatgatcaatcaagtgccacactagctctacaatggaagcaatgcacttgactcttggctagatcaaacctctaacacactagatggatgaacacaaagctcaagtgggtgtgagagaggtgcaaggggtgtatgcaattgaattgggtgccaagagagcccctttgctgctggagggggagtatttatactcccaccaaccaaaactagccgttgggggcgaaatcctccaactttgtgttctgccggtctgaccgggggtatgcggccggccagaccgtgctactctacaacggctagcgctgtcagagggccccatcgggctggc

SEQ ID NO: 7384 - DNA, 15892 bp, Oryza sativa
  unsure (1)..(15892): unsure at all n locations
tatgaatataagactgataacatgcaacctctgtaccaaaatgtaagaattcgtcacggccgaaagatcgatgcgccgatttggctcctagagacatagttgcaccactagttgtcgtcaacaatctcgtctaaccactgtgaagtgtgatgtctttttgtgctatggtctagccaactgttagtttcttccatgttaaattgctggtatgcatcccattggggaggcggcattccaagtgtgcgcaatcgcaaccacagccgatctaatagatattttaaaaaataataaaaaaggcaatatatttacatataacatatattgttttctcttgagaaatactcctatatagattcttgtgggggcaatgatgataaggaaatgcgagaacaatgtaagttgaaaccaaaatatattgtacatatataatgaaatatccactgcatatttggtatgtagctacatgtgtatacctagtatctgattagtgaagtacactatatagcaatgattttaatcagaaactatagagaaatgatttctgagaaagaaagacattgggtgtaattaagaaatcatattattgattgggaccttgtggggagccaaggcacagctgctagttcccctccatctgccactgtctgcaagctgatctagtatatatgtgcaacaaaccattggtcaaaaaaaaaagaaaaaaaagcgaaagcgattaattaaagttgaaacctaaatcgtcgtataacgaatggttgatatgatgtgtagtacatttgataaatctagtacaactatatgtatatcaatttatgtgatagtaactagctagctagtactgtaactgtaattaacaagagtgacacgaaaagatctatatatctcagatcgtacagttagctagatcaatgacgtcaattaactatatatataactagctgggttgtaactatagatagtagaagaactttcagctatatatccagacagtacggccactgcataatgagtagtgataaaatgccataatcttctccagcaggtgacaaaaaacgcatggctggcaccgatcgagagatcatgtcaaggctaaaaagctttagctcaacttggttcatggaatattcaggttcagacaaggcgagtcattgtcgcgtatcaaaaaccggagccctacacgatcaaaaccagcatcacggtggtcaccaccacgaagaatatgcatcagaacacaacagtacagtacagaagaagggagatagctagctaggttggaatggtcgaattagctagcaaagcaaattaacaagcaaatggcctgattaatcaagctcgtatccgatctcttttgccacccgtgaacccagataatccgcggctgatttgtcgcatgttatagctcgcttcctcgaactcgcttgatccgtgtggattactcggctcgatctgatcagctgtagtagtagcttaatttgttgactccatgctccatccatgcatgttcagacttgagaaattcttttctttttttcagtaaagttgttcagaagcaacaaaatgtgtgagaccgtccgtgtggctgtcaggctgtgctagctgctagctgatggtaggcagatcacggtatttctgaaatcaaatggtaattaaacatttaaacatatacgtgcacattgattgattgattgaacgtagattaattactaagcaggttcacatgcgtgcatgcttggccggcatgggtacccacgacgaacttaaaattatattatacaaacaatatgcaccgatcgatcgatgtcacctcctgtaatgcacatcatatcatcccgttgatctcacatgcatgctccttgattttttttttttgaggacagatcaaattgcattgcattgatccggcttttgggagaaagccaaaatgctccttgagatcatttcagcgatgcaattgagtgagtacttgaaagtctttaagtctgaaatcaagtggctaatgcaagttgacgatgaacacggcatggcaagccatggcagtactcgaattcgtcgtcgtcgctttgctctgtaatatgatatgtcgatatgatcgaccaacggatgctcgtggtagtgttccagccgagccctgctgctgaccacaaatgcatgcagttcttgacagcgaaaaaggagacttcttcttttgagttttgacgccttgcgccgacgggtgagccgccgccgccgccgccgccggagaagacaaggcgtccagcctcggggcccacgagggatagtacacgggaatcggattaaacgggccgaatccgccagtttgggccagagtaaagtgcgccaccgcgactccgcgagcgcgaggcctcgtttggacaatggcccaaatgctggcgcgtttgcttgtgtgggctgggaaatttcgagcaaaatctggcccatatactatgatgggctggggcttagacttttacctatcccgacgagaccagagttaggccgggcggaatatatgggccgtgttgcgtgggccgttgccagatttcacgggccgtgcagccatccggtatgctttgaacctggctgaactttttccaatttatagacccatagtttcgcttatgcttagacttgtaagctaaaatttaaattttagagttgaaatttttagttttcccatcttagtttgttttacagcattttaaaaaaaatcgctaagaatgtttatataaaacttttgcacgcaaattattttttatcggtaataagcggtatacataagcataaacataagcaaaacaagtactccagtaaaattgaaggtgaaggagcgcagcacaaaggattagacaaaatcaaagcattttctttctgcattctgtgagttgtgcagtttccgaactggctatactgtcatagtgatagctaagaaatttacaggaaataatggcacatatatatatatatatatgccaccaatacagttcgtaattaaaggttacatcaggaaaatgaatactgattcctccttgcatgatcttggatgacagaacggagagaaaggtttggaattagctgctggtgcacaatcggctgtcctgtaatgggagataccctccgtcctccatcaagccaggatctgatcgcatcggtttcgtaggtgaatccgtctgatgcaatgcaaggctccctcataacctcctgccattacaatgcaaatgatcaaatttctatttcaattcatcacaagtgacaagtatttgtgttaatctacacaaggagcagtgctaagttatgtgcagaacttttcattgaatacctgaaggattgggcagatgaagtatgaagggatgcagcagtcttcatcgaaaggcgactgcatcactgatgatggagaaaatgatgcagctagcttcctttgtatgagcaacgtctccggttctctgacacagttctcatcatgatcaagatactcttgcagcggcttaattatttgcccggaggcctctaagatcaaattgtctgaaatcacttctttctgttcctccatggttgtgttctgatcattcttgggtagatctctttcttgttttaactgtgcaatttcttcgcttgctctcagaagtgcttcttccagttctttcctctttttaacctcctccaagtacagctcctcgtattctttggcctgtaaggttcagagttctgatcaaaattctgaagaatatattcatatgaaatctggatgtttttttttctaagtggtctcgtttctgaataaaatagtcaaaggacaacgaattactttctgaagagatgaaactacttcttcgtctgctttctgccgtctgtaagattctcttaaagctctcatcattaagttgtcagctgctttgcatgcttctttgatctcatcgtaaaaacccagttccgattcattgttgtcatcctaaataattggaaaaggaaatcaccatattatgtcatcactcttacaagacaaaatattcgaaaccataagatggcattgcaagatcagaagaacctgttcctggtgaagtgtcaactgcagagcatcgtgaccagtatcaggaatgaaaggcgtatgtccaggtgcaatttctacttccacgccactatcatggaaaatgaatcagagatttttgagcttcactattcagtaatcatcataaatcgcaaaattactactaaaaggtttttaccttgtacagattaaccgttctttgcagacaaaccaaatcttgcatgatgggtcagctctctgcataatttctgttgctgtcctggatgcaggtttgtccatttttctgaaacagaaaacaacaattattggtcagctctctgcataatttattttgtcttcaattacaaaataaagctttgcatttcaagtgttatattttcttagaagaaatatttaccttgagtaattcctgtctggggcagctgaaattactagcttggtcactccatgcaagttgattagttcaacaagaccgtctacaacattttcgttctcaatgactagcttctcacatttcatctgaaatatacagacaatgaaaaaaaaactgtcaataagctgtagttctaaataaaaaacgggtgtcaataacaagccaaagccatcttgagataatgaattcacaggaattaacagaacccgtcacaccttcatcctcaggcattgattgacgtagtgatctaattgcttgtccaccttgtcacgctcagccattctgaacaagctcacttgctccggattcagtttactggcatggaacttgactcccactgcgaccaaaacagaatcaatacaacactagacagattatagccaaatttctcagtcttctgaattgaaagggctaagaggagtcacaaacccatgaactaatccatggtttccatgaatttttggccggacaaccatacatataaccatgaaatctttcagaaaaaaaagaagaagagaagaaaaacaatcggatgatgcagttacgtactgacggggatcatctgcggcggcacatgaacatgcgtgacgacgatggccgtggcccggaaatggccgagagcccacgacagcgtcgacctgccggacttcgcctccgccggcagcgccacgaacaccttctccggcgccgccatcgaccgaccttctcgtcaagcttagctccagttaatttaatgttcagttagcataagtacaaagctagcaagaacacgcggctttgggcgtacagaccggagactttggatggtgacaggcaccatatgcgaccgggaggaagaagaagaaggcaaaattaacagtgacacattaatttggacgacacggaaccgcatggagatttccaattttccaccaaaattaagtgatgattaattaactagcgccaatatcagcgtcatcgatagccttgtcattgaaaagaaaacttgcacatctcacagtcgcatcgttatataatttgtcttgtgccttgaccgtctccactgatcggttacatatactactaactccatattttaatgtatgacgccgttgactttttatctaacgtttaactattcgtcttattcaaaaaatttatgtaattattatttattttattgtgatttgattcatcatcaaatgttctttaagtatgacataaatatttttatatttgcacgaaatttttgaataaaacaaatggtcaaacgttgatcgaaaagtcaatgacgtcatacattaaaatgcggagggtgtacaaaattaatctgctgcttcggtttcaactaactgtttgaactcggaagggccgaagcacacggcaaggaaaggaaagggatttggcgggtggcaccgtgcacatcctgaacccccacagttcgttcaggtgtcttttcccggcaaattaattattaggattattactcatctgaataagtcccattgaataaactcctaatactttggtaatgacgttttgaaactttaatgaaatgatatcctccggcatcgtgaacatcgtgataacttcgctgattttttttttctttctttcttttcgctttttttttttaaaaaaaaagattatttgcacatgtgatgtgagaaaagatcagcggcccagatggcaagatgtgctaggcccataggaaacaaagtggcccatatagaacgtgtcacgtagcccaacattttcacggcccaaatttatatgggcctaattaggccgtcaggtttgtgcactatccggccgaaattgagtgggccaataccacagttccgtcatggttcgccggatgctccagcgtccaatcgccgccgccttcttccaggtcactattgcatatggagatacgaattttaatacgagtagttcagaaataaacatctaaacatcactgacttaaatttgtacattttatactgtaatcgagctgaaatacggatagaacgtacgtaatgcatggtgcgaataaactgtggaatgatgacgattcgacaggctagcattaataattaacttaatccatatatggttaaagaaatcagcatgcttatcacattaaatcatggagcctaaatcatgaatgtaagcatgttacgtcgctaccttaacttatctggtgcggactttgcagtttgcagtactctcttccagccattttgttcacacaacgatcgatctgtgtgtgttcatcatctctaatcgtattcacataaatggtagtctgatctgattaatattctgatggtgtgattaattaatataatcctgtaacgtgatcctggggatcagatctcagctcccgatgcaagcagctagctcaattaagcccataatttcttgtcttcttgtttctagctagaggcagtacgtggtatcgatcatcaagaacgtactcacagctggtgtactttcttcggaatcagaactcagtttttgttcgttagcgacctacttatatagagccaaaaggaaaatcggttgccacatgcatgtaagtgtgcaatccagctaggctacaattcatagatgtcagaccatctaagaactagttttaacagcagagtcaactattaagtataagctaatattacagataacgtttataatagatgaataataaggttatctctattttttctcctctctttctctcacctatgtatttaatttagttatcttaaattatgaatagttaactattacattagagctaacacaacttatttttccactatcctcccctccctgtaagttttatagttgacttatagcctactattaaactatttaaactagatcttgagcttatacttgctagttttacaattcttgttatttaaacaataacacaatcttcaaaatatatatttaactatatttttaatattatatataataaataaatatatttgtacttattttagcgccccacatccaacgttggcccactgcccctccatccccatggtatcggcaccgttttaattaggtgcctatttgcttgtctaggttcaccgtccaccgtcaaaccgtcatctctcacggccatccctctaaacccacccgatgatctgcctcctcctcccacccccaaccaatcctaacttgggaccctaaaccattactccactgccattcgtcgaggttatcggagatgtaggagaagggttgccagatctagtgaaggagttgtagtcattggagcacaaatcgtgtaggaaatataatcctgtggtaaaaaaaattgaaagattttgattgaagcaattccaattaaaattacaacatcaggcaagcaatataagaattttttttacaaatatacttattttttcaataatttacatttatatatatgcatacaaattttttgtaaaaatatacccatcccgcagaacgaaaatgcgggatcgcgacggtcccgcagcttcaaaacacgggaccgtcggtcccgcggacggccgcgcggcactgcaacggtcccgcagctccataacacgggactgtcgcggtcccgcagctccaatacgcggcaccgtgttgccagcgatttttatactgtgcgcactgttgaaacactgtttgggtactgttttgaaccgtgcgtggagcgcttccgcacattcaaactgcgggatcgcccatgaatattgccaaacagtacgaaaacagtactaaacagtgccgcgcagtataaattttctggtatatagcaggcgcgtggtagaggatgggaacgcgcggtcccgctcaacgactacgcgcgaccggtgcggttccgtgcatcggcgacgcgccgcgcaacggcgatgcgggaccgtctcgggaccacgcgttcccgcgctgcttctctccgagccacgagagcgagccggtgccgcgcttccgcgccgcgggagggagacggtgccgcacggccgtactgcgcaaccaccggtcccatggaatggcaaggcggcactgtctcggtcccgcatccttgtcatgcggtggaggtatatttatgcaaatattttttatgtagatatataaacgtaaaatatttttaaaagaggtatattttcagttttgtttcagcaatataatgtatcactttagagactcagaagaaatttttatcggcagatcaaacatttccacatatttcaacaaatgcaactggtcaactcgcttcaattccccgtgatgagtcggcgatcgatttccacgaatatctgttctctcctggcaaaatcttgtcctatctctcgcgaacacctggcccatgcacctacaacaaccaagcaatcattcatcatgcatgcaactagcaaccgcaaatacatccattctagccataatccggctataaataccagacgcccaaatcaaacgatgcaaagcaacacaagccgaccgaagcaaacatagctatagctagcacacaccactagctaattaagctcgctcgatcacttcatcagttagcaatggctatcaccaaggtcgctcccctcctcgccctcagcctcctcctcttcgccgtcgccgccgtgcacggctgcgagccctactgcggccacggtggcccggtcatcccgacgccgccggtggtggtgccgacgccgccgtcgtaccaccgccatggccgctgcccgatcgacgccctgaagctgagggtgtgcaccaacgtgctcaacgggctcgtcggcgtcaagatcggagccggccccgacgactgttgcccgctgctctccgggctcgccgacctcgacgccgccgtctgcctctgcaccgccgtcaaggccaacgtgctcggcatgaaactcaacctcgccgtcgatctaagcctcatcctcaacaagtgcggcaagatctgcccctccgacttcacctgctaattgagctcaaaccgtgcgtgcagcatgttggatatcatgattcatgagtttgatctttcatcccgattcccgacgcagcgttaaacattaatcttgaaataattctcttgtttactcgattcgccatttgcagctcgttctatattataatgtaaaattcttgaatcacttggttgttgtatattgtaacgcccattatatatagtagtattttttgttctcacaaagataactgccatatagcttacacgttcaccttaagttctttcttttctatccgtgcataaaaacactcgcacgatatgtgataatcatgggcgatgcggcaattcttgacctaactgttcctatttcctcaagccggtccacacatgttcctagccatgtgggtcctgcatcatggtagtctcttttggcccaacatgtcgcgtgcatctcgttttgtttgggatgttggcgggctgcttcctgttttggctgattagaagggttactaagttttgaatcctaataagggtaaagaagagatttgtacgtgacattgatgtgacatgtcatgctggcatagtcatgactgataaataggacccacttaaaatttttcatttttatttttttctttctcttttctctttttcctttttcttctcttgtttctctttttttccctttctcctccttcctctcaagaccatcgccgcatggggtgcttaggtcacaaagaaaggagaagaaaagaagaaaaaagagaagcagaagaaaaagagaagaaaagaaaaaaagaaaagaaaatgttttaagtggatcccgtttgtcagtcagatgactgccaatcacgtccatgtggcatgtcacatgagtgacatataggattttagatgggttgtgacgatctgggacttagatgacacacttcaataagttttgagatttatatttatattttaagagtttaggaatctgaatgacacaaaccatacaagtttaagaaccaggtgtggcaagatgtgcctacctaggtccacttcaaatagagcagctagcccatataacaatgtgtcataacccaaccaatatttccaaaacatatgaaaagagaaaaaaaacataaaagtagaatataatactcattcaattcctatgagattgaaacactggaaagtttcaaattgtttttgatgggcacacaggaaaaacacagaaaacatataggaaattgtaacatcccggcctaggacttaataggattaatagaatactcatatcaacaagttgcaacttcttttccggaagccaatctccaaaaaactccagggttaagcgtgcttggcctaaaattcttcccgggtgcacacgagtgaggacaaagtgtgcagaaaagacatgtgttggtctgtgagggcagtctatgacctatgaaagctatcagatataagcgggcctacctaggaaagctatcagatgtaagcgggcctggcctgggagaggcgggtcgttacagaaatagaaagaatgaattgagacttcaggctatttaatttcctccaaaatgtttctagaatagcacatttcatatgaattctgaaggaattattagtagaaatcaatccgttgttttaaaaggctttataggatttttatcatagaatacaaatcctgtaaaattcataagtttttctctcttttttttgaaagggccttcatgtctataccgtggagagcaaaaaaaaatttgagttaattgcactttggactaagaaaatttaacaaagttttactttggacaaggggtgaagttatattcactttggactagataaatttacaaaagttttaaattggaccacccttttttttgntttttttcccccccccaaaatttttccacttttttcccccctttctttgccttgttttctctattaagcagctgcgccatggatctgagggatgatcaagcaaagcaccaggattccttctctatgtgctctgttccccagcttgaagaaccatcaaaatcaagactggttttagctggttgctgtacctgtctcccgcaagctcgatgcaatgatttgttctaagctcagatgaacttttacggggaaaaaaggttgaagtcaagcagctaaatcaatgagtaaataaatcaagatcagatggaatattaattggtttgttgtgttgcgggtaagcccgccaatgaaatcaagaagtggcaaacaaaatagtggcccaatgtgcagtagaaggtaagaaaacctgaaccaaagtgaaaatgttagatataacctagtccaaaataaaacacaggcaataataatcggcccaaagtgcaattcactcaaaaaaaaaaatttatagctagcttagctcgatttgcagagcacttgacatactgactgagtgactgatgacgtaatggctcgaacaaactgtacacacgcatgtggaatgacgacgatgattcgacctgatgctagtattaattatttaattaaacccatactgttaaacaaattagcatgcttagcacattaatcatggagctagcctaataatgcatgttgccacctttctctgatgctggctagccattttgttcacatcgagtcagcctgttcatgtgatcgagtattcataatctgatccataatagtactattttgacggtgtgattaactaatataatcttgttcgtgatcctcgggatcagctccacaaagaaatatcagagtctaaactaaccagacaaagttataacgaccctcactttgcatgcatgtatgaaaaaaaaattagtgggaattcctcgcatggaattaagctcctatgatcatattgtcagtagcgaaggctaagacttagctgttctcaagctagatccatctttaggtacatccagctagccaatacaattcacggaggccatcccggctatgcgtgtacaaatggagcatattgactctgccagctcaagtacctaaaataatgcaggagagaggaatggatggatggttacgtatgacacgatgtatgcaaaattacaagtccatagcaagcatttcagaaagcattatattcagaacaagtattattcggcagatatataaagcacacatccatatattaatgtcaacaaatgcaactggtcaacttgcttcttccccatgaataatcgaattaattaaacgagaatatatgttctctctcctggcaaaatcttgtcctatctctcgtaaatacctggcccatgcagtacacaaccaagcaaataaatcatcacgtacatgcactacacaaccaaacaattaatcataacggatgcaaatattctactccctccttcaaaaaaaaaaacaaactctgggtttccatgtccaacgttgactatctattttatataaaaaattttataattaatatttttattgttgttagatgataaaacatgattaatattttatgcgtgacttgtctttttaatttttttaacaatttttttaaataagacggacggttaaacgttgaacacggaatcctaagatttgttttttttttgaacggagggagtaagcttcagctagttcagtacgtgtatagttccaaacagcaagctcgactcgatcggctataaatacctgacgccccaagcaaacgatgcaaagcaaacacaagctgaattgaagcagcctagctagctaattaacaccactagctaattaagctcgctcgatcacttcatcacttagcaatggcttccaccaaggtcgtcgctcccctcctcgccctcaccctcctgcttttcgccgtcgcggcgcacggctgtgagcccaactgctccggcggtggtccggtgatcccgacgccgacaacgccgtcgtacgaccgccatggccactgccccatcgacgccctgaagctgagggtgtgcgccaacgtgctcaatgggctcgtcggcgtcaagatcggagccggccccaacgagtgctgctcgctgctgcaggggatcgccgacctcgacgccgccgtctgcctctgcaccgccgtcaaggccaacgtgctgggcatcaacctgaatctccccgtcgatctgagcctcatcctcaacaagtgcagcaagatctacccatccggcttcacctgctaattgagctcgatcgtgcataattaatcttcatgcgatgacgaggattgatctgagttgcatgataaattaaagattaatcttgaaataattatattgttattcacttctacatttttgcagcccattctacattgtaccttactttatcattcttgaattacttaattgttgtaagttgtaacgcattatagcaatgttgttctccacatgataattgttatatagcttgtcctccttaatttctttctttttcatgtatgcaaaaaacgtgttcgtctcacagcgtttatctataccatctgtataattgacccacaaagtattaatactcaacaaagtaattattactactcttaaaacctaacatgcaagtatatcatatcaatccactaaataactaaagctcaagatgcaagcaagcatagcaattacatctataattttttacattctaaatcttaacattcaagcatgctaaatcatcatcccacatcactttcacaatatatcaacatataaatttatctatcatttatacaatgtttaacatatattcctctacatattccgtagcaaaacatgggacgtcatcgtatatttagtgataatggcgagtgaaaatgattgatctgtatctaacgatttcctcaaacaggcacacacatgtaagccatggggctaggcatgaatgcaggccttgcacgtaccatgctcgttttcggcctagtacctgtgtgcctcgtttcaacacaaagcacattcgacgtattggtgaacttctggttccgtcctattaaaatagtaactaagcttggtctgtctaaaaagggttagaaaagatgaatgacccaaatgacaagatgtgtctaactaggtccacttcaaatagagcaacccacagaacaatgtgtcataacccagtctttgcacaaaaaaaaaaacaattttatgtctgaagttaattgcttctaagccaactacaagaactagattataagctattaccgtccccagattctagggttaggggatcgtggctgggagagtggccttactctgtgttcccaacacagctgctgcgcacgaaaacgttaacggagcggtacattagaacgtgattaattaagtattagctaatttttgttcaaaaatagatcaatatgatctttttaagcaactttcgtataaaaactttttacaaaaaacacaccgttgagtagtttgaaaaatgtgcgcgcggaaaacaagaggagggagttgggaactcatggaaatgaacgcagccctgatcggctttacaagcatctgaccctaggaacaaattgtctttaattttctaaatgtttttcttcaattatatcgaaaataaaaaaaataatggttacattgtcgcacagctaattttcaatttttcagggtacgcaacatatgtcctacgggaaaaattataaactttagatgtcatgccgcaaatcttgcctacatgtttatagtggtaattgagcaaaattcctttgtatatgttcgtagactgcagaacacttgcatatgggatatgctgaaatactgacagagaacgtaatggttcgaataaacagtgtggaatgataacacgatcggagacctgctagcattaattaactaaaccgatatggctaaagaaacaagcatgcttagcacattaaatcatggagcccaaatcatgcatgtaagcatgttacgttgctagctacttaatttgtctggctcggacttactctcttccagcgattttgttcgatcaccgatctgtacgtgtgttcatctgtaaacatggataagcatggtagactgatctgataaattaatataatcctttaacgtggtcatggagatcacagctccgattccagtagccaaattaattaagcccataatttcttgtccaccatgtttctggaggcatagaggtcaagaattcacagctggtgtacttaatttgttcagaatcagaactccgttttaatttgttcattaaagacctaagagctaataaacggaagttaaaatcggtcgctacgtgcaggtaagtgcgcgtgcatggtcagctgggctacaaattttcatggaggtcactatgcgtgtatatatagagtatacattatagtgactctgcttaagctagctccgatccggccagtagtagattaatggtggaagaaattaaggaggctatgacactacgatatcgatgcacatttaggcaaaaataaaaactctccaaggcatgcaactatgtcagaaatgctcgatcagaacaagtattagtcagcagatacaaacacttccggccatatatt

SEQ ID NO: 7385 - DNA, 1471 bp, Oryza sativa
cctaaaggcaaaactttcttcacttcagaaagacatatctttgaaagagcaatcgttgctttcagagctggagaatatattccaagagcacaaggagcatgaagaaaggatagatcgtgtacatttacttttaaacaagattgagaaagaaaagactgttgaattacatttcccccgctttcttgagagggaggttattagtcttactgcacagttatcttcaacagaagaggagcgagaaagttccacattggataccatccgtgaggtttccatccttcgagcagacaaggctaaacttgaggctaatcttgaagatgtcaatgcacagatgatacattacgagtctcaattggaagatctgcgggagtctaaaaccaagattaaagacctagttgactcacttaatgcatccaaacagaatgaggaaatgctcactacagatgttgacaatatgagaagatcgatagaagctgctagatccaatgaagataacttaaggaaaactttgtgtgaactagaattgaaatccaaatccagtgattatgagaaacagcagataattgaagaaatttctgtactgaaaatccaggtccacaaaatagcaggcctccaagatgaagttcttacattacaaagttctcttgatgaagctaagtttgagaaagggaagttggaagggctgattcaatcattgtctgaagaatgtgaagaactaaaggcacaaaaggggatgttaacagacaaggtctcatgtatgcaggacactttgaatgctgccaatgaaggaaaacaaattgaaatctctgcacaaacaaagcttgtgatgctaggagatgaaccaccagttaaggaaacatcagatgtacttgaagctgagctaaaaagtgaactaagtattatcaggggagctaacagtgaataccaacaaaaaatatattctcttcaagaggaaaatgaggatctcacaaggagaaatcagcttatggagaaggagcttgacctgaagacaagccaaaacaaagatgaaaataccaataaacaggtgagccatttaaatataatcaactgtggaaatctctatgcctgtaaagaaccagttttaaaacagggtaaagtacatcaaatgtgataaactcaatcagctgttttcttattgttttagggtaatgatgctaatgaaaatggagattctccagttaatgaggtcccagagcttcagtcaaaaaggatccaattactggaaactaggcttgctgaggcactggaggaaaataaattgtatagaggccaaaaaaaactgaagaggtacagtgattcatcatatctacacgccttgtccttctgacaatttttactagcaaaatgcgttgtccaccagatatcatttgctatcccttgcataccaaagtcctgtttaggccccaggttctgactcatcagagctatgggctgtcgtccttaataataa

SEQ ID NO: 7386 - DNA, 3294 bp, Oryza sativa
gccggtggcccccggtgggcccctcggcgcaccggcgggggaccatggaaggcagggaaggggtgaaagctcccagatccgggggccgggggaaggctagggctcgcgcgcgcgcgtcgtcgtcgtcgtcggtggcctcggcggccggtcggatcgcgcggggggaggagagagagaaagagaggagacgagaggtggttggtctcgtggcgtggcgtgggtctggctgggcttttttttccctcgcggtcgcggcgatgtgcgtaaagcggaggagaggagaggggagggggcgagagaggagcagaccagtctcgtgctgaagatgatgatgctgagtctttttttttctttttaccttacctttgttcctctccaagttacagcgcagtttgttacaacctccgtcctataatacttatcgtcgttttgaatttaaatttttgtttgtaacatttgatcatttattttattttaaagtattatagaaaaaagctaatgtttaccattagccaccacgagtgatgataacccgaagatgatgtttgaaactaatgacaaagatgaatattccctccgtttcaggttataaaacgttttgactttggtgtttgactaaatttgtagaaaaaaatattaacattttcaacccaagataaatttattatgaaaatatattcgattattgatttgatgaaattaatttagtattataaatattattatatttatccataaatttagtcaaacttgaaacattttgattttgactaaagtcaaaacgtcttataacctgagacggaaggagtattaagttagcccacataatgtgtaaaaccagtagtacatgattaattaagatttaattattacaaacttagtaaataaatattttttatattttaaagcaacttatatttatatatagaaagttaacttaccgtttagtagtttgatgaaaaacattatagcaaaaatcgagataaaatttaaatcttaataaaaacaattgaaggctcagattattgtttgtgataaaagagttttccactctcctctaaaacattttttcatggctttcgtgtgaggtgaacagtacaacaaattaagttacttatgtataattcgggatggtatattctgatattcacaatacctacacctcttattgttggaattgtggataaaacacatcattatatccttttagtacaacataggagtagatcttaataaaggttcggtccatagatgcactttcatcgtaaatatcctcttaccatttacatttaacccactaacaacagacataaaagattttaccatttttccatggtttatcagccatagcaaacgatcaaataaggtggtgtttagattcagagacttaactctagtccctgtatttatacgctattttagagtattaaatatagattacttacaaaactaattacataaatgaaagctaattcacgagacaaattttttaagcctaattaatctataattagagaatttttactgtagcatcacataggctaatcatggattaattaggcttaatagattcgtctcgcgaattagtcaaagattatggatgagttttattaatagtctacgtttaatatttataattaatatctaaacatccgatatgatatgtaaacatccgatataataggtacttaaaaaacttttagtcccatataaagacagtaagctggtaactattgcagtcgaaaagttaaacattctgtccagcctcttctttctctcctttttactgacatcatcctgcattacaatcgggcgataccagttccattaacgctgaacagatcattataaatgaacaaactcatccgcatacgcacgctggtccaatactaactatagagtagtactactacactttgcatgatgatatctatcccgtcgcacgtccacatctgtgaccatgatccaactttctacccgcgcgcgcggcgtcttccaagttggcagacaaaatcacaccacaccacacaataccagtgcgacactgagccctggccggctggccctgccctctcaagacaaaacttgacaaaacaacattatctgatcctctctatcgaaatattgctcttataccaactggaaatttacatgtacagtgatgatggtgagttacaggttttacatatgactaccaaaattctgctgccctcgcagctgccactgccgtggcagtggaggaagacaaataaagaatcgaatcagtggaactatgtgacataattttataaccactatatgaacaaggaaaaccgaatggatccagtccaggcagcttccagcttcaccaagctctccttcggagatgagagggagatcgaagaggtgagaaacaatgcgtattcacaacaatgctgcgttcgcgctttacctcttccagctgcaataatgtgttcgattgccgtatgacaaaacatggtctggtgggttgagtctacagctgatgttgatcagaagacttcctgattgtcattgtccaaggggtttctgcttgtaaccggacttttgtctttccagcaacttcaccttgttcttgagttttttgtccaatttcttaatgtatttctcctctctctcacggtcagcgataccaggccagaacacctgaccagtcagtggccacagccattgatcatccccagcatgcatgccatcatccgcttcctctgccagatcctcatccatgctcttcagtagggtgaaattgaagaacttcacccacatctcatttctatcatcaagagggtgctgctctctgatatctccggtgacaggatttaggtaggccatcttctttccgctgtgataagcccagacattcacaaggacttcgaggattcgacaatagcagtgccttttctgaggtaaagagggtggttatgttcagatcacacgcatatccaagtatacggatgattataaacaaaaatagggtcaccttaagctgtgatgctccaagcaagcatgaagctggatctgtaccattcacgtttaagctatgaagataatctacaaacatcctgcaagggttttttttttctctcagaataaaataaaaagcattaaagaaaagggaagtgtgccatggaaagatgataggtgcactgtaaaacaataccttgagaacatgatgaacttcaaaaatgacggagtaggcatcacccaactatgcagagtagaccaataatcaccatcattgggcattggtggcagggctgtgatgccatctgagag

SEQ ID NO: 7387 - DNA, 10052 bp, Oryza sativa
gtatggttaacaaataccacagcctgattatgccaaacaaagcaatggactatgttaacagtctgatcaatttcatgagctaccttgttccatcaacaccatcatctcttgcacgggcggagccagcattttgagtcactggggtcatggcttttacttttatttatgtcgtgtttgaaactatatttattctcgaagctagatatttttagctcaaaattcttttggagctagagctatgagtaagttgggattgttccattttgctaaaaataaatgtttaaagtctattctataagaatttctgaggtttttaaggtctaaaaatttaaaagttatgaccatatacaatcgggcataacaaccatgtgctttttcagacatacaaatatgttctgaaagttgtttattattccatctgtctcaaaatacaactacctacgtctctttaagagatcaatgttagggtgtgaaataattgtgattggttggaaaaaaagtaggtgaaaaaaattatatcggggaatattgtgattggagatgggatggttcatagaaaatagctatattttaaagcaaatttgaatattgagtaaattgcacttacggtgcaacaacttggcaggtgggtgtaatttggtgcaataacttgaaaaatgaccgttctagtgcaacaacttggtaggaatgtgcaatttagtataagaactttataagtgatcgtataaatgcaacaacttgtaaggtaggtaggattttgctacaataaattaagaagttatgtgacaacttaattatttagagcattttttatataaattcaaatttttaagtacttattttgacaatatactagcatggatttatataaatatatttatatttttatcctaataactaataactgaaagtcaattaaactggattaagaaattattatatttcagttgataattgagaaggtgaagaaaacaaaaaattcttaaaggtaattggatgtaaattgtatatgcaacataattcttaaagattaaattcatatataaggtaatatccgtatgatcagtgtgtattggcatactgacatcgtgaaaaatctcatctagcatatgcttagctaaattgattcaataaaatactaaattattaagttcttgtactagaacgcacccacttgtcaagttgttgcactcggacgtttaattctaaagttcttgcactatattgcacccacctgctaagttgttgtatcgtgggtgcaatttactcttgaatcttagaagtaacatattttgagacagagtgagtagcttaaaaaaacacatctagtagttgattagcaaaacttcaggcctaatgcattgatatacatagcacatagctaaaataagtagttggttaatagatcaaatatgtctaattgcagcattagtagcggattgacagtagcataacacagctaacaaattatgattccaaagaaagaaactgtacaattgtttcagctttcctgagctccagcagtttatccggctggccggggtcattaagcttttgctactggggtcattagctagaaaataatgaacaattcacttgatagatcgaatgccatcggggtctaatgaccccaatgatagtactgcagctccgcccctgatctcttgcagaatgaaattccatcttgatcagtcatcttgtctagtattcaacactgctacaatatatgcacttacaaccaacctgtgatttgtacaccaattcaccaaaagaatctaaaataggcatatgtgaaaaaggttctgtgatcaaatatatgtgcatcgcacaaaaaggacaagttgtagatgcatcttttgtgatataactttctttgtttttgcagagcacataggatctttttctctcttatgattatttacaggtgcacatgttcaaacatactgggcatcatttttttaataatactgacaacataataataggtgttcatcaagtgttatctacttgtagaaactttgacaattatgctcacataatgggtgcatataaacttgagtttgtaaggttgcagttttttttttaaaaaaaaatcacagatatgcaagtcatgccttttttagctcctaatagcttaagctcatttcttttgtaataaagttgtgttgcatgtcagctccactggacctataataatttgaaatttggtttatgataaaccaagaatagggatgacatatcttttaagcaatcatgcaggagactctctattaaacttaacaaaagagaggtaacttgcaagaaaccaaaatgtggttttaaggtttcaaaaaagaaggcagactgtgatgttgtcaagatggtttacggcgaggcatttctctgctctagtacttctgaatacatctgtgccctaactaaatttccacaacttattcatgtgggagaggatgctctcttcagcatcattgatgatttggacctttagtgccactaattgttgcaaatttgacatggccataaacaacatgtggttgttggaaacaatttacttgttttattcttctgatggacgtctgctgtatgggtttcttcactgaaatctctagtaatcctacaactttacctggtcatcgagcattcatataactgttcaaccctgatggttttcaggttcagttggttcgagtgatactctggactgccagtcacctatcaagcctgataattcagaatccaggcatttgctgatcgacctgaatgtacctcaagaagaaagtctacatgttttctatgctccatctcaaataacttgtccaactttagttaattcttcgtcatcacaccctggagaattttggaatggctccagcaatgtttacaaaaaggaatgtggttctggtgttggatcatcaaaaggatcttccattacggtggttgcacccagctctgctcctgatagttcgagggaagttgtggctgcataccaatttcatgatcctaagaatttgcatggtaatatacatgcaagagaaaacagccagcatgaacatgcagtggataagttatgtggatcaagcagtcaatatttcttgccacagcaaagattttctgtcagttcctgtggcagaaatgactcatctttggccttacaaaaatcaggtgacaaccatgttgcctgccaatcaggacaaccacctctggctgtgcatactgagctccaacatgacacttctattgtaatatccagtggtgaagagaaggtcctttttgaccttaatgtgccagctgaaagcattgacatggaatcaacaataaccagtaatagttttagagataagctagtgaaaaatgatggaagtgaagaaacagtaaccgatcattctttctccaagagaaacggtgtgcatgctgaaacttctatagaagaacgaactgttggagaacatcatatatcagtcagcaaggatggaaacaccacatttttccaagaatcaataaataatgaaattgataaggcgcagtcttcagaccttataagtgttagcagcaaacatttgattgcagaaactcctcatgttgacaatattgtgtgtccagaactgcgagcatctcctgatggagcatcaagtcctcaagagaccttgataggcaattgtgacaaaatggtttgtattgcagctgagacactcgtttccattttctcaagttctgcatgtactacagattgcccaggaactgacagtcagacagcagctgaggatgtaaacgatgaaccgcagcactctttggattcctatgaggaaattgtattgaatgtagaagagatcagagatgacggggaatccatccctgtgattccacctgataaggatggaccgtcttgtgggatcaagctaagaagaggaagaggactgagaaattttctgagggagataatgcctagacttgtttctctttcacggcatgagatatgcgatgatttgcatgctataggttacgagccccggaaaactcgatctaggaaaacttttggggctcaaggttcatcttcaactagaggaaggccgcccaaacatcgtcccactgccaggaaatgatcaacagcatttcaagttcatactaggatgccacgagacgagcaattcagaagatgaaatataattttaaccttgtgaatattcatgtgtgttgtgcgcatcttcaaactcggtttgttactagtcactaaattgaggatattttctttattccttttacctcttgggagtgctgtgggccgttagcttcaaatttgagttcagcattggcaatgaaggcatagtcataccattataaaatctcagaattttgatcttttaagtattaaccctttcttaagaatcttaagtactcgtgatctgattccgatgaggattttaattttaaaagtcaaactttgtatgcttaaataaacagtagttaatatacaggtatatttgctgtatataaaaataaaaattgtaccaatagattcatatttcaaaacgcattcacacaatattggttttgtagatattaagaattacattttatgagaaatcattgggcaaagtttagttttcaagactttctacaattaaaatacaccttataaaaatgaacggaggcactgtttgtttttttgatcataatatgcctttttttttctcttgaaacatatgtggagttactgagtcagtgagagtattgtttctcaggtaatatgcatcactgccctgtggatcaattctaatgctgtctgttacagcttgcaatgatgagacctgggctcgggctgtgctgatggtcccaaatttcctgtgcaagacattactaatcagtttttgcatgcaaatttcacactccagaagaaagcaaagcatttgtttctcctgtggttcatttgatctttgaccccattgatgagcaagtgcagagatcataatgcccggtgtcacgggacatcagatcgaaggtcagttctatgagaccagcagcaattgagtaaaatttatgatgcatccagttatatttaacaccatgctcaccagtgttcagctagaatctgagtgacctcatacacctactgcctttacaattcaccccaaatccccaagaatccaggttgcagcagctatggtggtacataatccagcctgcaacaaacagaagctttgctgattgttctaaaatttgggtagatcacccagaatcttctaaccctatcgtttggcctaaacagccaaagaataagccaaaatttaaatttttaaacttgattttgaagttaattttgaaatgcttttaacataatttttgttaatgttggcttttaagtcgctacgaacaaatctacaaaagttttacttataaattaattttaattttctaataagccaaataagccattttgggccaaatgggcaaccgatgagagccttcttatctcgatttagaggatgaattgatcccattatccaaaaaaaaaaagcttcacaagtatatatctccctccgtctcgtatcctaaaataactatgttttgggatggaggaagtatatccgtacacaaggcttaagcttcatgttcagtaaactgatcagtgcaagaaaacttcagaaagtgtgacatacattagtgccactggtgtgcacaaggaagaagaaatgatttgctactgttggagaagacctaagatctcaccatgatggcctgagctacttgtagaagtagaagtatactaaagcctttatgacctttgcattggccatctagtcggtctagtaataaaggtttggccatggtcggtgggcaaaggcaagtgcttgcacatcctgcatcattgttagatttactcctgttgtcagatggacatgcatcccctctcactccccatgatcatcatcacatcagatgatcagatcggattcagagctagcccaatcttcagggagacctgatatggccaagctagtcaaacagccaaagcatagtactccctccatccacaaatataaggatttcgttcacaagtacaatatttttttggtcatgcacgtcgattgccctccgtccttaaatacaaggaatttgttcataaatataaggatttctacacaaatcgttatatttgtgtatagaggtagcactatctcaggttttctttgaataaaaggtagtatagtagtactagtatttcagcaaggacattcactgttaaggcagtcaaatgatcaaggagccatacatctagaatacctataaaatgtgcagatagatagtgtatatacggctgtttgctgcaaattgtaccagcaacagtagcaatgtggcatgatgattgcagaggaggaataactggtgtgggctccagagatcaatacagagacaccggtaggcttggattgaaacaaaagcaagcccaatgtttattactgcatctgtttgaccacatggagatgttcagttgaggcaggcagttaaccagccattcaggagccctagtatctgaatcctttttaatggcaggtcaaagctacagtcttacctgtactggcaacaattaggcaacaatttatacagacatcagctgcagcaattacagtgttgcttgctgaaatgctagcaacatgcatgcatggcgaccttaatggcatgttgccatgttcccaaccggcaatacacaaaatgaccttcttccctcttttggacgcatgaattttacaggattttcgtaagatttagttcgtcagctcagactggaatatactggaattacaataatttataggatttagttcatttgttatgagttatgactgaatatactggaaatgtagtaatcttattactgtatttctatcatcttagtaccggcttactgctttactgcatgcagtgccacggggctactggaccattcttttcaggcctggagtttctgagtgtcagttaggtctagtattcatggcattgcagcattcactgtttccaaaggtgagttctccctcgcaaaaaatgctgcaatattcagaacacacataaaaaacactccttgagaaaacaagaagaaaattcagaactcgtcctattcaccattcccgaaaattgacgcaagaacaacagtgcaaaatacacttctgtcttactccgaaaataccctctctctccattcaaaaaactcatgtgtactcccttcatcccaaaatatatgaaattttagttggatgtaaattatcccagtactacaaatctagatagggatgtgtcacatacaaccaaaataccttttttaggatggaggaattatttcttatgtaattaagactaaggagaaattaactcatccaacgtgtatacaagtaataattcgatacataaacttaaaatgaaaaatgaattgtatgcctgcatgcaacgagtattaagatgcatgcttgggttctgatgaataatttaatctagaactataaaacgaaaacacaatctcttcatttaagttttggaataaatatgattattttatttgaaaaacaaactataccttagctaacacttttgggcgaagataatagcatttttttgttaacatagaaaaaatcactatatttttggatggactaggatatataccaaaaagttagacggaggtagtacctgtaaccatccaatcaatcatccatttggagggagagaaagagaacgatggtccagtagtgttggctacagtgagctggctaatggccatgtcctgagtactctctcactcttgttaggtgctttgatcacaagagacattgtaacatgccaatataatccacagccacccctaccctgcagccctactacatgcaacaagatccaaattaaagagacaaagtgtgaaaatgttgtggcagtatgctggggcgggtcccacctgtcagctatgggacgcaaccatgagaggaaaaatcatgtcctctaaataactgctcacaagtcatgatcagaagaataatgacaactatgggctaacaactcaggacatggatattacagtactggcttgtcatgaaaaaagcatcaatcaattaatagaaatcgttatagcattaggggatggtctcctgttcctgcacaattaaggctgtcaacttctgatggtcgtgtcagatctttttaagctttggtgttaattagcatcttataccatgcgtgcacaagatcttgcagagtttccttttagctcttccgaacaatgaaggtttctcatgcaagcaagtaatgttactgatggggattttttttgttgtttcctacagtagttttcagctgcattgtcaagcaagagtactcctttctgttgcttctacctcgcacattcaatccgtattaacatctataaccaatctgttggtagttaacacagcagatgtactccatccttatcagaagaaccctcttatcacaatcaatgattttttttctttaacttggccatgttctttcaatatttatccttccagatttttctacagattatttgctccacgtttctaaaaatacaatttttcaaaaaaaaaaaactttcttctaccatattgctatctattctaagctatttgcaaactttttttaaaaaaataattaattgtgttaatcattgaacaatccgtgtcaataatctagggaaaggttgcatcaaaatagttgagcaaggccttttcttgacgcgacactttttccaattcctacgaaaattgaattgattcctaaaaaataccctgcagagtggaatttcctgttccataaacattataatcattggctgtgtgcgcccgcagaggccggaaatataagattttccattatcaaaaaaaaaacaaatacaatgcctgaacattatgcacaatatatcactattatatagtatatactaaagtcagcatcttgtacagcaatgcatgagcataaggtagcatagcaagcaaagccaaaacaggggttggaagaggaagacaacaaatacaatagcaagggtccaagaagctagcatccaagaagtacattttcctcttatctcccccctctccaaaaaaccagagagagcagccacgagaccggaaacttttgctgcggctggcttctcaagatgttgccaacatccttttataccctacctgccaaaaaaaaaatttctctgcaattgcatgcagatgcaaacaagcaagccctcccatggcattggcaatcatacattcataccagtacatgtttccattggttgagaggagaagagaacacacatgctgtaacaagaacacttcaaacctacggcgacaaatctctctgcctctctgtctgtctctgcctgtgaggggaaaaaaaaggaaaaagagaggaaaaaagagaaagaaacaacatatattttgctgcactgacacacaaagatgaaattgcagagcagaagcaaagaaggcatccagattacagacatgcatgcaggacaagagaaggataaaaagagaaatgtttgaaaaataaaagcattgcaaaaaaccgtttctatataccatttcaacattcagaacaaaaaaaaaaagaagaaatgagcaatcttttactgttttacacacagctctgttactacgtacttgcaatcttgcatcattgccatggcaatggcaatggcgatgcaactctctcgccaagaaagtgaaaggaggggaaaagagattaagaggaagaagctaagggattagtgctagtagattaacgagtggttaaatactgatgggtgtttgatggcaatggcggccatggatggatggatttggctagaccttgtagatgatgaggaagcatgggaggacggcgcggctgtcgaggaccaacagctcgccgttgcccatgtcgacggagtcgtaatccgaggcgtggcgggaatggccgtgctggtgctgcgcggaacggacgcggcagacgatgacgcggcacaccagcatcgccctgcggcccgggccggcaccggcgctggcgtgcgcggcgcc

SEQ ID NO: 7388 - DNA, 4019 bp, Oryza sativa
  unsure (1)..(4019): unsure at all n locations
acggccttgccgacgagctctcccccgaagaggtcatcgacctcgacgagattcggaggctgcagggactcagtgttgtgtccctggccgacgaggaggacgaggaggcgaacggcggcggtggcggggtggattacggcgacgacggggtgcccctcgacgacgacggcgaggtgttcgatgtggccgatgaggtcggcctcgagggggcgagggttcggtacccggccttccgcatgacgctggccgagctcctggacgagagcaagctcgtgcccgtggcggtgaccggcgaccaggatgtcgcgctcgccggggtgcagcgtgacgccagcctcgtcgcggcgggggacctctacgtgtgcgttggggaggaagggcttgctgggctcaccgaagctgacaagcgcggggcggtcgccgtcgtcgccgaccagaccgtcgacatcgagggcacccttgcttgccgcgcgctggtcatcgtcgatgacatcacggcagctctccgcatgctccccgcctgcctctacaggcggccttcgaaagacatggcggtgatcggtgtcgctggcacggatggggtcaccaccacggcgcacctcgtcagggcaatgtatgaagccatgggtgtgaggactggcatggtaggcgttctcggggcctatgcgtttggcaacaacaaactggacgcacaacctgatgcctctggtgaccccattgccgtgcagaggctgatggcgacgatgttgtacaatggcgctgaggcggctttgttggaggcaaccaccgatggtatgccgtcatctggtgtggacagcgagatagattatgacattgctgtgctgactaatgttaggcatgccggcgatgaggctggcatgacctacgaggagtacatgaacagcatggcctctctgttttctagaatggttgaccctgagcgccatcgtaaggtggtgaacattgatgatccaagtgctccattctttgctgcacagggagggcaagatgttcctgtggtgacatattcatttgagaacaagaaggctgatgtgcacactctgaagtatcagctttccctgtttgaaacggaggtcctggtacagacaccacatgggatcctcgagatttcgtcaggccttcttgggagggacaacatctataacatccttgcatctgtagcagttggtgttgctgtcggtgcaccactggaagacatagtgaagggcatcgaagaggtggatgcaattccaggccggtgtgagctaattgatgaggagcaagcatttggggtgatcgttgatcatgcaaggactccagagtctctttcgaggcttttggatggtgtaaaggaactgggcccacgtcgaattgtcacaggtattgtactttcgtccatagcttcattaagattgtgaatatgttggacatcttctctattttgttgtagtatancgcattgaagttcctgctatgatgtttgatgtagttattggatgttgtggtgagcgagaaagagggaagaggccagtgatgacaaaagttgcagctgagaaaagtgatgttgttatgtgacatccgacaacccagcaaatgaagatccatgtacggttctttctatttgattatgatatcatattgtgatgtaaatgcattgggggagctgaagttttacacaaattctgtgtcctatttcttagcagtggatatcctggatgatatgctggcgggagtagggtggaccatggaagaatacttgaagcatggcacaaatgattattacccaccactgccgaatggacataggatattcctacatgatattagaagagttgctgtacgagctgctgtcgcgatgggtgaacaaggagatgtagttgtaagttttctatgaagttcttattgtcaagtaaccttcttacaatcttactatatataaccctgtagattgatgaaacatgctacacttgagtcaccatgcatatactcctgtatagaaatgcttaatagaggctggacttaaaatttcaagaatgaagtagttcaagtacctaatcccattagatgaggaataaaaacttgcaaaataggctattgtgttgcaatctatctgtttttgggcaattctatctagtaataagctgctctagtttttgtatatttgcactctctttccattggaattgctagttaagagtgagttggtagcattgatcttctgagataacaggcttggtagttgaagtaattaattatatggttttagcattcaccatctgccccgctctccagttgggaagtaagggttggagaagggcaaatgctcattcttcaaaccaacatttaagatcaaagagacaggtggagcacttcttgttcatcatgctgacagttctgcttctccttcaggttatcactgggaaagggaatgatacttatcagattgaagtcgataaaaaggagttctttgatgatagggaagaatgccgagaagccttacaatatgttgatcaattgcatcgagctggaatagacacctcagaatttccatggaggtgtgtttccttttaaaccgctaattgttagggcttgttcactttctaatactttaggctttgcctttgttttaccaaaagaaatccagaaaattttccagacaatcaccaccttttcatctaatgcacactttgtgttttagtttagcataatttcttgtttttaagaaaaagtttggtataacttgctcagagttcttttatgaaaaagtttacttcaaaccagaccctctgttatactgattccgtcgctcgatttcttttgtttcatgtgaaaaccaccaaatcgcttattttgcttcgttgtgatttccacaggttacctgaaagccactgattctgatgtattcaatatagccgggcttcttctttgcttgctcaaggagcagcattttagattctccctttttgctatggtaggatgtacttcagaccagcgggtgctcaaggttgactacttgacccccagtactaactgctaacttctcagtgatactcagtaggtacaaaatatatgcaatgcagcttccccttaatttctgctgccattttctatgttctttagtctaagtttttcatgtcccatagtcacaatccagtaactcacacacaaatacgtacaatgaaatcctgattgtggaatatgtgccaaacatcattcaactaattctgattcatcagaatggaagattggcaggacataccgaggaaagcgaatacttgtatggataaactaaaggtgcaaaacgtcatgatcagaaccagaggccccattggcatttatcaatcaccatattatagtccagcaccaaaaggtcacctgggggatcaggcatttggatatgcaagatgccaaatcccttatcttattcttctcttacaacagccaaattcagagatcacataaattttaatatccacttgagcggtcagcacacaaagacattgaacttggctgtaactggatcctctacatgatttttaatataaacaggggcatctttttaatccaaagaaaaaggcagagagacatggtatgaatgattatgaaattgcccacgttttggtctgattctgaatttcctgataggattgcgacaagttcagaattccggaggaaagtcgcctccttcgtgtcccactttgtccatgtatatcactgttccccgtgttgctgctgctgcctggggcttcaattcctctctctctctcccctcccatggcgtcactgtcgccttctcctacgcgaattgagaggacagcttagctcgatggatccggcgacgcgggcggcggcggcggcggtggagaaggtgttcgtggcgctgccggctgagaaggggaagacgacgctgtcgtgggcgctcggacatttccgcggcagcggagccaagctcgtcgtcacgcatgtgcatgtgccgccgcagacgatccccgtcagtacgtgccctgcccccccccccc

SEQ ID NO: 7389 - DNA, 11958 bp, Oryza sativa
aacagcattagtccagaacacgaagagagacagagagagagagagagagcaccgtccagagagcgccctcggcgatggcgaacccggagccgaagaggaactcggaaacctcggcgacgagccccttctcgtacctcgaaccgtacccacgcagcacgtgcctggcaacggcgggatcgctgacgacgacgagatcccgcggccccgccgcgaggcggtagacggggccttcctcgcggaaccacttgaagagagggaggaagagcgcgccgccgaggaggtcccgcacgtcgtcgagcttggcggaggcgacggggatccccgagtcgtcgcccccgccgaggcgggttgccaccgagcgggagagcgccgtgagccagtcggggctcacccacgaggtggtgatgggcggctcgtctccccccgctccgcctccgcctccaccgccgctgctccttggcggccgcaggcggaggcggacgtggccacggcggagacgcggcgagaccaatggcggaggaggcgggcacaggaatggtacgcacgggacggcggcggcggcggcggcggccatcgcactggccgcccgcgagctagggattcgagatggattttggggaattggggtcgccggattggggggagagagagacgagacgagatgagcagttggcagttgggcgcggggatggatgggagggggaggaaggggatgaggtgggacccagctgtaagtggcggaagcagcacggcacaaagcgcgtgagttttgaatgctgcgactctcgtggtaggaagttcttgggccggtgggccgttacaggcttacagcaatcggttacataccaagaaggaaaaagtatacttaaggtccctcaactagtcatcgggataaaaaacgttctcgaaccacaaaaccagatatgcggggcccttaactatacagaacgggtcacccgagatccttcggggttttgaccccgattttagtctacgtgacgactgagtcagcatggaccccacatgtcagctggccacgtcatcaccctctctcctcctcaccctttctcctctctctctcactgtctcacactcttctcgtttgggtaggcagctggggaggatgtcggagggctgttgccttcaacggggctaggtgggacgagggcgtcggcggccggcgacgggcgacacgacggcggcggctggcaactggcgacgcaccgccgttgcagaggccgcaggagcggaggtgggccgccgtcgagggaggaggtaggcaagcaaggggggcggggaggccggcgatgacctcctcaccggctgcgagggggagcaaggcgtcggcggcaacgaggcggttcttagccgcggccagctcgacccgtagtctctcaagctcctcgccgagcggcatggagggacgacacggcggcggcaagccagtcgcatcgtcgggtttgatttccgacagcaaatttccctgcgcaaacatcagatcgggatggctgcggcgatcaggatgcatgattcggaagaaggtcactacagttttcactcaattttgtccaggtcgttcactcaattcggaatgaaattcattttcagtagcactggcacatgatttttcaaaaacatcaagttgtctcaactcttcggatcgaacaactgctttcttggatcaacatcaacaaaataggattataggagcgctggccgctgcacatgatttttttggttggatgcggcagatttggcaacgctgaggagctccgcggtgtgcaggaacgtgtcgccgcgagcgtcgtggtgtgcggagaaggagaacagcgggcagcgtgacgcggcggcgaggacgacgacgcccaagcccgctctttgcgcggagaaggagagctaccgtctgggcagagagctaccgtctagattttttttatgtttgcgtgtgatcaaggctagacaaagagctagatggtagctctctgcctagggcccaacctcagcgccaagaaaaatggtgttgagacttaagacctcggcgccaaatcaagtggcgccgagctctgtaacttaaccgtgtgcttgcggccgacccaacatcccttttgtgttggccgtcaacttggcgctgagcctacaaacgtcagtgccaggagtaatggcgctgaggtcctcaatgccaaggcaacgcccaacataggagctatgttgggcgggcaggcctcgcgcggctgttgacagaaaatacgaggcctgggagatctgcttaactccagtgcaggtccaaagctcgccttcggatgtatgagcgtgccatttgatttgatattgcaatcaacaagaaatagaacaaagaaaccacaattaatcctataaatgataaccgatcggctaggtgccgatgacacatcatttatttcaagccggtgtcatgtgtacatcgatcgacaaatatcaataagcaaaccagaactaaatctactcgatcggctgtagatattaatgatatataatccttatatcgatatatacttaaatcaaatgattgggatagatcggtcgccttgccgagacagtataaatcacttatatcgaaatatatattaatagtaggattatatacattcatagcatagccgatcaggtggatctagcatgtatctgctaatactccgatactactctatactaagattttaaagtaagtagaatatactaaacataagcttaatatacttagatgcgacaaaatcttaacataaagggcagatttaacatatagatcaagcatatagaataaaagtagttaaatcagataagatcggctgaaactctgatactaccctaatcagcaaccagaaagcaggctagagattgcaattttaagcacgacttaatagatcaaactcaactgatgcagcattaagtatgaaaagaaaaacaatatctggacaatcaagccactggaagtttcatagagtggtagatatatcacatagtctaagttaacatcattgtctaacctaatcggctgccttccattaacagatgttagccgattacagattagatgaagatattatcgaagattatgtgagatatatgataactcgacgaattatatagacaagattagagtgtcataaagatggaagcactaatcttgagaacataagtcgtcatgacaagctttacctcttgttgaagatcgaaaccgatgcagctcaacccgagagcacgaactcgtcgaaataaaagtaaagcataaagggtggcgatgcgccgagattgtattggatgtcttgttttttttacataggactcgggtctatttatacccgagaattacaagatacgttcataacagacacgactattatctctaacaaactctaagataccataagtatttacggcagacttttacccaaacatatctctaaggaaattaaatagaatatcctaattaatagatacaattgccttcccaggactctatccatgcatggcaatcatcttgaagcacatcaacttgaacccgatgacgtacaccgagtcatattatcagaatcggttgtatcggctaaccccgtccgacttgaactatgccgacctgaccttagccgatttggactgcagccgattcttactctatttccgcaacgatcttcatcttggattccacttcgatctgatctttacctccgatgccaatagtgatagaatttaccaaatttggttgttaacagcggctaagtccgaaacctcagcgccaatgtacatggcgctgaggtttgtaggctcagtgacaatctcaatggcgttgagatttgccggctcaacgcgtccttgcggccgaacacaggagcgatgttgagcggcaaggacgcgagcgtctaagtcccaaatctcagcgccaagcaagctggtgctgagcttagtggtttagcgccaatgagactggcgttgacatcctgccacgtaagcgtgaggattggtagggggatggttggcgctgaccccgtggcctatttttggttgaagtttttagcaagtactagttttgaaataagttttccccaaggaccaatttgtcaaaaactcccgaggaccaggtgccagttggagaagtcagatgacgagacttttccgatcctatccaacccatccgtcccgccccgttgctactccctccggtttgataatacttgtcattttggacaaggatacggtcttcaaaaaataattttgactattattttttattataatatgtataaaagtattaacaaatatatgattttattaaagtatttttaagactaatctatacatgtttgaaagataaatattttaaaaatgatttaaatcaaatattctaaaatttaatctcacccttatctaaaacgataagtattatcagcccggagatgggaagagcatttgttctccaacgattgtgctgaagagagactgatttgtacaagtgtgaatgccgcacgtgtgtctatgtaatggacttgagtaattagtcttaagcatccctaattcgtggacaagaaacttaaatcaagcgatccaagacgaagacagccgatcccgggacaggagggcatgtctgacacagcaactctctctctcacacacacaggacagtatggcacaccatgaccaccgatgacgcagccgcgagatcagtttggggagatgcagcgcagctagctaggagtagcgatgttcggtagcagaacagacagaaggcaaccgtgggcaaccaaccagcagagcccgcgtttgcggatgaccatccagctgcactgcatgtacgaccgattcgcgccgcggaattataaaccggatccgatcctagtccattcattcacaacacacgtgtgttcttgatcttggataggggtagtacctgggttcaaacaacgaaccagcgaaagcacaaaacaacgcagtgtcgatcgagccatatgagtggagttgggatcctatcctgtaaatgtacgtgcagtaagtcactgacatatgggtctaaaatttaggtgggacccacatgtcagtgacacataccacaggtacagtaatgtacaacagtggatttgcatccgagtgaccattttaattttaataaccacccaagatggatcggaccggttccatctcactttttttttaacctttaccgacctcatctcacctcagttgtatgactgtatctcctccattcgagtcatgttactgttcacagatccccacacgatgctgtagggcctctgcatttcgccaggcccgtcaataaaatatgagtgtcgtatgataaacacactctcttcctctcacgacagtagatactactactcctatatcctaccaatggatcaaaaggagacagaaaaaaacggacgcggaggaaaaaaacaaggagcagcacgcatggtcgttcgtactcccccaagctgttaattattcaaaatacttactgctaccaccaccagttcgtcccgtacctgtagtaacgaatagatcagtttaactgtcagacactcatgttcacccaaaggaatacaaggcggagtaggattctctcgccgatgcgtcgcggcgggagaggacacgtcggcactcggtcggcagcgggagagatcacgacaggacgacgagcgcggtgcgtggcgtggcctactggagtatactactgctccatctatcgtagggtgtgtttagttcaaaataaaattagaagtttggttgaattggaacggtgtgacggaaaaatggaaagtttatagctcctatcgtttagctttttccctgataagtcaaaatggtttattagggaacaaaaataaatttttagataaaaattttatatatgtgttcttgttaacttaaaagccaatgctgaaaaagaaactacgttgaaaatatcaaaatcaatctcaaaattaagtttgaaaatttaaattttatcttattatttggctgtttaggccatccgatgggagcatgtgtatagaaaaattttgatgtgatggaaaagttggaagtttgaaaaaaagttcgaaactaaccagaccctataagtacactccaatcttaagtacggttgtgggtctttttactaacgttcattttatttaaaattattttataataattatttttatttttattagatgataaaatataaatagtattttatatatgacttgttttttatttttaattatgttttaaaatgaaatggacgattaaacgtttaacataaacttggaatgagacggatgagtaatatactgcgagtttaggcgcacgggcggcgggggtgggcatccgatgcggtggggttgggggtggggggcaagcaaagactggggcaagtacagtggtgtggcgccgctccggaaattcgcttcgcttcgcggcgcggcggctgaggatcagcgtcagccggatgggaatcccaggcgtggaagcgcgatttttaatttgggcggcccccgaggcggtatccgatgatctccttgtcggctacccgcgtcaaacacactggtatagtgcggctaggtacccaacttttctgctgttttacacaacggtccttcctctatttgactatgcctacccgtatggtagcaacttatttcctcctattgtagtaattcttaacattttcaataatgatactgtctctaaaatatatctttaacaaattttctattattacagtactttgtaaaataaatttatatgttgttctagtacctttcaactatatatttttcaaagttatttatagtaaagttataaaattttaacctcaactttgggtgtgtttagttcacgtaaaaattggaagtttgattgaaattgaaacgatgtgacggaaaaattaaaagtttatgtgtgtaggaaaattttgatgtgtcagaaaagttgaaagtttgaagaaaaagttaggaactaaaccaggcctttgtataaaacatcaagaattatagatttggagggagtactccatatccgttttatattgtgaaaaattttgggtttcatgctgtgaaacacttcaaaatgttgatgcatttcttttattgaacttggacaagaccaaaataacttatataatatactagaatagagtgaaaactgtttctacgcaaacattattaggtaccaagatgtgtacaatgtggaaagctatggtatgtattaataattcatccatttcatatgtaattatcgcttttccgtgattatctttcatgcaactttttttgttattatgtggaaagttagctttaagggcctgttcactttgatgtcattttcaaccttaccaaatttcggtaaagttaccaaaaagagtggctacatttagtttgttgttaaattttggtaactatgtaagaaatcctgcccaaattttggtaaggtattttttttattaaagtgaacaggccttaaaagaaaaaaggcttgcttatatcttggaacaaatttatactccagcaaagtcaaatacacatggatcgacctagctagccttttcatactgtgcactcaaaaccatacctttagtgtggaggataacatagtatcccactacaattccactgctataaaacccctagtttattgaaataacaaaacaaagttctacaattagcaagccttaactagggaaggcaatgaaaacaaaaatcaaactacattagactaggtcaaaatgcacccacaaccacaacggttatgtgctcgagccagtatctcatactaccaatactacaccaacaccaacactacatactactactagcggcactgtacatacaaggggaataatacaagctaaaataaagctactccactcctagagaaggaggacctaaacgcaataaccaagtcaattaaacacggttggtacaaaaaggacacccgcccaatacaaaaacgccactacaaatgcaaccgcaaatgcacggccctttcccccaaaacccccactgcattcccccccaaacccacaaaccccgccgctggatcaacaccacctcaagctcgaagtgagccactgtcccaagcaaccttccttcttctccccacctcgttttctccaaatcgccattcacaacccatacacactctgtgcgcgtgtgtgtctctatgatgtcggcgtcgccggagttctacaagccggcgccggtgttctcgccgtgcagctcgccgctgcggctgctgcagcagcagcacggggaggatcatcaggaggagtacggctacggcagcagcggcggctgctgcaggacgccgacgggaggggagagcaacctgaaggcgccagggacgtgcccgccggcgccgaggaagccgcgcgcgcccgccgcgccgtgccggaagcggctgttcgaggtcgaggtgttaagcctccgcctcgaggagctcgagcgcctcttctggcgccctccgccgccgccgccgacgacgcagccgcagccgcagccgcagcagccgccgcagaagcgccggagggtggccaagctcggcagctagctagctcgccggagtagcacacgtgtgcgtggatggccataagtggtgttggttgggttagttactagagctaaagctagagtagttcggagttggtaggatttaggcgtactggcgtttttactgctgtacttgcactatatttctactgctcaaattatctccatggctagtatagctggttgtacactttgtactatacctgcctagctaaggttgctactactactactgtagcgtatcagtgcagtttatactagtatctgtgtatgtgatggcattgggggtgtgtactcctggtacgtattagcaatcaataggagcttagcttgaatttgcttccatgcatatatggcagttgcagtgcagcctgtgaagtaatgacaagttgtatgatccgtgtatacatccatcaatgtatcagtgaatcaatccttgcaacgaatacaatgagaagcagctcaatcctcatatgttctactattgcttccgtcctaaaatatagctacttcctattacatgttttctctactttgtgcaacagataggagtagttctcgaaagtatggagatactgatccatctgcgtagcaactggcaagaacgcaagatggatggattcagtttcagagtgagctgcacctcccaggcacagcacgcagctgggctgcaggaggtgcagggggagaggaatcattcaggaatgtgagacgagagcagaaggccaaagcatcgagtggtagtagcaagcagtaatgatgtgtgtcgctgctgtggctggctttgtagtagtagtagtaccgaaaatttttctgcaggcttggcacccggcaaggctgcagcaggggagcctgtgctggaggtacgagaaggaataattttggccaccggtgccagtaaatgtgaggacgtgtggtgttgggggtcttggttggggatccgagtccatctatcatcacaggagcatcgcaagcagcagctgtccatgtgttctggacttctggtgcgctcgcagatagagcagcgaggaatacggtgatggcgaaatgcatatgaacatcaggctaaagcatgaattgaaaaaaaaataatactgtcactccatatgcaaatgcaatcgtaattttacggtatgaatttattatagcatcattagttattattactacagtaggagtgaggtttaaagctgcagtgaatacggcaatttaagcatctatgacgcatctgtacactacagtcatttaagacatctggagcgagtttgcagggtagtacacactcctattgaaacagttgctccgttgcccctttgtttatgagttttgaggacatatgggacacgtagaaaaagattggtatttattgagccaatgctccatgtatggtgtacatacatactgttatttttgctgttgagtacttaccccagtaatatgatacaaagatcgacgcttcaatatacaccaagggtgaatcatggggttagcttcaaaatgagccgaaaggtgaaagaatcgacaagaaaaaaaagaaataataagaaaaggaaaaaaaataagggagcaaaacacaacagctctatatgcagctgaagaaaacaaaaacaattacagccgttttcgcctatggtcctgcctcaatcctctcgatggtttctaacctcgttttccgtttccatcctttcatagtcgcaaccaggttaaccaacccgacaacctgacttttgctgtattcctgtaagatcagacaacaaaaacataaatcattttgtagaagtatcattaccaaaagtgaaaatttactcaaaaaaatatatagattaacagggttcttactggatgagaccgtgcccaatgaacatactcggtctctggcaaataataagcctgtaaagagtaaaaggctttgtcaggttcttataaatgaaaaggccaaatgaagcatacaaaggcactcggtctctagcagatagtacgtggttggcatagcgggagtactccaagccaattactactgcagaagcgtggtgtaaatgaagccttgactggtgcatgcaacgtacctttatgaaagtatccacaatttgcagctttggcctaacatttgcggatacaatgtgcagcagcccattaattagtacctgaaggagcagagaaaatctttatgagtattcatccatgcctttcaatctagataagctactgggtaagaataaaaaagattacaacctgaaggtccagtgacatcaaagcccgtccttcatctgtgcaccgttttaccctagagagaccttcaactaaaacttctgcgatgctatctatgccatactccagcaagaggtcttggagctgggaagaaaatttacaagttcaatcacctttaacatcagtataacatcgatatataggctgtgtttagttcacactgaagtttggaagtttggttgaaattggtacgatgtgatagaaaagttgtgtgtgtatgaaatgtttgatgtgacggaaagttggaagtttggaaaaaaactttggaactaaacagggccatagtttgaaaaccgaagaactatcttaatgacgaagcagaatgaagtactccctccgtcccaaaaaaaactcaacctaagaggggtgacccctcctaggacaacgaatctagactaagggtaatccagattcattgtactaggggtcaaattccctcctaggttgaatttttttgggacggagggagtaggtccgaaaacattgtattgctcgccacataaagaacacaaacaaagcacattaaccaaaaagggaggagggggtgcccttggcttgtactaacctccttggaaattcctccatggtccaatctagttttgtagtgcttgaattcacccaataacaaatcaacatagctgtaataaaaggtgcaaacaacatcatcagtggcactccaggtcacaattaaaaaacaccactatcaaccataatcctttaactatgcaatttgtaatcagatccctaactatgatactaagaattaaacacattcaatgcagccctgaattattccaaatgcatgtacaagttacagattttttgatatatcacagcatggcgaattttgatatgttggcttcaaagtacaaggacctaatactccacccaatttttttagcacactgcgaaaggaaaggtgtggtttttcttttctgtaagagtaaattcaacaagacccaatatttccaaatgatcagtagtaacacatttccatagaatacctaccgatattgcactcataaaaaaatgatggagtacaacataaataacaaagaaaaaattgctagacatcaaatgaccacaaatcactattgaatcagtcaccaaagacatcaatataatgcat

SEQ ID NO: 7390 - DNA, 6593 bp, Oryza sativa
ctttgtatcggccactccgagcagcaccatcccggcctccagggggccggtctgaccgcgcatgtgccgccggtcagatcggccttatgcgccggtcagaccgccgttgtggcgccggtcagaccgccacaatgtggccggtctgaccgcccttggtcaggccgagcccagtgaaagggcaaatgattgtgtgtgtgtgatgaaaaagatagcaaagtgaaaatgcaatgacctaatgtggcaatttaatcatctctttgctaggtcattaccccccttgatagtacggcgaaactaacaaataaactagcaaatttgatcgccctacacctcgatcaattctaaattaaagcactagttttaccgtcttctttctctttgctttgcgccgtcaattttaatccattgataatcatccatgcgcacatatgacttggtcctaacttaaaatatatagctcaaagacaatagttaatccacaattagtgcttgtcattaattaccaaaattaacaatgggggcctagatgcttcacctttgccgctaccgctacaagagagcagatcgaagatagcgtgttcgaacttagaggctgttacaacgtttcaccactgcaatagcatctcgctatagcgcttcagtataaattataaatttttagttaaacttgatgtacaatgtaaatttatagttatttgaaaaaaatccgctattggaatttagtgcccgctatccgcaatccgctaactagacactaattcgctactaaccggctatatgctagtatttatcacaagatatttcaattttatttcaaatcagtacaagttaatattcaacacgtgaactggcatcacaattcgtaatacaaagtcaattattagatcctggatagtagacgtatagtcgaaaaccaagcagcaaagctacaaacgagttggatttgtcgacaaactcatgcacaccgacattggttaaaaagatttggaaatttggaaaataaattacacatgtaattattttagtattttcttgtctaccctacaacagtatcctacgttgaatttcataccaattgacttatggccagctggtaacgtaaacttcttcatgcaagtcatgtcactacctccaatagtatctacaatgccttgataagttgcaaaacttgccgtttgatcttccgttaacaagttagaaagtcaaatttgatgattcgtgtctctttgctactactacatgccatcccctgacaataacacgtaggatcctcgagtgaacgacatcaaaatcagaatgacagatcatcaaatctccgtagtgagtgacaaatcatcaaattgagacgattttcacgttaagacgaaaactagaccaagatcattattgagcgatataatatggaacttttccgaatatgaaacaatatttttacgagaaatagtctcttcagtagttttgtcgttgtaatcaagccgtgaatatatattccgcattcattcgtcctgtaacttttgtgataactgggtataacttctttgaaacaaaagtcggaataagtttcattatctaagaaaaatatatcgctataacttctttaaaatagaggccaagataagtttcattatctaaaaagaaattattagaattttgcttcaattcaaatttgcatggttagcaaatgccacaagcaaaacgaggctatcaactgcgcaaatgccacctatacccaagataaaaactctcctccgcctcctcgcattcccaaagcccaaacgcccgcaggaagctgcacccagagcgcgtcggcgtcgcgcacacagggcggccagagcatggccacggcgccgcgcgcgaggcgcctggccgccgccgacgtgcagccggccacgccggcggtcggcccagcgtccggcgggcggccccagttcaacctctcgtcgggcgcggccaccgccgtggtattcgtctccatcgtcctctgcttcatcctgctctgcacctactgccgctgcgccaggcagcgcgccatcgccggcgcgcgcagccgcgtcatgcgcgagatccgggagcgcgtcccgggcgtcctcctcctccgccccgccgccgccgccgccgcgctgcccgtcctcccctactccgccgccgccgccgccgcgggcgccaagaaggggccgctcgtcgaggactgccccgtctgcctcgaggccttcgccggcgacgacggcgtcaaggtcgtccccgcgtgcggccacgtgttccacgccgcctgcatcgaccagtggctcgccgtgcggaactcctgccccgtctgccgctgcgccgtcgtctgctactacgccgaccgcgcgagggacacggcggtggtggtcgacgacgacgacgacgaccaggaggtcgtcctggagcgcgtggttgcgatgatcgaggcgatacgagaagaacagagggaagaggaggcggcggcgaggcgcgcgccggcgagcgatggcgggggaggcgaggggttgatgacgtcatgatgacgcacgcatccctgggttgtgcaggtgcagctaacttcactaggtgagttcggtttgtagctttggtgtggcacactgacattagagagatagaagggattaaaattaccccatgtttttgcagcatttttgtgctggtttgtgtaaattcgttttgaaatatatccaaatgctccttataatcaaaattctgcagcaagaacaacttggctctttgatcaagaaatggttgcgaggcatcttgttatttcatttctctaaaacacgccttgcacgttgttaattccagcatggtaggttaagaggcaaaattagagggaagcatcagaaaaagggatcaaatttaaaacttcgttgtaatcaagctgggggaatataatcaaccaccaactttagctggagaaattataagtccagctaagtattattcccaagtacatcatcattaggatttgtctatatatatgacacaaatatgcagttagagacagcaaacctgaaattgagaaagaagtctcctcctctggtggcaaaagggggcaagaatcattgccttcttccccacctgcccctccagattataatataatcaaattgtcaagttaattggatagagggtttggtggttgattggattactacatttccataacatcacaagtccagttataggatttgccaatttgtcatttgcaaaatattcaagatggtggacagtgacagctccaatggaagcaaacccaatttctgggctgccctctctccccctcgtggcagctggctctaggattggtggtcatcctccagggtatgtttacctgagcacctccgcagcggcttcgactccttggtactcctagtctcctggcagctgtggaaggaacggaactccaggattttcaactccgcgctcgctttgatcgcagtggttctggagtccatccgctcggagggccagctgtggtctttagccggcgttactttttttgggatttcttgggagtgtagcgtggctctgccccgtcccgctatttggagttgcgtttttaaccgtcgtagtagttcctagcttcaagttccccaccccctttaggcataagccagtctggctgattgctttgtgcaacaaaaactcttttcctgataatatattgacgtgcaattcttttgcgcgttcgcaaaaaaaaggaagcaaacccaatttgagccatcttatttcatctttcgtcacttacacgaccgattcatcttcagtttcatgtatttcctgtctccgtcaaaaatgatttgtgtattataaccaccatctgttaaacgtcaagcttttgcaagatcaatgctagaggctccactatttcattgcaaaatgtagcagtgggcaaagtatcaaggcttttatcatctgattattggcttatcagctgtagccaaaattcaaattttgaaacataattttagagtaagttttacccacaaattgtttcggttgcttaaatgagcctacctacagcctggaggctggagtttagcgtactaggcacgatgacacgacctaccaacaaaccaccgttccctaccttgctcgtcatgttgctgttcaatgttgatatgcaaaaggaggcaaaacatccatgtgcatttaaggtccatacaaccgttaaatgtcatcaaatgtatattgaaattgaggcagactttcagaattctaaccaacaaactcaatttgtgttcattactgctacatatttgcacgaatgacaaattcccacatcctttgtacttcaaatggatcaggcaccacatggtcagccgttgacaggagcaggaatgcacaatgccaagaagggccaggcgacaacgatcgccgtcacggccatcactgacaaaattgagaaatagtactagtactagcataataaaccaaagacaaaagacaatccttttctcccagcacggtcgatattttctgcaagcaaaccaggtgacatccagtccaggcaaatacagagcattcgattccttctgcagattgcgatgttctcaacatggcaacatccacaactgtcgttgtttggcatcacaaatgatgataacaataataaaaatcgtagtttgggctatacaatgattgaactgctttgtctaaaattaccatgagaggtagaattcttgcaggaactagatattatatgtaaacttcatgctatattcatgtaaaattcctgcgtttaaacaacggtttagaaaaaacccaggcgcacatgagactgattattcatgctctccaataacggatgaaccatgctttacttgagcacaagaacaagaaaattggtagcttttattcagtcgctatatccttggccaaaagatcagtaattgctggaacaaagaatcgagtgtgtatatatacgtgaaaaaaacaatagcctacaaagtgtagagggagatgaactatatgctacctacttcttacacataattcacccaaaaaaaagctacacttatcaacaattaggatattaggttggacctgcataaaggccagggtgattccagtggtcatatgaaccaataattttactctaacttacagtgattggtcaaaaatgagttatttcttaaccttgcagtgagaatctccactgttcaccaaggcctcagccaaatttacagtcctctactctttggggtagagcctttagtacagtcaggggacatcatttagttctgcacttgcttgcaattattcagcttcttgcaatttgtagccgccaaattgatttcattcttcctgaaaattacacaaccgtgttgttaaatggacagggtcacataatactgtcttgcagtactcacctatttgggtggataagtacagaattaacagtgtttcctgcatggacaagggatttccttaccaccagcattcatgatattgttgagctgattaatggtgtaaatctatggctacgaattatttgagaaaatctactagctttccaaggtcaacataataatatgggatgaatcactaaattatgggtccatatattcatagtgctatgctacaagagtaatttgtaggggtaacttcctcatgtacagacatacagttcatgaataagttgtaagccggcctgcaaatcctgataatgacttggctcattttaggtgatgcataatacatttttgcaaaattatgtttaaattgtatcaacactgtatcatgcacccacattgatgctatccttcaaatactgcatctgctgagatatgtttgatagcacaatataaggtacatgttaaatggtggaaaatattcatcagtcataaacttacattgaacattcatgttaatgctatctttccaaattgtaattgcacatattcagatttctgagaagtgagaagctacaaaatacatggagtacctgtactgtgagggccttaccattatggcacccaccgattccctatctcactaaaaccaccgcccctttttgcattcgctgttctgagctccattactaattcttcacgctgcgcctctacttctgcatactgcaagctcacgttgagtaaccgttcttgcatatctttcagctctgactctagttgtgatatcttggcatcatcattctctttgacatccttactagcagatttcccctctggcattggactgtagatgataaagaaaaagagaaaatgatcctttggaaggtcgcaatatcactaatcgggtcattgaaacattttggtgagatattatttagatatagaagaaaatctcacaggctctgcatcaaaagatgcacaaagccataatcttattaaatcaagtctgtgcatagcagattgaaaacaagattacaacaaacaagagtttctgtaaaagattgaagcagctctcagcttattacgaaatctccatctgttgttcttaagaatcaattaaaataattcattttggtgagctataagaatttgttactaggggtagaacaatacaggagtaattaggcattagaattagtcccccaaaaagatcttcacggattggat

SEQ ID NO: 7391 - DNA, 3073 bp, Oryza sativa
aggtggtctcgtcagtagaatgtcccataaatgataggtagcatatatcttacacaagtttagatgatcagaaatggtcaacataagtaaacttgaactggggggatccaactatttatggaatagaccagtactaatttcagcagcagacccaaacataccacaatctttctcagaaaaagtacataaaacataaaaaaacaattaagttcacaacttcagacaataaccttgaaacctatcaaacattcaaactcagatgagcaattttaggaaataatcccccttatagtatttaagcacagaaatccataagttatgtacttttttctgacagcgaaataatccataaaattcaaaaccactgacagttatatttagacaatcagtggaaccaagataagtgctagtacatacctatttctctgcgtattatttccaacctcctgtaattattttccaattagaaaatggataaaataaactatcaagaaattggtatattaactgatcaaatccaatacctcttccaacatttctttcaggacataatgagtctgagagagtacttcttgcaaaaagaaactctgcatcttttcagccatgccaccgatgtcacccatcagcgcataggcatcaataacctattgtccacgtgtaaacatataaagaatggaacttgtaaattagcaaagcaaatagataactaagacttccctaacaactaagccaatcaagggctcacgaggaaaaacaacaatggaaatactcacagttagatagctttcctcatggaaggtctgacaaacccctagtaaatgggtgtctaatttttggattgttcgtgccaaccatgcctgaggatgtattcatagtataaacaccatcaaaaggacaaacattatacagctatttgttcaatttgatggtggacaagtttcttttgctctttgaacataccaaaagaaagctttgagatgaagataggttcaatgcattctacacttgacatagaagcaagcaataaatgcaataaaataataacaattacctcaatcccacgccccatttcttgtacagaagaaaggcctgaatagttctccaagatttgcaaatattcaggcaataattgaaacgcctgcaaacatcagcaacatggcataagaaaactaccataaatataagaaggcataggtgattaacagcataagaaacaactactgtggtagttcagactgtggagcaaccaacatactacaacaggtcaggtgatttatggggttgaaaactactggagtaaaataaagcagtagctaatatcaccctagagtaaaagagatggattcatgaaacagatagagaaaacagcagtcatggataaaattcagctcacctgaaaatagttttctttctccacaaaactttcaagttccatctgcatgtcttgtgcattacgaagttctgtaagaattggaagaacatcctgcgatacagaaactaaatcttttatttataatcttcaattcgtgtagctaatggtagcgattacttaaatattatatgcacatgaatttatcaacacaattaataatccatccttgaaagacattgaaaaaagaagggttggaccagaaacatataaacacattaagaatattgcttcacagtagaatggtagttcagtgattgacatgtaaagtctggcgccaatcaccattcactaagattatccagtcgatgccgcaaacaataatgagacaagagaatttatttaccagcaaagcttgtttcttctttgattttacattgacaaccagatccctcgatacctcattctttgaagaggatacatgcctccgtccattctgtaatattgattaataaatcgtaaatgcaaaaatataaaaggaacagaacaatgtttgtaaataccatccagaagtttcatgagataataccatgcagatcacatttgcaacctttaaatcttgttctaactccatcactaactgcatccccttcactggccaaaacttattatcagtgatctgggatttccttaaaaggaaatcagtatagatgcatttttggtagcataacacagaacatgttattttaggaaaattgagaaaaatacttataacaggtatgtctgaaaactagaaataaaaggcatgtgattaaaatatatctaatatgacacagcaaagtaaggaaccaaaaactgaacctcttctatattctgatgggagacatacccatttcttcatgatgacccataacatgatgtgatagtcgttctgcaattttgtcgagctgcgctaatctcaaagtagactgcacagaaaaaaaggaagacgtcaattttgctacaaaagcacacactcatgtgcatggatgggcccttttgttggaacatatgttcattggcaagaacattgctcgaacacgacaagaagtactcggtttcttctacaaagggcatgcgtgttgtttgttgaaagaaatgcttccagctatcattaacaaagctgtatgcaagtaagcatgcaaactccactcactctttatcatacccaccagcactaatgtctcagacatgaaaaaacatgtgaaggtaaaccgctgcactaacctgcttatcgaaatagctggaatcaccctctgcagggatactttgcagaatgtactttattgggtcgaactcctgcagacaattcaaaacacatcaagcccaactggctgaaagccgcgggaaaccacagctgcggaaatacaacacatacctcctgaaagaacacctcctcgagctcatccacggcatgcccctgcgggttgctcccgtagatggagaccaagtcctccgaattcgaaggcaggctgatcttctcgtgcggtggcagcccagcgatcgcacgtgcggccgccgctgccgccgcagctctagctggaacctagaccggcgaattacaaaaatgagcaacctctatcggatccaacacagggtacaccgagtgagagattgacgaaggtggaggagggaggaagtgattagggacctcggggcggaggg

SEQ ID NO: 7392 - DNA, 14578 bp, Oryza sativa
gaccgccggccggattttttttcttttttttttgagatgtgaatatgtgatgcatttttgtgtgagatgtgaatctgtgatgaattttttagaaccctgtgatgtaatttttttaagagtttgtgatgtgtttggagatgatttgtttgaggatttgaggatttggagatgttctgtgatatgtgatgatttggatatgggaggggatggtgtgaaatcaatattcaatattaaaaacagaaaaaaaaaagaaaaaatatctttagtcccggttggtgttgccccatatttagtagatcgatttttagtcccggttatttgaaccgggactaaagatagtgatctttagtcccggattcgtagtcccggttggaaaaccgggactacaggggggttacgaaccgggattaaaaagcacttctccaccagtgacagtatgcacgcatgttgtaaaggatgttccataggggatgtttggttgctagttacaatttatcacgtgcacgattagataagtttgataaacttgatagttgttcgtttgtagctgcagttgtaacaagatttttttcccaatactagcaaaatacccataattcactatgggtaaaagaaaatatattataatatatcatacacaaaatatattttttatcagatatgttagcatcacttgtttgcttatttaaatatatggtattcacttatttgaaacaaatattagagtattccataaaattaatgaatatcataagctaatttataaaaactatgaaagaagtggtgggttttggtagtggcaaattcaccgccgccaccactagtgccttaaaggataatagaaattgggtctcatacatcaataactcttcaagagtaaagtgtacaggcgatccttaaacttgtagaggtgtgtcatctagatccctaaactctcaaaatgcatatccaaatcctagaacttgtcatagtgtgtcatctaggtctcaaatcgccacaaccccttcagaatcctacgtggcgctggtgtggcatgccacatggacatgacgtggcataatgttgattgacaaatgggacccatttaacttttttcctttttcttttttcttctctttttttccctttcttcttctttctctgtgacccgagcagaagaaaggaaaaaaagaagaatgagaagaaaatgaaaaagaaaaagaaaaagaaaagaagaagaaaaaagaaaatgacacgtcatatccatgtggtataccacatcagtaccacttaggattctagaggggatatgccgatttgggacatagatgatacgctttgacaagttctaggacctagatatgcattttgagagtttagggacctatatgacacagccctataaatttaaggactgccaatgcactttactcctcaaaaaaagtacaacaagatttccttagatttgctatggtgtagtaaaaaatttgacagtctcaacttaaataaacgtggtaatttttattggtaagtggtggtgaagtgggtgagaaactatcttctgttcctcatttggaacggaggattcctagaaattttggaagaaataaactagttcatgtgaaaatcctataaattactgtatttcaaagaacccttaattgactgtagcggccaatgtagaaacacaaataatgatagatgaacccagacttatcaaatatataaagttgtagctttttatcaaatcgtatattattattgcaattagttaaaatattagttaaaattgtagcaaaattgatagttttgataaaataatcgtagattttttaaataaaccatatacgcatttgttcgaccgatgtaagactaaaacgacagaatgacgcaatatgtgaagcgtgagatggcagtatgacttggtcctgtatatatagtcattgacatcacacacacattacggtcatcctataattaatcggacgtgttggtcgtgtgtataatattttccttttgaaatttactctttaaaatatagaataatctaggttggcataagcccattaattaaacagtgtattttctgaacaatgtgatcgatgcgatgcacagtccagccagcgtgcacgagagcagtctagcacacgaaagcttctcaaacatattccttcagtgcggagagcgaagtcgaatccctcccgccagaatcaaagcacaaaccgaaagcaaaagaagagcacgacttttcccgccaaaaaaaaaagaagccaacgacgcggcctctctagtagagtagtagtctctacaaagcagagcatgcagtagtagccgtcatagcatcgatcgccagttcgccacagcacaatgccgacgaggaggcgagggatcgcggagggggggcacgccacccgggcggccgtggtccggtgcatcgtcgccgcgatactcgccgccatcgtcgtcgccggcctcgtcgcgctcgtgttctggctcgtcgtccgccccaagcccatcgagtacaccgtcaccagcgccgccgtgcgccacctcaacgtcacgccgcgcgaccgcggcccgggctgcagcgcccccaccgtcaacgccaccttctacctcaacgtcacgccgcgcgaccgccgcccgggctgcagcggccccaccgtcaacgccaccttctacctcgccctcgccatcgacaaccccaaccgccgcgtctccatgcgctacgaagacagcgtcgcgctccgcgtgctctacggcggctccgagctggagctcgccgccggctacgtcgtgccggggttccaccagccccaccgcaacgagacgacgctgccggtgcgcgccgtggcgcgctcggcgccgttcccggtcccggtcacggacctggtcgcctgggagctggagcacgacctcgccgccggcgagctgagcgtggacgttgaggtgaccacgggcgtccggttcatagtcggcggcgtcgcctccaggtactaccaagtcaatgtgacctgctcgccggtgaacatcggcttgtcgccgtcggcggcgcggtccttcaacagcgtgccgtgcgacgtcgagatctcgtgaggcaaccaaatgcatgcatgtttccgtgtccgaccaaagtgatcgtttagtttggattggatttgtttatattttacagcacacgatctactatacttttgatacgtactacctccgttccaggttataagactttctaatattatccacattcatatatatgttaatgaatctaggcatatatatgtgggtaatgctaaaaagtcttataatatgaaacggatgaagtatttgcgaggttgtaaatttagctctagttggagtggccttcttttcttcatcatctcttttaggggattatttatttatttattacgcgatatgccattatattgtgctgtgattttacatgtttgacacatataacctctatttttttttcatatatgacacaattgatttttttctcgaactttgatcaataatatttatttatttagttgcgtacgggttccaatactaacattgcctagagatgccatagcttttctttttaagattgcctaaagttagatagtcaaatttgataccacacttttgctagcaaactacaatcttttttttagacaatgaggtgcggatttaagacgttgaaaagaaaatattgtcataaatgtgacaataaatcaaacgtatggataacttagtcaaaactacgtaagttaagatacgtcaaagtgtaaccatataccacatgtaaattggaaaagggtatgactagatcttttatcgaaagtattttaaacatatttaatatgtttgtccatttgtacaaaaacttttagaaaaatacgaatagttaaataaattagaaaaattcaagtacattgtgtattaaaaaaaaggaggtggtatatatactgtcatgctcgtttgctgagagtggcgctcccatttgggagagttgatcctcctattcaatgccttatcccaaaaaatggcattttttacatatatttattcagatcaaactcatctccttttgtttttgcttctactatattgaaggtattgcgccttttttttttgtcaatttgttctggacttctagctagccattgtccttggtcagctgaccttacagctacatatattctttgagtgtggctttcatttcctaattcctcaagtgaacagaatatatagagtaatagctagtagctctttctaatcctttccactttattaccttattacctttgtctttttggtctttttcattgaacacagtgaccaccatgctagctagctcgtcagtgggggcaaaaacaagtagcctctcttcttcatccagaatgtcctgcaggtagccgttgattcagggagacatttgatgtaatgccactaactaattattaccacaataaattatcattgcttgagtatcgtaattaacttctactttggacatgtggacacagcaaaacgtacatagatactctgtctgctgaactacgtacacagatggaagcttctagtatgcgatcatgctaattaatcaactgatcactttgctttgtgtgaagaagggagagtccatcagattatgcaaactgatgaactgatgtaataatcttcctcgaccacatgatacatggtccgtttgacattttgcagctagcattgtgatgaatatcatctctgaatcttcaatgggttcttacgcacacggcactgatgcagagttaacataactagctagctagttccatcatgctggagagtgtgtcagcactaacgtttccttctctgaccggctttctttctttcttctctgtcaactaatttctctcttgcaagataggattatatcgcgccgtcagttcagatttcagaggtcagtctatcttccattatgcttccaagagactcgaatttctttctcgcaagttgaaaatgaaataaagggcgacaagttgtcctgaagttagaataatggtcacggcctatatgaagtctagtggtatatcggtgaagtctgaactctgaagactttcagaagctacaggtaatgatgcacatggagcctgaagatgttggaatgtggcctggatagatgatggcaatcgtaactttgtttggattacgcgatgtgtgggttgagatgacagtaaagtagtgcgatgcggtgtggtgcgtttcagtgcccattcgttcagtttgaaatgatgagatgaactgacgaccatagagaaacatgaaggcgttatgcttgctttcagtctccactatgcgtttttggcaaaaggagagtttttgattctatacaccgatacgttgttcaatgtgctaaattaatctttataattatgcatttgtggagcgaattcttctgaagtagtgaatgagacgactctcctctccacacattgtgcacatacctttggatgtttgcttgtattgctaatataaattctgggacattctcagatcagtgcagctttctgaggagcctgactcgctgacatagagatgggagtcctcagcggagtattctctctgtcaggggagttctcagatcagtgtcttgttcttgggaagaattcgcttctagcacaagccaatttgaaagtctttgatgtctcctaggtgccgctactttctatggttggtcgctctgaataggtgctggatggcagaccatcttcggagccacggcctgtcgcaccctgattgttgtgttctctatgatcaatgcgagaagactatcgatcatcttttggtcgcatgtgcagagtctcatcagctgtggtggattgctcttagagcgattgggcattcagactgcttgctgatcaatgaatcctcctttcacctgtggctttgcgacagccggagaaagatgatcaaggaactccatcaggggttcgataccattgcaaccttggtagcgtggacagtttggaagaaaataaacaatagagtctttaatcagcagagcagaacttgggcggaggttgtaagggccatggcaggcgaatcagaactctggcgtttggccaaagcagtaattcctccattgatagttccaacggatggagcggggtcgccaaatttatctagagaataggcttttgatctttggttttctttatgtactctacctccctgttgttttcttttttcggtctgctttgtacataaactttattccttcttaataaaatggcacgctccttacgtattccaaaaattaaattgctaatataaattcagtctacatttcacacggaacaaaatctgtcccttaattaaaagattgcctccatttcttcaggtcagatgatgcaatctttagatgtgattttaaagttcggtttgaatcaaaatctccatgatctctcctagtatatctacctacagctacttcctcaagagtcaagccacgaccagagatcgtgcatacgttgatagctatatctgacagggttgaatctaagaggatatagatatagatgaaggtcgaacaggtggagatggaggtgttatcgcaggattggccgattgggttactgatggatgtgacggcgagcacagcccggcccggccgggtcgccgtcgccggtcgtcacaggtggttcaattctcccctgtcgcctactctctccgtgtaaaaaaaaaaaaaagacaaaccccttccgtgttcaacatttgaccgtccctcttatttaaaaaaatataaaaaagtaaaaagacaagtcacgcataaagtattaatcatgttttatcatctaataataatgaaaatactaattataaaaaaactcatataagacggacagtcaaacgttggacacaaaaatttagggtttgtttttttttttttatagaatggagggagtacgaggcgaggctacggatgatgacgcagcgcgcgtggcgcagtgggagcgattgcggcggtcacccggtgcgccccaacgcccgacactcggcgcgtcgctgagatagtatgatcttggcgtgtcatcgccggggatctgccctacctagctcgctttgccgatatggcaagtgtgggatgtaactaataactacccaattgtttcctagctagcagaagttactggctaaatgcagataatgtttttgtgttttggttacttctagatgtaagatatttttgtctgataaagtagtacatgttctcttattttcactgtttgtcctaataaaatataaaacgtgttttttttacacagtgcagggagtaaataaagcacaacatatcgagttatttgattgtttttctggcccatccgtctccagaaaaaaaaatcccattttataagaaagacaactcgtccacgtatatataatccattaagtgataaaataaacctgacctctgcatcaactaaacatatattcaaaggaaaaagaaagggaagaaacataagataatatgaatgtatcacgccctgaaacaacgccttcaataaggatccaaagtttgttcgctgatattgttcgaacctaccagaacaattggtattgaatttttatctagtgacatatctagaataacggcttcaacaaataattgacaaacgcttacattgtcaaagctagatatataaaccagataagggattgatcacctcgaagattcttgccaatggatcacgatgcaacctaccgcaaaatactccctccatcctaaatatttaacgccgttgatttttttaaacatgtttgaccattcgtcttattcaaaaaatttaagtaattattaatttttttctatcatttgattaattgttatatatacttttatgtatacatatagttttacatatttcacaaaagtttttgaataagacgaatggtcaaacatatttaaaaaagttaatgacgtcaaacatttagagaagaaggaagtatatagcaattggtcacaacatatgcccatcgtcttctgcccaccaaaatataaccagagaaggaccacacttgtgatcagtcacaattgccaagccaccttgaaccatcctcgaccgatcttctcgatcgcaacgaatgtcatcccccgtgtgactaccttcgaatgattgtcattagcttatagtaggattggagttgagtcatccatctagagaggcaccatcccttcactaacctgtcacaattggatatatgcatgaggcatgtcgttaataactactcatccctttcatattataagtctgtcagagttatgaataccacatatcaaatagtagttgactaaatttcggcaggacccaccacatatcatatcttatatgaaaacaaccttcggatatagaaggagttccacataaggaaagataaatagagttctacatggaaacgacaaggattactcagattgtatccatattggtttccctagttctacttggaaaagggaacacatatgggtataaatacaagaccctctaggaggagagggggacggaacaatagatcaagacacgaaacaataaatcaacatacaagccaacatatgccaagacaagacgccggatatcgacttcagagataagcatggctagtcccctacggtgtctatggatattgataggagagacatagtgttgtctttgatcttgccggatgcggattcgaggaggaaggctaccctgttgtcgactacgagtcagcacttcagaccgccaagtcgacaacaattaaataggctaccccaaatattgtgctggcgtgattatgatgaataagagcaacgaccggcctcggccaacaggagtagggttattacctgacaattcaggggtccgaacctatataaaaatcctcatccccatattttttattacaatctcgcatatatcctagtaccaacgatccccatactatgcaaataccggaatcgcgacatcaaacgtcgacagtggcgcgccaggtagaaaaataacaacacttataacaccaaattagtctcattacatctaacattgaacatattttgacagttttcttattatgtgataaaaatattactatgtttttctataaatttagtcaaacctaatgaaatttgaacaatattgtagattgtttgaagtagggagcagatcatagcggctaggctaaaaaatgcctttctttcaacaaactagatccactaacgtcaagtaggtgtagaaaaaaaaaggccatatcacgaataatgcctgatgcatgttatttaaaacgggaatgctagaggacgggatatcatcccccaacggaatagctcttctccagaacgcgattcttatccatacactcactcgccgccgtcgccgtcccccgccgctgccgcgcccgtcccctgtcgccttcgcagccgctgccaccgccaccgccgctgtgcccgtcccccgtcgacgccgccaccgccgccgcgcccatcccccaccgccgcggcgtccgtcccccatcgacgccgccgctgccgccgtgcccatcccctatcgccgccgcacccgtcccccgctaccgccgccgtcgccgcgcccgtcctctgccgccgttgtcgccatcctcgtttgcagggggcgaccgcgcgtgtcggggtgctcctcccccaacgggatgcccagctatatccagtaggaatcacctgatacctggtaggtatcatccgttaccttgcaagtatcatgtgatacatggtagaaatcatctgatacctcgcgagtatcacgcgatacgtggtagaaatcgtctgataaatgacaggtatacctcgtgagtatcacgtgatacgtggttgaaatcatctgatacctaacaggtttcacatgatatcgagatcatcttgttgtgtagaatcgtctgatacctgataggtatcacacctgatacctactcgagatcaacccgttcgaaaacgggattccgttatatagcagccccctatttaaaaaggagagaattatgcacacaaatgtaaaacgaattgtgtttagagtcaacgggagtgattataacctttgctcattttcttttggctaagtagtaggacctgtaaaaagtactcgtaacaaaagctgtaacgcgtgtcacctagcgttgggtagaaagttgcaaacttgcaaatgcactgagacgttgtcgatgagcaaaggatccgaatattcgatcactgcgcgatatgtgtaaagagccaaagatcaaattaagagtagcacttcatagttcaggtaatggaatccaagtcctttcctaaagtttctcattgcaatttgaaaagcagaggagtggcaaatgcagtggtagtagtacatgccaaataaactggataaggcaatatcgccgaagtgaacaaacacaaacaaaactaactaccaaaaaaaatcaaaataaaaaaaacaaatgttaatattggaggagagagagaggggggaaaatactgcccaaaaatggggaagcgaaaacgaggagttcgcggctcatttgctaaaaaaagatgccaacatcctcaccgcctcctacgatttcctcgcctcggcgccccaattcaatcctcggctccgcctcgtctccgcattcgcagcttggcggccatgaatcgatgatccgcaccgcaccgcgccgccgcgcgcgcggaggagggcgatccgggcggccccgctttggggacggggggtgattcggtgtccgtttgggcgcgaataggtttggggaattgagagagggagggcgagatgtcgacggagctcgatcgtcgcggctcatcggatcggctccgcgagcgggtcaagttcaggttctccggcttccgcgccgttcaggtcaaatgtttttttctcttttcttttttttccgcattgagcagcgctgcattgttgagcgattcgtaggagatcagtctatccggggaatagcgatgaatgtacgaccctatgtcgtggtctgttgcgagattgagcattttactatcgataatggtcaattgttgtgtgaaatttactagaaaaaaatcaatgttgtgactggtgctaatgcgttgaacagttttattacaacacgcattgcttgtaagtaaaagaaatgtatatggaatactttccctccttagccatgctgttttgttttgattcggcaagagaatgcgacgatatttgttttagatgaaaggtcagtgtaatgatgatcgtggaaagttgggatggacctttaatctgattatgcatcatggggtgttctcaagaaaatatgtatcgcgaggttgtgggaggttaaattagtacgatgtgggaggcaagttactttatgagcattttttgcaggctccaaatatgtaaggtcatctttggtaagtggtgacaattcttttctcaaatatgatattcctaatgtaactatgatagtttgaatagaaaagggacatccaggtttcaacatttctgctaagttcatgtaactatttttctagtagcaatttcatcgagtgtgacttggtgtgcacaacaatgagtgtacttgagtaccggtgcaaaatggaagacatatgtttctttcccgatgacatttcttattcccgatttgtcagcaggttccagtagtatcagacaggctgatgctttcaatagttgcagtggacactggaaaaacaattgccaagtccactaaagccgctgcacttagtggagcctgtcaatggcctgattccatcctggaatcaatttggttttcccaagatcaagtgtctgaagaatttcaggagtgtcagtgcaggtttgttgtttccatggtatggctattgttcgcatgaacttgccttcccgatttgcatttatgcactgtactgttgttttactaataacaaatcttatgttatagggatcaacaaacagtggtatcctcggggaagttttcctaaatctgactaactatcttagttcattagaatctactgctatctctttgccactgaagagatgcgattctggaacaattctacaggtagattttagttaaccatacttgttttcttctagatatttctaattacatctttccccatatgattattttgttttattcctagtagtaacataatgccagctcatttggattttcccaaaagagaagtttttcacatgatcctctctttcagatatgctttttagtccatctaactgtaattcaaactaaaccatgtgaagttccctacagttgatagttctctaataaagctcctttcatgttctgtacttctgtttgttgacctagcatataagctatttggttgttggattttcaaaaatgggactgctattgggcagtcgtgtatgtgttgtacatacctgtgagttttcttcttttgtttctaacaagaaagttgcaatgcaaaacattttggcttttgagatgctcacttcatgtgctagctgactggtatgaaccacctattgttatatgagatgccacaagttctactgccatcggggtgctgggtttgagggactttctaatggcagcttatatactatatttcgtttcttgcttgaatcacccacccacaaccaaccccccaaaaggtggttgacaagtaattttccccatgtgtaccacttatgatgatctccaatgtttctcatgtgcagcttaacattcaatgtcttggagcaaagtctaaaacaaggtaactgaatctcttttatattcttttaggggatgttagtaatgccttttattactccagttgattcagcaaacatctgtatcttaggtctttagtggtcactaagttgatagccttaactgtcactatttcttgtttattgacagctcataaaacttgtttttctgtttcatcttggcattatatggcaatgtgaaataatggaatgaactatctcctcgttttgatgattgtagtcgaaccaatgatgatacagagtgcacatcagatggctttgacagcatgctgaataggactactcattctttgtcaggaaatgacttaggtggttcttatcaagatgaagctggaaatagggtataattcccttactcaaaactcattaatgccaattctttttaagcaatattatgttgggggacaactaaagcttacatgttttgtgtgagttagtccagatatactagaaactagaagagccacaaaatgtagtgataatgtttggatgagactctacatagcacagattgcaggagctcccggtgtggtgctcaacagcccgcatttgattctctccaaagtccaaactaagtctttatacaccaaatcaatacccttcttaaaaaagccatcgacactaagtccctccttaatgtcccactttttatacactgtttagatgccctaaaaatatattatttttttgcttgaacagtcatatccattgatgagcagcaggtttgaccaaaatagtttttttttataagctgaaaataagagctagtcttgttatagctaatatgctgctctttatctgtcccatcttcgaatgcggatagaaaggatctattacaaaatttgcatccataatcttcttacatcttacattttcaaagcacactttcattagacttagtgatagcttcgattgtcagctatcttgttattggatttcagtgcctgcctgccgctatgctttccatattatctttataatgtaactacttccgtatgttcaaaagagcctattgtgttttgtactcttctttcttacgtactatgtgtaaatggctaaatgtggactgcatacatgatttcaggatgcaagtttgtcagcatcaaggtcttattctggagatagtaccactgatagaacaaacatgcctcctagtgacaacttgaatgatgaattgaatacgcagaggcataattttgctagtccagatgccatccatgttagtgcagatcatgttgacgaggccagtagatcaaacaattcatcattcagttctcaaactccatctcgaaacatgctgcagggtaataatgcacaaccatctgcaagtgatctttctcagttatcatcaggggtatctcatgcatccaaagatgtccttgaaaatgctgaagagacaattgatgaactacgtggtgaggcaaaaatgtggcagaggaaaactcgcaaactcaaacaaggtctagagacattgaagaaagtaagtactgacaaatctaagcaacgttctgagcaagatctggaaaaaatgtggcagagaaaaactcgcaaactgaaacaaggtctagagacattgaagaaagaatgtgctgacaaatctaagcaacagtctgagctagagctggaactttctatttcaatttctgagcgagattccctaaggcaagaaattgaagaactgaaacgttctttggaagaggtaactgcacgccaaactatttcacgaagtcccagatctggggatgcgattgagctccagaaagaagtggaagatgatgtgcagtttctgaaagaatcgaatgcaagcttagcaacccaactgaataaggcccaagaggccaacatagagc

SEQ ID NO: 7393 - DNA, 8332 bp, Oryza sativa
ccgccgccggcggactgtacagaggcgtcgtcaaacgggcggcgcacatagtttccctggggcgtgcagacaccgaacgctccgacgacttgcacgctccatgcatcgccgggaaacctgtctctctctgacggctcacgagcaattcgcctgacaagtgaccacccctcatgctcaatgttctgcatcacaaactgacacggccaatacaacaattaatactggtgcttaagtttaaactgcttgcttgtgtccatcttgtattcattgtttgctggctaatttggccgatctcactttgtatatctccagtggttgagcacgtgagtcgtcaaacatccactacaggcggcaattttacagcaaggatgatcaaatcttcagattaataatctagcacctgctactgctttgtcccttgtgctgtgtcccatctctgcactctgcagcttcagatttggaccggttcattgatcccacattccaccactcgatccaaaacatctcacatactcacatgcctggatgctcaatcaaaggtagtagtatcatctgcatcttcaagtgcactgtgtgcagtggcagtccataaccaggacacgaactccatacatgcatgcacaaatgcactggatgcagaagaattgtagacattcagagttccggataaatggccgaaggatgattgatggaggcgtagacgactgtgagcggaacaagttgaggtctgtggtagttagaggtcttttgttccattttagatgacgtaattcatataaaataccgttataaattctaagtgttttctattcggtgtttcagttagatatcatcaggagggacataggggtttgtcccataaccttgagtattttatttatcttttcttgactcattggtcatgtacctgatggcagagaccagagatttaaatcattttcatgtctaaaaaaattagaaaatctgagaaggaacatctcttaatctcttatgcatgttcttacagagaactctagcaatctgaccatatccatcagccaaccaccatttgagccattatggttcatgtttgacatggttaatctccctctgattcttagagccttcccatcttaattgtaggcattgtaggtactgacgtagagtaatgcacccacgactctaatacttttggcaccgacgccatttaaggaaaaaaaaatcctagtttacacatataatcctaacacttggagctggtgatttcagtaggtgagtttgatcactgctgcctgatttctcttcatgggcctttccatcagcttagcccagtggctacattagattctcttcattgctaattcgttcctgtatgcagattgtataacagagaacatatagctcaatttctccaaataggaaatacaaaagaattatacacaagttagaacaatcagaacaaaccagcatctcgtggtcacccattatttcctcgatcacctcaccaagaatcttgtctgcactgttaggaacaagtgctgcaaaagcagctggttccaaccctgaacaacaagtagcagctcattaattttgacaacacatgatctgcaagcttccaaagttcatttatatgatcccagttaagtgtaataaatttcacagtttacataggacaatcgagttaccagtttctgggtaggaattgatgaacatcatcatctcttcaccagtcaggccagaaaatatacaaattcttggcattgactttgcaatctgccaattgaaaatgagtgttaaccgttaacaagtgctcaatatcctgatctaaggtcagagattaattgattggcatttggtatctgtaacatcagcacaatagtgatgtgtcagctgttagcagattaagactgaaaagaaacgtgaaaataatgagaatgaatgattcagaccttgacagcttctatactaggttgctcagtgtgcatggcatcccacaacgtttgctttgtcatttcttctgtacaatgaatcacctgaaacaaagccatatgagcatataactgacctttcagattatccatagattcatataagcatggttgcatttcgtcctttgaatgatgcacttgcacgctatgaattttctccctgaatttcatcttagatgattcttgccgatgagactaaagctgagtccccatattttatcccttcttctagcttctatttgctctcatcagaagtcagaagatacatttttgttcaagtttactacatgcgcaagaacaaataggaaaaactgttctatgttttgatgtcataaaaaccaatatcattacatgcgaatggcatcagacaactattttataccttgagaaattctccgtcaagctctctcaggaactcctgaacctgcacgaattatgcatttcaggtaagcttatcgaacattcagaacaacaagaagcacacacaccaaacatacaaatcaatgcaccatatgtctggtaatttcagacaaacaggaccgttctgttctgcgtgaacagttcattgactgcgtatttaccttgttggtttcgccttcctcgaatccgatgagcaacagcgcctgacgaacacaaccaattcagatggagatcagcacagaagcagcaaatagcaaggaagaggagccgcagctagcaactcaccggcggtccgtacatgggatcctcggcgttcagcggcacgaacttggagtcctcctcctcctccatgagttcgccggggacccctgcggcggacgtccatcagatcaacgcaaccaaaccaatcagctaaccgtggatgcatccgcaccttcgggaggcggcgacgatcggagcagccgccaccttctccccctcctccgctgcggcgccaagacgcaagcggaggcgcgcggagatcgagatcgagggagtaagatggtggcggaacggcggaggaggaggagtacgggggtggctgcggccatggccatcgtcgccggcgccggcggtgaggacgacgacgaggggagctatcctcctctgtgtggtctccgcttcgtcggcgttttcccgccaccaccacgcaatctcagccgtccgatcaccatcctgcgtctgagagtggaggaggcagagcctgcgagaaatcgcgcggttcgtgttgggcttcgcgccccgctcccaaatgggccgggcccgacccaatcgcttctggcccagtacggcccatcaagcggcgcattacacgcgggccaacgccttcgcctctccggtctccgaagcttttctcccccgcacgcgacgacctcgccgtcgccgtcgccgccgccaccaccgccatggggaggcgatccggggggaggaagctgccctttttcgcctcgaacgcctccacgtcgtcctccaccaagcggacccgctcggcgcgccgcctcccctcgctcaccaggccgcgcgcgtcgagctccccatccccggcgtcgccgtccccgccgccgccgtccgcgtcgcaccccgcccctccgtcccctcccctcgccgtatctcccgccggcgccggtaaggtcgggaagaagaaggccggggcgcgcctctggatgcggctcgaccggtggggcgtctccgaaaccctccatctcgacaagggctccatcatccgacgcgccggcctgccgccgcgggacctccggatcctcggccccgtcttctccgactcctccagcatcctcggtgagctcgaccacgcccccattagtatcgattgctgcttagggggtcgcttttgttgtgacaatacacaatgtttaattgtgcagctagagagaaggcgatggtgatcaacctagaattcatcagggcgatcgttacggccgatgagatccttctactggatcctctcacgatcgatgtgatcccttttgttgagcaattgacacatcatctccctctcaagaacctggtgtgtgggaatggtcaacctggtggtgatgaccatggggaaaagcatgatgactcgcatggagatcaggtgccccgccttaacgaggccaccggagcagagcacgagttgccatttgaattccaggtgctggagctcgcactcgagaccgtgtgctcatcattcgacgttaacgtgtctggtcttgaaaggcgcgccactccggtacttgaggaactgaccaagaatgtcagcacaaggaatctcgatcgtgtgcgaactctcaagagtgatcttacccgtttgcttgcccatgtgcagaaggtactattagagatagagtagtgcgtgcctttggtctggcaaagttcaaagttttcatccctgtttgactgtctttattattgcatattaatttgactgatcaaaagctatattcatagtatgttctagctgttcttttctgtggttaaagtttaattgcactaaggggcatggatgatccaaacaggccctaagacaataatatttcttctttggagctatgtggatataactgaacttaaaagcagtaccgaatatttgttcaaaagaatagtgtgcctgacatagccagtataattttaccatctcaaacttataatagttatggttcaccgtggaccaatcaccaactgaagtctgctgtgccgtggtcctgtgtgcacgggggaacaattgtttcatgtacatagagatgttgtagtgcatgtgttgaaagagccaaagtcttcaggtgtatatactttggattatcaaaatacatgtttatataattttagttcttactgtatggttggaacttggggcatataaaacaaaaggtggttataaacaactgattttttttttgttcgtgatgttctatgtacctacctattcatttctttttaaagcttgttgattttattttatatgcagtattgctgctgggtagtttggctgtacttttgagaaccttgatggttacctgcatgctgctctaaacaagggtttcttctgaagatatgtatcttaaccctcatatcatttcaggtcagagatgaaatagaacatcttctggatgataatgaagacatggcacatctgtatctaacaaggaagcaattacaaaaccagcaagttgaggctttaatatcatcggctgcttccaatagcattgttcctggaggaacaagtctgtccaggttgaacaatagttttcggcgcagcgtgagcatcgctacaagcatgcatttggataatgacgtggaagacctagaaatgttgcttgaggcttacttcatgcaattggatggaattcgcaacagaattttgtcggttagtccttttacccatattgaaatggggtagttgcagttttacttggatctacttaatgctatatgacttatcctagtgttcatttggacttattctctgctgacttatcataatgaatataactgtaagttcttgttggagataaattgtaaagatacacagccacgtcttgttcctaaacatatatttgagttagtattcaagttagcatagatgttgaattctttaactactagaagttgctaaacatatatttgagttagtattcaagtttgcaatagatgttgaattctttaactactactagactagaagtagaagttgctaaacatagatttgagttagcaatagatgttgaattctttaactactagaagcacatctctcttttctgatgaagaaacaaggaaagtatatcacttttctgtataattctttggcgcccttatgctatatcttggcgtgacataatttctcgtttgggaattaaacaggttcgagagtatattgatgatacagaagactatgtcaatattcaacttgacaaccagcgtaatgaacttattcagcttcagcttacactgactattgcatccttcggcatagctgtcaacaccttcatagctggggcttttgcgatgaacatccagagcaaattgtacagcattgatgatggtagcttcttttggccatttgttgggggcacctcatcgggctgcttcatgatctgcatcgtcttattatggtatgcccggtggaagaagttgctcggtccttgaacacaatgtaacaagtcacgactcatgagaactgtctcgctgtaaagggcatgcattttgacttgtaacgtctgcagaaaggagcagtcatttgaaacataaaagagaatcctaggattagggagaaactctaatgcatttatgtttcactggtaaataagatacattttctgtagttttcccttggtaaaaatatagtatactaacatgttatgatcatcagcacccttgaattgattgtggatttgtgggttataggggatccaatcatcctgaggcagcagtatgtcttctttgcagagagatagctgatgaatcactgaactttatggacaatactgaatagtatatcggtatgtcattaactcattatattccagttaaaccatatttagacaaatattggttatggccaattgaagctttcttccatggccctgtgtacatgaaggattgacggggttgtttggttctacaccattcttaacattaccaaataattggcattgctcaaatttgtcccttatttggcttggttaagtttggcactagcccagccctaaattttttgccttgccaaatcttgccaaataaaatggcaaggctaggaatggtagagaaccaaacaaacctgaaataacccagcgaaatttgttgagggaacccagacatttgtggagagtgacgtgcatttttgcttgagacgtctgtactctgtagaacgggagcatgcattttcacgtttgaagggtaaaagaaaaccgtagagactatagtgagagactctgatgttctacgtttcacgagcagtaaacaacacaaatccattatataatataaactcattttatcctgctccaatgcaatcctgtcaattcatgacacggtttttgcattagttctaaattcattcctgtgacacgattacgaaaatgacacgccaaaagaaacacatacttctgagaaacgatcaaaccaacaaacataaacaaatctctcaaaccccctgaagaaatattccaccaagacatcctaaattatttattttcccggtaatctgatcatgctagttggttattcagatttcatagtttcgctaccgagcgttggtacgcacgctgagcagcgcaggaaccagttaaccacgtgccgcaccaaactagcaacagatgcatcaactgaaaaggtgaacacaaaatgcatgcaatcacaacggcttcaccgtttcatgctgcccccaattttggttgacatctgtcataatcatgtaaacagcatgatgctgacaaaggctgagttcaacagatttttgcaatcatcatcttcacaggccacttttgattcatcattgaattcatggtggctggaaactattatcatgaaagcaacctgctgctcatagaaaaggttgtctcaaggtgacgcgataaaacagcattgtgatttctgaaggagttaacaaaataagggatgatgaactattatcacaagatgatccagagaatgtacaaccacctgatatcccatgagcgtgaaaaaaggggtgaaaaagaaaagctaagaataatctaatcttataccttgctatcagtacactagtcaccaagtttgaatctaaaaaggttttacaagaacaacgcagaagaaatcacgcaacagttaatcacaactgatgctctcttccttttccttttcttcctcttttttttctttttttttcttttttggtcttcttgcattcttaaattcggtgctgtttttaaaaagagcttcttagctatgtaggaactgagaatggagcaagggaatttgcagggagagtaacaccaccccctcgaagagaaactgaaggtcggctccagttagcagtggttatggcattcgaatcaaagaacaccacaacaactgttatatcatcatggaagtgccgccttaccccacgatcaattttcttcagatctgaatacctcatctccctcttttttgctgcctgctgcattgcagcctttactagtcttctagcaatcccctgatacgcaggaagttatagtagcattagtaagataagcaattaattgttatctgtaagatgaataaaagcccaaaaaaatagagaacaagatttcatttgatgaggctgggttgcactacatgatctggaactaataagtttagaaaaccatttaagatggatccgtagtgagcatcttgaggtggacagatatagtgtgtgaagttgcaaggaatatgaacaaattagc

SEQ ID NO: 7394 - DNA, 7589 bp, Oryza sativa
gatggggagggatcccgcgtggccgtgtgtgtgtttctaggtaccaataggtaccaaatttacaataaaaaaatggtacctcgtggtacctcctcaaggaccgtaaaattgctcttaatagtatagtcaactactagctccaaatcatctatagccaatataatagctaattcatataatagctgcttattatactactaatatctggtcccacctatcatacacacattatgtcttagagtcagtgctgcagctagctacagatttatagcctgatgctcttctctttctttctttatctctttaaaatatgtttacatctgacttataacttgctattgtacctgctctgggagaggggccggctgaggacaagccggcaaaggatatctcccaatatgtgaccacgtggtcaaaaccactctcatctcatcgccacataagttaaaaccacctcgatcttatacataaggtagctagagatcgtcccacaatttcttattctttatttcattattgagtgactcattggttgtttgttttatggaaaataatagcaaaatactcatagtctgttatgataaaatgtacatactcatgtgtgtgtgtatatatatatatattgttcacttgatttaaataaatattagattattacatagtattagaatatatcaagaactaacttgtaaggtggtggattggtggtagatatcagttaaatgcctatatgttccaacgggaattaataaagactttaaaacctcaaacactaaaataaaattatccccattgtaaaccatctataatatttttcaccattttgtatctcactttaaaataaattttccttgtttgatggcttctggttaaggaagggataaaagcctacctatctcactattcgggggaccaacatggtaatgatggtgggtagtgacatattcagatataaatatagatatagatatatataatgcatttctattactaaaagtttcaagcatatttttctgtcataataatatatctaatcgtcgagttagagtgtttccttgctcatctatatctatacctattataaaaattcaatgtgtttttgcatgaaaatttgatacatcatctatgttagaatcggttttaattaaatatgtttccgtatcagaatgtttgttttatctgtattttggtttttttccccttggcataaaaggggtgaaaaaaacgtccgtaaaaaaagaaaaaaaaagagcgaaaaaggtcccaaaagaaaagtccgattccctgcgaaaaaagtcgttcgtaaaaaaaataaaagaaagcaaaaataagatctgattctatgcaacgaaaaaaagaaaaaaaagaaaaatacgtaaaaaaaagcgaaaaaaaggccgtgaaaaaaattatatccaaaaggataaaaaaggctaaaaaaacaagaaaaataataagaaaggcaaaaaaatatgcctttcaaaaaagaacaaaacatttccatcataatctttacctattatataaattaaagataatttcatactcatcgtattttcggccgttgtcctttcattttaacgaaccgtcctattccgatttatatatgtttttagcgttgtgataatattcacgttttgctttttatctccacatccaatatgtttctgcacatatgggcctaaaattgtaaaagggtccaaaatattgcccatctgttgacgcgaggctgtctcggtgaaaaatattgcccatcttctaagcatatgtcacatactatttatttcagatttgtttgtgtttattttaataattttgcacacatgcaaatgcaaagcatactaaattttgtatgggcggctttcatgcatgtccgtttattttgtaaaagattcatctacgcatgattcttttcaacattattttttcaacatatgatttcgtacggctatttaggattaagtgatttattattaaaactgaagttgtttccgccggtagttttggtacgttgtgtgtatttaagttggttttaaaattcgttcgcttttaaaaatgcaatggtttaaacttggatatcaatctcaaaataaaaatcacatatacttttttagaaaaaaaaatatatctaacaataatacgattaaaattagtcttcatccgttgtaacgcacgagcttttttttctagtaaaagaaaaagaaaaaggacggttgcaacgttgatcagagcgagagctaattaattaacgagaagcgcgcaggtgcgtcgagtggcatcgggctggagacggcgcgcgtcctggcgctgcgcggcgtgcacgtcgtcatggccgtgcgcaacgtcgccgccgggcgaaatgccagcgaggcgatccgggcggagatccccggcgccatagtccatgtgctggagatggacctcagctccatggattcggtgaggaggtttgcctccgagtttgattctctgaacctgccgctcaacatactcatgtaagaacagaaatactccctccgtacttataaagaaagtcatttaagaaaacgacacggtcttcaaaacacaactttgatttattatttctataaaaatatttattaaaaaatgatatatgtatacttttataaaagtatttttcaagacaaatatattcatataatttttacattttcaaacttaacaacttgagagttattcatgatttatattctcaaggtttgatttaaacattgtcctaaacgacttcctttacgagtacggaggggtatactccatattaaagtattaattgttactgcccctgggcataaattcttcggcgtttaagacctaattgtgtatcaataacttctcaaatgcctcattgtaaaaaaaaagaatgtgtgttgttttgcctcaaagtattatcatagataatgaattttgttgtaaaattgatggttagagttttaaaagtttgacttgattttttcgcatatgtgagaatatttatggccgtagaaagtattatgattgtgtcaactctaacggcaaacattttactctgtttccaaacttcctgtgacgacagtaacaacgctggaatcaaggcatggggctgcacacggtccgttgacggcctggaattgcattttgcaactaactacattggtatgcgaaattacaatgcattaattcttcatgcatctcaatcttgtttgcctactaagtttcctgtgtgatgtggttaattagttcttgagatttaagggttgattatgagttatatgctcatagtgcagtactttaatgtcaggccattttctactgacaaatctcttgatggagaacatgaagagcacaagtagtgaaagcggtgttgaaggaaggatcgtaaatgtgtcgtcttggtggcactttgctatttatcctgaagggatatgtttcgataaagtgaagaatccttcgaggtaatttataaatatatactacaaattaggtcttatttgtttcagcttaagattattaaatataatctagattattgagccagattactataagttagattatgataagctaagttgttagctatttgtttttttattaatagttgttagccaccaaataatctaaaaaaaacaactttagagtgtattaccatattacagtaatctgacttatagattataataatctatcataataaactatctgtttgtttcagcccacttctaacgattcaggttataataataataaactgaatcatacaaggccttaaatacctccctccatttcccaacgaaaaataataataatcttccatgcccttatttgttcttaacagtataagtggcgtcccaattctaacaaaaataaccccttctacattagtcaccacccaagtgtttcacgtactactgctgttgctattataaatacttcttttgaaaaaaaaatattggcaatttttcaaattataatcacttaaactaaaggaagacatactccgcacgttagttacaacttgcaaactattcattttatattttggaattaaaatagtataatataaaatcgagggtccattatatttataactacatatttaatttgaattttaaattattaattttataaaactaaaactaaagagataatggtatttctctatgcatgttttatttcacatgaactctgaaaacaatttatgattttggagatcttaattttaatatggatgctctctcatagtgctcaaataatataaaataatatagatatagagatgaaaaatattttgaattgtttcatatatcccgcagcaaagcgtagagcttcatctaggatactccattcgttttacactataaatcgttttaactttggtcaaaatcaaaatgctctaagtttgaccaagtttgtagaaaaaaatattgacattttaaccctaatacaaatatattatgaaaatatgttccattatagatttaatgaaacttattttcaatgactcttttttcccaacgtgtaagcatgtgtttggtttggggacaaagtgggatgtgttagacctatccttgttttgtgggatgggatgatttcagtagtttgtttggtttacggtatgtgatggttatagtttttatttggtagaagggattgaggtgggattggatgaacgaatttgtactgaccgttaatgccgtttgggggtggaggagctcggcggcgcgagcagaggagaggtggtggcgggtgcggacgagcaacggcagtcgaggaggcgaggcggctcctggatctgagaggagcggcggcggtcgcggaggtggcggcggtcgcagacgagcggtagcggtcgcggtcgcggaggtggcgaaggacgtgaacgaggcggcagcgctcacggacgagcgacggtgcttgcgaaggtggcgaaaagcgcgaactaggcggtggcgctcgaggacgaggtggcggttgtggacgagcggccgtggtcgcggacgaggcgggggagggtgcggacgaggcggcggcgctcgcggagatggcggatggcacagtgacgccgttcgctcgtcccaggtgggacgagttcgtccgcgagatttttacggatcggttggtcccggatctgagagaaatatttctctccagagactaacccatcccactcacttctaaaccaaacattcctaaaaataggttcactccatctcatccaatccttcattgcaaccaaacactacctatcctaatggttcacttatggtcaactgcaatattttgaccatccaaattttctttgtttgatttggcgtccggcgtatgtgtagttgtgcctacatagaaaaggagatgctttcttgcaatcgtttagagaattggatgaccaaaatacttttgttttagcctttgagatctaatatatgggccatttcggctatcaggagttaaaaaaaaatcatggtctttcacttgttaatgatgaaatttgtaactgtatttttattttgagtgtaatgcaggaattttaactttttaccattgtagtattaacgtgaggactttaaggggcctccaattagtaaagataaatatatttattgtgctgatttatcttaccagattcagcggtatttttgcttaccctcagtccaagcttgccagtattttgcactccactgagttgcaattggcacgaattctaaaggtactagtgttgttatttgcttggcgtgcttatgcctaaatttcatatgtaatctctattcgtatatgattatatgtcaaatcaatgaatgctaagtttgaaatggttaactacaaatagggagagggagacggtgttaacatttcggcaaatgcaataaatcccggtgttgttgaaaccaaaatgttgacgcacaacaatattgctaatggtacttcgcataacttataatatacctatgtttataccattatattatttttaaactgttcttatgcatcggttctcttgcagctctagtgttccccattggaagaatcgtacgtaaaactatagagcaggtgactctttaagaagaaaatattatgtcgttttttatgttcttgcgttatgtgtgtgtgtggggaacatattatgtgcttaacctcatggaattattgtttagggtgctgcaacgacatgttatgtcgcactacatcctcaagtcaaggggataagcggaaagtacttcagcaattgcaatttagatagcccaagctcacatgcttcaaatgcagagttggcaaagaaactatgggaatttagctctaaggttgtgtcctaatgtggttattaaagtatagtttgagttacacatatgaatacatatgctattttatttcatgtaaattgaacacataattttcacatacattctaaaagcaaaacgagtgtggttcctccaaaatacatccaaattaaatgttttaactataatatatacatctgcctctaattagtctagaagttgggtaaatagacttcaagcaaagttcaggttcaaaagtagattttataatccatttttgaagtcaacctttgctcgaagtctatttttcaccctgaatttatgaaggcggttttttgcgcatagtactcttatggtatatattttgttaatgatgatcacctaagaccccactcagtgtagatggaccaataggttattgatacggaatattttccccatgtttaagaaaataaaatttgtccaaaaactttatgcattaacattgcttagaccacttgttctgagttatttgtctgtaaataagtagatcatccatttaatagccttcatcatattttatctaattaatcactatcatatgttagtgaaaaatcactatcatatcaatctaaactaccatgaaaaatagtttatagtgtggtttgtcctttctaaaattggagatgaaaaataaccggtattgtacttcgaccaaagattaagggcgacatatggattttacacttacgagttattcctagagatgtaatatgcttcattctttagtaatgtggaggcccacctcttctaagcctgatcacttcattggccgacatttgagtgagtcttcattaagttatggcctccatcgtttcctctatacaaaatcagccgctaccaaaaatttaaattttgaaagttaattttcaagttgatattaattttttttcatcgaagtttatcttttagcattaacatttaaatcgctaagaacacatatattataaaagttttacatacaattttttttgttaatatgtctgtcagtgttacatataagacatattagcaaatacaagaccacccgggaggataggccaagacaatccaacatacgccaacacagatctaaacaactccaataatacaagacaactccaatctcaccgagttcatattcgaggaaatcgattgtcgctcgccgtcaaccacatgtgagggctttatgacgcaaggctgacagagactagattagatcatcctcaatattgtaatcgtatgatattgatatataatggcaatattagctttggcccgtaagaaggggtccgaacc

SEQ ID NO: 7395 - DNA, 10023 bp, Oryza sativa
cgaggtacgagaaggggctcgtcgcgaggtttccgagttcctcttcggctccgggttcgccatcgccgagggcgctctctgtacggtgctctctctctctctctctgtctctcttcgtgttctggactaatgctgtttttgaggggatggctaagtgactatcctatagtagtatagtgctgtgaaatgttcctgattggcttaaacctgcaaaaattatagcggattatgtcgttgtagtaaatccttagaatttggttatttttagattgagttaccaaaggatgtgggccattcgattgtttgttaagcggtaattgtggagtagttagagtttttgacattaccccgtgattcctttatggctgtcctttttttttctggataatctattctgtattgatgtgctggtggttcatagcatagcatcctagggatttggaaataaatacctaactttttaccgctcccagaagatattgcctctggtcctcacttgataaggatagaaatttaggtatggagtgaattttgcatagttaggtgaagttaacagttttcctctaactttgtaatttggttgttttaagctgtttgatgtagccatttagtttctcgtatgtgttgaagaaatttccctgcattttgaattggataggacacacgaaggtattgccttgcaatgttattagatcttatgtaatgttatcagaagtcaatgttattacccatttagtattacagtagcttctcacaagctattaacagaatataggtgctcctgtggacatgaggatattctgtagtgtactagagtagtatttcattttgtagctggaacagtgaaactagtataaaaaaatatgaaaacaaaaaggtgattgtgggttggttctgaaaggtgaaaggttcctatatctaattcacatggtttggtgttttcttacaatcccttgtttgccccttacctttttatgtgctacttacctaattgataatctcttgttcaacttacacttgttttggtatctgttcaggtgagacgtcgatcagttgtaccatctctacacaaacgatttctctcggtgatggttgacagagttttttgtaaatgtgctgagagattagtggagaagcttgagacatctgctttaagtggcaaacctgtaaatatggaagcaaggttctctcaaatgactttagatgtgattggtttgtccttgttcaattacaattttgattccctcacatcagatagccctgttattgatgctgtttacactgcactcaaggaagcagaacttcgttctacagatcttttaccatactggaaggtaatgttccttttgccatgttattttctaaaaaatccaattatggttggcctatctaacttctagtgagacgaaattgctgactgatgtcgctgactgatgtctgatgtagcccttgtttgttcttgatagattgatttgctgtgcaagattgttcctagacaaataaaagcagaaaaggcagttaacatcatcaggaataccgttgaggacctaattaccaaatgcaagaagattgtagatgctgagaatgaacaaattgagggtgaggaatatgtaaatgaggcagaccctagcatcctgcgattcctacttgctagccgtgaagaggtactttgactaatctaaagccttgatgttgttttacagcaattgtagtcttcattgatttttgtactagtaggaagctattccctcatttcatagaattttgtgacatggacttattattgatttttgaatcttataagacagtttccatgcacagttcctttgtttttgtgggtaatactttcacggaatccacaaagcttttgtttcaaactaatgatgcatttgaatggaacttcctattaatactctttttcactatctcacatgcatgcatcttgcttttgacttgttttactgccgttacctaacatgcttttctttatgcggtccaggtaaccagtgtgcagttacgtgatgatctattgtcaatgttagttgctggtcatgaaacaacaggctctgtactgacgtggactatttatcttctcagtaaggtactcccttattgcttgcgccttgcgctaatgatttaacaagtaaaacgttacttaagataagctatcccttaactatatgttgactactcagtattgcactactgaaggatccagcagcgctgaggagagctcaagcagaggttgaccgtgttctacaaggtagactccccagatatgaagatctaaaagagctgaagtacttgatgcgctgtataaatgagtctatgcggctttatccacacccacctgtacattccttgtgcttagtcaaccaacttcagagttagtttaggttactcaagggcttcttgttaacaggtgttgatacggcgagccatagttgatgatgtgcttcccggaaactataagatcaaagctggtcaagatattatgatttcagtgtacaatatacacaggtcacctgaggtacgttttccatctgaatattggagcacatgcattattgattggcgttttttaagctctttatgccaattgtttagagaaagtaccatatctatgtccagcatatttgtgaaatgtagattttctttagcagcgcattgcagggttatctgctcactagttgaaatggtgtgactggcaatgaaatttatgtcacagtgaataagcaatcattctgctgtctttatgatattgtcatcctcttagcaatgtctgaacgaccataacattatacattgttacaattgattgtttgttccttatgcaaaggtttgggacagagctgatgattttattcctgagagatttgatttagagggacctgttccaaatgagacaaacactgaatacaggtcatcttgagatatttttttaacctgtttttacaacgtgtccacttatcatcgaactgactttaaatcatctggacacacacacacacacacacacacacacacacacacacacacaaattaaactatgctgcctttctgtcacttctctttttcagatttatcccattcagtggaggtcctcggaaatgtgttggagatcagtttgctctcttggaagcaattgtggcacttgctgttgtgttgcagaagatggacattgagcttgtgccagatcaaaaaattaacatgactactggggccacaattcatacaaccaatgtaagtgttccactgtcaatgcttatgactgctagcagatggcattaaatgttgaaatataacaaatactaaaccacttacctgtctactactccctccgtttcacaatgtaagtcattctagcatttttcacattcatattgatgttaatgaatcctgtctagattcattaacattaatatgaatgtgggaaatgatgacaagattcattaacatcaatatgaatgtggaaaatgctagaatgacttacattgtaaaacggaggaagtaggaaagaacctagaacgagataattatcgtcacacttgtaaagggcacatgatctgagtttataatttgtctagatcagctttagagtttagaagtagtcacttttcctgcatatttcaccataccactcctcgcccaaaataaataaataaatatataaaaactagttgaaacttggtcgaggaaattggaaaatctggtcatgttgcaattggaactattgcatatagtcactgtaagttgccagcttctacctgaatgggcagacgggatgctggaaatgaagaaatatttgcttcaattgacagcagaactcaatcctcccatcttattcagatctgaaaaatacactaaaatactcttctttctcgcagggcctgtatatgaatgtaagtctgcgtaaagttgacagggaacctgattttgcactcaggtacatatgcaccatgatgattcatgaatgttgctttaatgtatcagttaatccgtttcaagcccaaattttactaggtggtcgttgtacatactttccatagtttaacatactatcattttcctctttcagtgggtccagatgaacggaaggaaacagcttcaaagcagaaaagcaaaagatgtacatcgacacacatgagatgtaatctacaagtttaaatttattgcttgtctagtttagctgtctgaatatctgcctttttgtgcacaggtggtaaatatcggcgtacaggttgacgaagctcgaaagcatggatataattcgtttattgtttatggatatacgttgtatgcttatatatccccgagaatctggtccgcaatgcccgttctatagcgtagaaagccgatatttaagaggcccaattgcgtgaacaatttcatcaagagaaagttaggcgcatagaactttcggccacaaaaggcctatatatatatgtgagtaatatcatttcggttactttaggctggtactgcgcgcataagctgttgcgtgggcttaacgaactaaactaaagaccaggcctttaagcaacccatttaaatgatcttgtcatgggctcatggccggtatcaggtgagcccacgtatagcccataaagaacggcccactcaagcaaaatcagcaccatccacagtccgttttacaatcatcaggcccgttatggccctgtatattcgaactacaagcccatcatgggcccaactttggcccttatatttgaagaagaagcccattatggaaatcagagacccacatttggcccatttatgatccgttcaaacccatatattcaccgagtaggcccatgttgataacccatttccggcccatattggagcgtttaggcccacttacggcccattggcggtgtgttggaatatgtaggcccattaacagagttttgtacgactgttttgcggttggaataagatcactttgactccctcaactgaccaccgaatctaaatcgtatccctcaaccgcaataccagaaatcttgaccccccgaacttgtaaaaccggtgcaatctgactcccttggtggttttggatggcggtttcgctgacgtggcgcacacgtggcagtgttgacctggtctttgttccacgtggcattgacgtggcgtttatgtggcattaaaataaaaaaatatatgcggggcccatttatcattcacacaaaaaaaattgtgggacccactgacatgtgggtcccacatgtcatcttctctctcactatccttcttcctcctctctcccttatttctctctctctctccccttgacaagagccgatggcaggcgagggctcggtggcggcatcagcgagtgggtgccggagtggtggctgcggtgggcggtggacctcgggcgacgtgcgacggaatgcgtcgggggagatgggagcacgctcccagccaccgctcctcgtccccactctgtgtcgagggcaatgagggggcagcggccgcggcgtcgacgggaggcgggcggggccgcagtggaaagggagcaatagctcgcacgccccaacgcgcggcggcagactggccttgagcgctccagcgtcgacctggccatgatgcggagcagcgactggagctcctcctcctccgacacgtgcccctccccgaccacgtccgccgcgagaccgcccccttcttcctcttggacttgccgccagccgtgcccgcggcggcctcacggaggctcgagaagttggcggcaagagcagggggctcggtggccgccagggtggcagcgttctcgcgctcctccacctcttccttggtgcgctcagtgtcctccgccgcgcacattccttcgtgccaccgtgcccggctcgctccctccccgccgcggctgcctcgcgccatcgtcgccggaatcatcctgctcgttgctgttgtgccctcgccgccatgccctcgctgagcgggcgctcaaggtgccctcgccgccatgccctcgccccgccaccatccccatctcccgtggcgctagcgccgctccagtcccggacctgccgaagccgaatccttgctactatgtcggtggcggcggcgcgaagaccgtcggctgccactccgtccatcgcccgccgccgccgctccccactcacgaagagaaagagcgagagatagagaagggaggagggggaggaggaagaagggataggagagggtgacctatgggatccacatgtcaagtgggtcccacaattttttttttgtgtgaatgacaaatgggtcccgcatatatttttttattttaatgccacataagcaccacgtcaatgccacgtagaacaaagaccaagtcaacactaccacgtgtgcaccacatcagcgaaaccaccatccaaaaccaccaagggagtcacattgcaccggttttgcaagttcgagggtcaagatttcaggtattgcggttgaggtatacgatttagattcggtggtcagttgagggagtcaaagtgatcttattcctttgcggttagaaaaggcccattaatggccgattatctcatcatattgggcctactaaccgtccatgtttacgaacttgccttagatcggtccaatatagttttcctgaaatatatgccgtaagacgacataaaatacactaatactgtacagtcggttgaccagtgcaagtttaatgtacatcctgtatcaatttgctcaatctgctgcagccaaatgttgtgaaaacgggtcatgcatgcggtaaacaaatattgaaaccaaattaacagcacaaagtccgacaacagtccatgtacaatggttattgtgaaaaatctcaagtcctaacaaatacatcaccaagcaaaatacttgaagttctaaaataataaatcatgtactccatctcctattccaccccccccccccatacattcccctttctattccaaggtccctgactccgtcttctctgctcctgcctttccctcggatgaacatcaccttacaattgataaaaggaaatgtcatctctatagagaatgcaattgaaaagaataacaagctagcaagtgtttagcttcttgcaaaaattccacttatattgtgttaatatggcctgacatttagcataagtttgcatgagacataatggccaaagtagtgtgatttcaattatgtgtccagttttgctcataaacaagaccaaaagctaatgtgaagatggtttcaaggaaataaacaatgcaaagttgacctagaaacttgccggagcacctatgggtggctgaataggttatatatagctttagttcgcaacatcagttgcaagcttgctccttctttagtgccaagatacgtagttctccatattctctaaaaatgatagaaattctctaaataaacagtgcaaagtttgccacgtctaaaataaaagagattctctgaaaaaacaatgcaaagtttgcaccaagaaacttagagatacctgtgttaaatcatatgtacttgtgttggaaaagagaacaacagtagcaattaccaaggtgctctcacttcactgcattggacatggttgatcatttgttccaaacagcacagggggaagtgacttctccatgaatcaattctgccaaggtctccacccctactgccagttccaggacggcagtacctattccaaaacatcagaaggtcaatcagttccagtgttccgcgctggttacaaacaccacatgcaaaatttaaattgccaggactgggacaagaaaaattatgctggaaaaacatttctagtcaacaagacaaatgaagtggcagagatgtttgctcaccggttgcagttgacctttgtatttggacaaaagccagtccccatcttacttgcaagcttctccttggtcatcattgtgtcctctacctctgccaccgcagtttttacccactaaagacagcagtcatgctcatattcagagtaatcaaaagcacttgtattttcttgcctcaactatctgatcttgaatatttcattgaaccattctgagcagttgaagcaaacctttgtaggtgatcattcattgatatctttttctctgtatagtcaaagttttgaacgagaactgcaacgggtacatcctcatctccaggtgctgacttcccacaaacaaaagaaaaagaagtcaatttgcatcctcatctccagagtataaatcactcgaagccccgaaccaagcccaaattgtagaccataaaaaaaaaagaaacttctacctttactgcactctttgttctgtttttttgttgcttgctttggttacctactgaggtgctaatcattgagaataagactcttctttggtcgctaaattgcttgctttggaaaggcctcattgctctgacagcagccagctgacattgcccaacattctcatgctctgaatagatggctatgatacagcaaagtaagcgccaccatagtatatttgaccagttgtcagtactccatattaaccttacttagccttgaattggttttgtagcttgacgtagtactttcatctattcactgaaacagagatgcatgtagtatggtcattgtataacaagacattagccatgtgaataatgcaacagaaaaaaatcaaatacatgagaataactagaaaatatgcatgttgtattaatgaagaagaaaagaacaaaaaattgcacttattgtcatctttgatctttagtgttagtttggcatgaatgaactattggatgccataccataccctatacacctagtgttagtttggcatgaatgaactattggatgccataccctaccctatacaccagaagaagcataaaacatacacaaaacacaccagttgctacttgaatcagataaggcttacatatatatggaggaaggattaaaagtttaaaacaaggtgggggtcaaggtgtataatatgagctcccctttcaggcaatgagtgtacacaaattaaatactacgacaacaaacagagtaaaagcaaacaagtctgggaagtatataacatcagtataaaacctaaagcaaaatgactaactcagcaaaattcagtatcagcctcttacagtaactcagctaatttaataggtccacagatcgtcagaccgtcactacaataacatgaatattaggccatagaataccgcttacagttagcataatggaaagcaagtaaactaactaaataaactatagcatttcaatcgagtattgaatatgaaatggactattgaatatgcaggactgctgaatgaaatagtataacacaagtttatgcagacaatacagagtgactgaactgttgtgctctgctcactagatgattagctgtgaagttaagatatagatgtaattacgatagcaagtaatctgttaaaaaatatagggcgtattttgtttcgttgggataaggcattaactagtaggtactttcaatgtgaatatctaataacatcaattttgtgtcacaaagattatatcctaatagagtaattgttggtcaaagtcttgtcttaacaaaacagaatacgccttatatttttttaactgagcaagtaattaactaaatggtaagtgacaattcagaaaatataatataagcttgattccgatcgcatcaaatcaccattcctcatcacataatagagaataaatccaaaaaggaaaaaggacaatgagcaagagggcataaaacctctctctagcttcatctctatgacactcttgacattgacgttccgggcttccaaaagaccaaaacccacaagcatcacacttttttcataattctgaacatcatagaaaccaattgataatactccctccgtactcgtaaaggaagtcgtttaggacagcgacacggtctccaaaatacagcattgactccttgtttctataaaaatatttattgaaaattgatatatgtatacttttatgaaagtatttttcaagacaaatatattcatataatttttacattttcaaactcaacaact

SEQ ID NO: 7396 - DNA, 17477 bp, Oryza sativa
ttttttttcttttttggtcttcttgcattcttaaattcggtgctgtttttaaaaagagcttcttagctatgtaggaactgagaatggagcaagggaatttgcagggagagtaacaccaccccctcgaagagaaactgaaggtcggctccagttagcagtggttatggcattcgaatcaaagaacaccacaacaactgttatatcatcatggaagtgccgccttaccccacgatcaattttcttcagatctgaatacctcatctccctcttttttgctgcctgctgcattgcagcctttactagtcttctagcaatcccctgatacgcaggaagttatagtagcattagtaagataagcaattaattgttatctgtaagatgaataaaagcacaaaaaaatagagaacaagatttcatttgatgaggctgggttgcactacatgatctggaactaataagtttagaaaaccatttaagatggatccgtagtgagcatcttgaggtggacagatatagtgtgtgaagttgcaaggaatatgaacaaattagcaacgtaacagctcatcagtattgatcttcatgtatagtgcatatattaataggatccatatcatatcaacaattgaagaatttcagtgcaaacaatttaactatttaagtgacacatgtattttcatgaatcgaattcattcaaggattaagaatcaaataaagtgataggaaaaggattatacagcgtaaagaaagaacctgctagattatcaggggcataggattggatggggaaaaattacagaattcggaccaaatacagtgcagttgtctcaaacaacattaacaaattgatcatacccctaatagcagatcccgtacaaatctgaattcctaaaacacctacagggctacaaccaataaacagctacaatcctaaaggctttctaaactcacaatgtaaaggtgccttcataatttcatatggtatcgtattaacatatacctaacaagttctttctgaatatttgttacatttaaaagaaacttagaacagcaagttctaaagatattcaacatgatcttctctactttctcagacaattgacatccaatcatctatttaccctaatgataataacaatcaaagcatgtaactattacaaaaacgtatcaagatttcttttattggacaagcaataatatgaacaagcacttcgccattgaaataattaatttacataagataagaacacatacattgcggggattatgttggacaagatcaactgcttcctgattactaatatgctcccatagtccatcagatgcaaaaatgatgaactgatcagttgtctgtaattggtgtacaacaatagctggttcagaactaagaagaggcctcctgaaagtttcttgaagccgaaatttgctatgcaaaggttctctgttgaactccggtttcttcagatacacatctccaatggatcttgttatctggaacacaccatcacaccacgtaagatgtgctgtgggaacgcagcagtctaaacaaaatatcacggcacctcttatacacactaattaccagaagcaatcagaataattgttccttcagggagattgcaattgaattcaagaactttacatcatattggtcttggtccataacagcagtgtcatgttattgcagttgcattagttttagagataaaaagatcgattcatggttattgaaacttgaaaagaagcataattatcgaatcacttatatttatttagctgtgataaatgagattttcctcttaccaaacaaagaaacaaaagacactaaattctgcagaagttgccatcacatagcatgttctaaagggtttgaaattaccagattaattgggaaaaagagaaacatgtacacttattttatgaaggcaggtccagattataacagtacagatggatggcgtacataatagagcattactccatccgtatcagagaagtacaattctaattttggacataaacctaagagtggcacagcaaacacaattatgctttcagttggctgactataatctagtcccgtgccaatcgcatgggaaagtctgcgagttattattagaacaagacgtcaagattctacaaaataattagatgagtcaaaatgaatagacaacaaatagcaaaataattaagatgtccagatatgtacctggataatacccttcacacgccaaacattgtgctttagaaccacaatatggggatcatcaggatgtgctgcctgcagctctcgcctgacctcttcaaaggatgcattgtgttctgctgacaactgcatagccagaacctccccagttcccttcacaagtctaccgagaacagcacgggaatcgccaaggtttgcaatatatagatttccagcacagatcacaccaaccagacagcaagagcctactgccgctaattgaggcctcatcgaccattgactactaactacagaaaagaatccctcctcagttgctcgaaacgccttccgaatcacatccgctgacatgcacttgtgctcagaagcaaatcctgaaaaaggaaggtaatcatgggcatgcacaactgatgattagcaagtaattaaagctatagagatgcacaggcagaaatgattattagcagttacttgtaaacaaataattatacaatcagatgtaactagaagatgccatgctttatattcataaaaaaattcttgcagtcagtttctaaactggcatgtgatgtgtttaattacattccagaaaatcatctatgggtcaaaattagggcaatcctggcccctggtctaatagtagatgcattcaaatacgcgcgcgctttttcgcggtaatatgcgcagaaccacatctcatgcaatgatgcaatgcagcttataacagatatctactcaactgaaaaccattttcgctcaacaactatcaatatcaaacacatctacacttgcagcacatcataaacaattggaccaatcacctattaatcagatagcatagcgagatcggcattggatcaaagggtgaagattttcagcagcagtagtcagtagaggcctcacccctcagatggttgaagagatggtcattgatgtagcgcgccgtctccgggcctccatgcccatcatagacgcccacaagagtgccctgcaggttgggatccgtggtgctcagtggcccggattccacctggctgtggtcctcgagcaggttgttggcctggaccacggccatcgagaactcgccggcgacgagctggccggcgtccttgtaccacagcagcccatcctgccgccccgccgcatccgatcctttgcgggggcgcccggccggcgacgacgccgggccccagcaagatctcaagtattccatcgcagcagatagcatccttcatctccgacacctccccatcgcccacttcctcacaaagcccattcctttaccttccctctcctcctctcgtttcttcgcgaaacctgcaattgcatccaaacaaacacgcatcccaggatcaagaaccacaaaccatatgatcatcagagggagaaggatcaacgagacaaccctactctacttgcattttggaacataaggagaaagaagcgaaaaataactcgccttttttttctctctttctttctaggattagcttcgagattcctgcgcgatcgatctcgcagccgaaaggggtggccttagatctggaaggaaccaatcgatctcaagctcggaggaagcagcaaggattgggtttttggtggagaaacggtgggctcctcctctcctctccaggatccaaaagaagcaaccaggaaactgaaccaagacgactaaaaaaagatgcgctttttcgcttctccccccctgcctacctctcctgccaaatcttgcagacagcctcgatgaacagatagatcagggtatcttttttatctcctcctccactacacaaacaaactgcacaacacaatcaagagaggaggaagggaaaaaaaaaactgcaaaagaagcaaccaggaagagagagaggttcagggccagcaaggcaggggctcagagatgggctctacaagtcctaatttctgagagggatttgggagtggtggtggtgactgtttttgtgcccttttgttccattttaaatctctttttttcttcttcttttcttgctctctacacctttcttacctagaaagaaaagaaaaagggacatttatgtatgtagctctactatactagtactactctttttttcctttcctctctatctcttttcttttcctcctccttgtcaatatgcatgacgtgctgttttgtatctttgctggtctcacatggtttgacctgttttgtttcttcatcgctactcttcagatttcagatgtacttgaaaaaaaatatatctttcatgtacaaatatcagtgaaaattaactgcaaaaatgcaggactattcgtataagtatttgatctgaaacttaatagagtattgtaccagctacagtgcatttaattggagatttgtcaagtactctgaaatctcacataatacatagaaatcattcaatgtaatttcatgccatctttatgacatgttcaaaacatattaatcgtattattgtcgtataatatctatttttattattacaataaattaaatgttttaacaaataaacctaacaaatagtttagaattagtgggctaagcactgtattagaagaaattttgaaaaaaaaaacatactttgtatagatgtggagtaaataagccaaccatccgataaaatagctgaaaataactattgtataataacttagggtgtgtccgtatatgctggtttccaacccgaaaataacattgaaaacggagcaatcccattaacacgtgattaattaagtatttgctattttttaaaaaatggattaatatattttttaagcaactttcgtatagaaactttttataaaaaatacaccgtttaatagtttgaaaagcgtgcgcgcgaaaaacaagaaatatgggatgggaaaaaggggtgctgaacacgcccttagtgatgcgccttgcttaactgacagtggctaattaacttatttaaaccaccagccaagctccatgcacggatggatcgatcgaacatggcgtccaaattggcgcggcgacgttcggagaaatttcatgggatttggacgctagccgagccgaggagcaggaggagaagatttatcgattaaacaatggtgacccaacgcattcagcctgcctgccaattgtatgaggtgacgcggacgaaacgcaactcggcgcggcgcgcgacacacatggcgttgccgtggcggcgagcgcgatgccacggcgaacgcggcgcgcatgcgtgcgccacgccacgccacggcgatcggcgccgacgacgacttctctcgctcgtcgctacggaacaacggatatgatgacatgtactagtactatctgcattctgtgcttcagcctgaagactcccatttgggcctccggatggattcacattctcgtggtgttcgaatggcagggtttacattaccggttgagcactaaattttgagccccgtcggtattacggttttcgataaatttcgactaatttactatttaacctttgaaattctaatcgaaaactaattccgagctcgaaaaccgaccggctttcgtcggctctgttaaccctgtcgtatgatacatttatgctgagttgtaaactttgatttcaatgtacaaccttactgtgtttcagtccaaaacggttaaacggtgtgttttgtaaaaaaaattatatagtatattttaaaaaaacaaataaatatacttttacaaatttaatagttaatatttaattaattatatgctaatgagtcatcctattttacttatagttaacacgcttctccaataaagagtttcaaacggggtcttagagatttaatcaaagaggaaaaacgtaattttggttgtgtgtcatttcgtggacgggtcaagagatacgaggaatggaacggacggtggtgccattacgcgttttagtgactagtgagtatatcttggcatggggtttgggctgtgtttagatccaaattttaaatccaaactttagtactttttcatcacatcaacctgtcatacactcacaacttttcagtcacatcatcttcagttttaaccaaaatccaaactttgtcatcaactaaacacagccttggtaatttgtatttggtcggtggtacggataagttcatcatagcttggatgccggatatttgacatggagagataacagtgcgccgatatttaaaagtgatgtttaaaatagcacgaactgaacttttatttattttcaaactaaaagatatactaccttcttcttaaaatatatatcattgagcttttacgtaacatttaatcatttgtcttattaaagaattagtataaatatataaaaatattagttaaaagcatatttatttaataataataaaattaaatagaataaataacatatataattttttaaaaataaaatatatagtcaaacgttatgctgaaaataaacggcgacaggcaggtgagcatcgagcactgggccggcaggctgtggcctcgctggccgccactccggccgcggcagctggggccgtgggccctgctccaacgcatcttgagccgtccgatcaaaatcctgcgtctcctgtgcatgggcccaacggcgacaggttaatcaatggctagcttctcctgtgctctctgcgtcgcccggtccccggtcagaaaaatcatataattgtacagtaaacttgcatcactatcacgtgcggaactctattatttctgagaattcttcgtggattcgtgcatgtgtgagagcctcgcgaaatcccagatactatcttcatcctataaaaaacctaaatatagacacatctctatctagatttattgtattaaaatatgttatatctaatttttgatttttttttcaggacaaagggtgtgtttgatttggttgacataatttctatgaaaactagtaccagtactaacattttccccgtgaaaagatctgcgaatttgattttactgaaagtataaagcagctggtaccgtaaattcgcgagaagaatcgaaaattcggaaccgaagatttccatgacagagagaggctggatatatatgcagcgactaaagatctgcatagtaaaatctctagtttttttttcctttactacaaaatctgcatctgtcacgtacatatgctcggttacttttaagctttcaattaacagatggattaattaatttaaggatacttaactaacagcaaacaaaacgagaaggcaacagcaataattgagacgcgctttacaaaagctacacaaaccaaattccagttcctccgattaatcacaaattcgcaattcacacacacacacatcaagaacgtacgatcgaagatcaatcacgcactccatcgacgaaagccgttgcgaccttttaccagttcgatccattgcacatgatatgagcgatgcagattaattaactaaagttagctgcaaatcatcacacatatgcgatcgagaattaagagattaattgatcggtgtcaatcgcaattatgcaaagccgagggataatcgcctacatccatgcaaaaaggtgtactattgatcgatgatctgcgctgcaagtgggcagaggccatgcaaacgtaattaagctcgatctggatgtgacatctcgaaccttggcatgtgatccatccagcttgagcttgaagaaataactagctagctcggctcatttccttataattaattattcatggaattattaaaataaaatatttacttcatatgttaaaaaaataagttttttttataaaagttcttctactaggatcatttgttctaagctatgtgttaaatttatgtatcaaaataatacttaatttgttcttgtaataaatagataatccgtgtcaataattcgcttcatataatctaaaccaaaccattaagaatgctctcatggatccatcaatcattagttcgaaccttaatttttttgctccttaattaattaccaccgttactctcatggagtatttcttaattaatttgtctgttactatttctgatagatgattcctttgcggcgaaaatattaattgtatattagtcaggtcgtggaaagcggtcaaagtggccgggtgatttcttggagtgtaatttacggcaggaactacgaaggattaatactcactgacccggttggagtcaagcggcaaaattctacggtgacgatgctgatgatggcgtaaacgttatgtacatatgcatatgcaatgagcagttactgattaattaagtacagtactacagtgttgtattgttcgtgcatatgcatatatacgcaatgatcagttacatgttcataaactgaatgaatttaactgaagaattatacgcatgtttacttatcgggacgaccaatacatatttaacacaaaaccctctactaaaatcttacgaattttggatcattcgatcaagatcgaacaccccacaacccaccccacaacggcacagccttccccctttccttcttcagatcttcctcttagctcgcgaagcatgctgctgccctctacccttaatttatttatgagctccaacgatccctccattagtaggtgccaataccccaccctcctcctctatccctgacaatctctatcatcgaatccgtcattatcattcgctaccacctatctagttagccaatatttttccacctcataccccttttccatctcatcgacgtcgctctgcgccttctaacctcttcgctttgcccctaccccctatcctgcccattgctaacctccctctaaggcatgaaactcctctggcttccacctctcccaacccctctttcaccttaactctaacacccaaacctacatggatgttaggccaacaccatcacaccgaagtaactcgtcggagctaaaggagaagaaggttgggcaggatgcgatgatccaaaatccgtaagatttgggattctgtttttgtcgcatgtaggactttttttattgtttatatagatgtggattttataactatatatatagtgccatgagcagtataatactccttttaatttcttagagtcgtataacctgccagaaaaatgctctagtacgtgcacgtacggccggccgccctctctagttgacctggtaatttaattagtttgtatgctggatctaataatggctgagtcggattagcatcatcagctggatgctacgtgcaatctaaattatgaatgttgtgcttgccttgaccatcgatcgatggaatgggattcgatggcatgcaaatgcacgcatgcaccctccattattcttcccaaggggatcatcatgatatttgacctagcaagatagcaggtaattaattagtttaagatgggtttaattagagagtccggctagctaggtagctgactcggatcaacatcagctcaaatgttctctcaaactctgctgctcgacgtgattctcggccatactgttcaaaaaagacttcaattttaatatatcttatattacctccatcctgaaaaaaatatttttatacgactcatttttatacatgtagatgtagataagagtgaaacgtaccaacgtaaagctaaaatgactaaaccttacatttttttttcttaaactccaatacatttattcccccattttctcaaacttcaatgaaattgtccttcattttctcaaattataatatttgttttaaagataaaagtatttgcaggataaataaagaggaaacaaaataaagcccgtgtagggcggagggagtagcaaattcagcgagcacaatcggcaatcatgctttgtttttttttcttcctttgtttttattgcgatacgatgcatcagaagttaaaattaaacagaggcacgcgtccgatgactcgatgagtacgatgaggccacctgctgtgacgtactccttcgtttcaaaataaatcgatctcttaccgcatataatataatgaatctgatatttagattcattgtattatgatgcattatatttcgtatgggattgatttattttgtaatggaggcagcagtatagacgatgttggtattaaagttaatgattaaattggtaataattttcaaacccataaaggtcttaggcaagggggaattatcttcaattctttttaatatagtggctgatatgcttgctttactgattaagattaagagggctaaagatgctagttctataaatggtgtaattcctcatttggtagatgatggtttatctatattgcagtatgcagataatactatcatttttctagagcataatttacagcaagcaaataatctaaaattgattttatccgtatttgaaaagctctctggtctgaaaattaattttcacaaaagtgaattgttttgcttcggtcaagcgaaggatcattacgatcaatattctaatatgagtaaaatgcaccagcgatccttaaacttgtcaggagatttcacttcggtccacgaacttgcaaagcgcatattaaggcccctaaacttggtttattgtatcatctcggtccaaagccgcgtttgaccgtggtcttgcctacatggcacgtgtcacgcccagaaatttaacccaaatttctagactattttgcgtattaaatccctgtccaggaccagccagggtacacaaaacgacaagtaatatacagttccaaacgtaaataaagcgtaaaatacttacgaaagaggcacttagtcctcacaccgaaacagaacgacagcagcggaaaaaggcgatcctagcggggcttcagctccactccacaggcaaaactcaactggggtctgagccttggtcctctaactccatcttcagctcagaagcactacacttctgaaaagggggaataaaagcaagactgagtacaaccaccgtactcagcaagccacactaacgatgcagatgtgcaaggggatacaaggatggtttgtgactatttgcataaaggcggttgtaaaacattttattgagcaaaacagtaaaactgttgagtaattaaagtaacattaaatctccattgatcaacgctacaccacgttgaacaggcccaaccaacccacctgaactacagtgtattgggtcgatttattaagatgggactaatcacggtgaatctggtcgaccgcccataaccgcgggcacggctattcgaatagctttactctgatcagaggtgtacaactgtacccacaagacacagccccacaacacgtttccgtgcgccgacatgccaccacgacataccggaaagaggccgtgacaggacccttcgcataaccccctctagccaagcacaccacacctcaggtttcacccccgtccccagcgggcaacgggcagtcccctctcgtgcctaggtgaatctggaagcgacagaggccgtcgcagggcccgccccgctccatcacgcccacccttgcctggatgcgtcgactagaggaaagctacactacaagcccagccgttgtccacgctggcttgtggtaagtacgataagttcttccagggcatcccgcgaaccggtccttaactgccatgggtgcgaccagcaaaaccatgcacccacagcccaccattcagtcgcattttagttggataattacgaccatgaagcatggccagatgtctcgagcacgcagctcattctgatactaaaaggtctaatacggtaattatcccatcaactgagctaatggtaattaagcatggctaagcatatagttctagctaggtcacataagtaacatgagctagtcgatttattacccaatgttgacaaaggacatatatcaagtaaatatggcacaagcgagcagataggtaaaaccctgaccccatgtaattagcaaaatatgcatatttatttgcaaacagtaaaacatttgcaaattgggatcaacatgctcaaggggaatgtgtgacttgccttgcttcttcaaacaatcttccgaactcttatcctgcgaccgtgatcttccgaaacgacggattctacacgcaggcacgcaaaacgaggaaaaactctaataaaaaccaaggaaacagtacataaaaagtaaacaaacatgtagagctcaattttagatgaattttgcaagttgaatggctcaattcggagttcgaatgaattagatatgaattttagaagttttgagccatttaaatgaatttctagaattattaacgaattattgtgcaattgttaattattttatcaaaggaaaaggctcctgctggcgtcatcaaagggcagcggcgccgacaggcgggccccacacgacagcgggcaagggagtggtccaccgtggactgggaccacggggtggtccatcgccggtccacgggaaccgacggcccagatcagcccgagctgatcgggctgccacggggtggcgcggctgagcacgagcacggctcaggccggcccggctgagcgacggctcacggcggcgcggcctcctgcggcgacggccgacgcacgcgggaaagcggcggtgcggcgcggcaaggggatccgggcggcctaggcgagcggggcggcgacaagccggccggccgacctaacggcggcggcgcacggcccggtggtcgccggcggcggccaccggcgcggcagcacgcacgggagacagaggagggaggcaaggagggagaggaggagctcaccaaggacgcgacgacgaggggcggggaaaggcggggaagctcggcgtcagcgctcctcgggacgaaggcggaacggcggcccggcggcgtagggtggaggtggcttgggatgcacggtggaagggtggttgcggcgattaaatggggaaacggagcagaggccggggtgcggcgaggcacggagaagccggcggtgcaaacggcgcggcgcggcagtggctagggcggcggctagaggtggctggagctcgccggggaccgatggagagagggagcacggtggagaggtggttcgcgtggtggaaggggaggaagaaacggcggccgagcgtgcccttgaggtggcaaagccagcggtggcggtggagcagtgcggcggcgaccctagcgacgggaaaccgcggccggagttcgccggagtgtggcggcgcgcgggggcggcgtggggagagcgagggagagagtgccgggcccgggaaacaaggggaaatggacgaggggagcacgggggcgctttttatgggctcgggaaggcgggatcgaggccggacgtggcggaatcggccgacgaagtggggcgccgacgtggggtggtggaggggttaactgtggacccccgtttttataacaggaatcattcgtgtaaacagtaccatttccctggatcaagtagtctggtacacacgagtttatagctgaaataccaaaagcacatacacgagagtctaatgctaattattacatcataagcccgcaggcattgtcttaaatcatcggaccgagcggtccggaatacatccaaaagcagaaatagataaggcagcggaattcaggcagcggcatgccattgccacaggcaacgaccgtactaagacctactgagcgccatcgtcttcatctccctcctggtagtaggcatagggatcctccgaagcttcatctcccgcttctgattaattttatatttgcaaagggtgagtaccaaccgtactcagcaagtcaacacagcaacaatgcatatgaaaggggtatttcaaaggatggctatggctcttttgcgctaagccagttttgtaattcttttcacaaacctaagacctagcattgactgatcaaattttagtaccagtgtttgtatttaaacaacgacggttctgtccaccatccattgtgatcccaaggatagcttcccgccattgagtcgttatggttttctgaggacgcccaccttcccccttctcaggaagtggctccaacagcataaaaattcgtcatgcaacaacccatcccacataagttaagaatttagaaactagccaagtgtaatacatgtcccggtgctcaataaccgcgagcagggctattcgaatagatttggtttactcacactgcagtggatgtacactttacccgcactccgcgactgcccaacacatgagtctcgtctcaacacatgaggcgcgtcacggcaaagcttttcgataacctcgcattggcagtacccgctccatgaacttaaatcctcatgcactctaggcgtccatgtttctagcagtgagaggagttttggcgctcccgggaaagagaagtctcacacacatattaaattatggttcaagttaagttctctctcacacactcatggcagtcctaccaatggcgacaccgatgtagggcacggttctcggccctacctcaacggctgtcccatcgtagcgcacctgcctcactcaggggtgaaccatctatgcagggatactgcctccgctcggctatctaatccgctaggtctatacccattcgagaagtacggttgtacggggttgtttcatgcttaacttcatggctcggtccttaattgactggggacggtactagccttttccagataccacccaaatcatccgtccgccccagtcgaaaacagttgttttcgctttattttcctttcacaaatcatgttatcaatttcatggcaatgtggcgctcatgtctccacatgccgcatctcaattaccttcccaaaggtaattgcccaagcatttagcatttgataaatatgagtatgcatgatcctagaatagcatttctaagcaattgtcataattgactagggactcatacgtaaacatgattacgaaggaataagggataaacaataatcaaggcatggcataatcacaagtaggatgttcatcattgcatgcaattttatttataaacaaaataatttcgcaattgggatcaacatgttcaaggaatagtgatgacttgccttgctcaaggtcttgcgggtcttggccttcacccggatccgcggctccctcggtctctataattatgtgcgaaagaacaatttgaattcgattagaattcaaacaaaatccaaataaatccaaatgaaagtcgaatgcgaaagtcgattcctttattttaactttattattcgcgaactaaggcaaacccaatttcgattcaaactattttacgggtataaatgttttgttgtcataagtttttaatttaatctacctgagcattatatccatataataggttagagatttctatcgcgagctaaatatcggacgaaatcctagaaatattatatgatttaatttagtctatgactaaatgattaaatataatacacggctaaaatccctagtaattaaatccgaatttctaccgtgaatcgattacttatagggattacccaaaaataatctataataatctataagaattcatctatttgtttagttattaattacatctaaattactacagcgaattgatttcttatagaaattaccaagaataatccataatttatattaaattttgcaattctacgactatagttaatctataattaaattctaattattttaaattttctaaacttccctaatctccctctaatttcctatttatttccttttcctttttctccctttccttttttttctttcctttctttttcttttctttttctctttttctctcctttccttttcttttcttttcccctccctcccggcttctttctctcttcctcggcttctccctccctctctctcggctccctgctacctggggcggcgacggcgaccgagcaagggaaggaggcggcggcttaccgacggcggtggcggcgacggggcgagacgacgggcgagcggcgatgggacgggcgggcggctcggggcgcgaggcagcgcagcacggggcgcgtcgcggggcgacggggcggcgcgcgacgcggggcgcaaggccggctagggcggcgcggcagcgatggcgacggcaacaggcggcgatggcgacgtcggcgcggcggcaggcgacggcgcgacgggatggtgacggcgacggcgcggcagcggcggcgcggggctcggggcatggctgggcgcgtgacagagaagggtctagggctagggaccgaaatcgaacacctatgaggcaatgaacagtgacttttcctatttatcccgattttagtgtattttccatataaatttgattccacaattcctaattttacatatatgcattttactcaatatttgtgttatcttaactaatgaattcaccctagattaatattactcatattttatttttatataatttatttgagttttaattagggttaattcttattccatcgtatttaaatttaattgatccaaatatggtcgcgataatattttatttatttctatccacacctaatctttattttaatttgtatttattttaccaatttgtttttaaggtttattcctaattaactattctttactcacgattaataatcttcgagatcaaatccagataaaatagacgaataagatcggcatgatgcaattaatttaaaaagtttttgaaaatccgtatttttagagttttgattttgtcggtcgaattttcagggtgttacattaaccggcgccgattttcgcggggagagtgggggggaaaggtggaggaggtggaggggatcgatttcacgtgctcgtggggcggggtggagcgcgggagccgcagcgtcgtgggggcgaaaccggcggccatggcggcagttggggcgacgggaggttggggaagaagatgacaggtggggcctcgggtcccacctgtcggggagagagagagaggaaaacgggcgagggaagtaaagcagacttgaggaagagagagagccgagcgggccgagggaggaggccggctcgagagggagagaaaaggggcgcgcgggccacgggagagaaggaagacttgggccgaaaatagcccaaagagaggaagggggattttaattgtttttctttttatttagttggttaaaatgaacttggtgcttttaaaattatttcttgagctccgaaaattcacggaaaattctagagagtacattagggcacaaagaatattacagaatattctcggccaatgatttttaaaggaaattttaatttactccataattccacttgattaaattggtttaacttttatttaatttctagaaaatgcattattaaatgatttttaatcccgaacgaaaatcgggcgttacagcacg

SEQ ID NO: 7397 - DNA, 21822 bp, Oryza sativa
gaagagcaccccggaacggaatcatggcagcggcggcgacgacgaataagctccagacgatgcggtggagcgacctcgacgaggacgacgactacggtggcggcggcgacctcagcaccctgctcccaccgcgcgtggtcatcgggccggacgagaacgggatccgtcgagtaccgcttcaacgaggaggggaaagtggtgaaggtgaccaccaccacccgtgtccgtgaggtcgcgcacacgcgcgtcaccaagtgcgccgtcgagcgccgcggctgggccaagttcggcgccgccgcgcacaacgacgacgccggcgagccagggccccaccggttgctcgtcaagccagacatggccgcacatctccccggggcaccaccacagctccgcatacccgcgccgcttgtccccggcgcggaggtgcacggagaggagcgtggacgggagtggattgctgggccgcgtataggccgacggttgagggggacgaccgccgcggccatccgcgcgacagcagccatcggcggcggcgcccgtcgcatcggccctcctctccgcagcgctcctcccctgccagccgccggccacaccggccctcctccccatcgcgtcgaagacgctgccgccatccacatccaagcgaaaaatgagagaggaaagagagaagagggagagagagaggggtgacgtggacaccctgtcacgtgggtcccacgctgactgaaccgccacgtccgataaaaccggggtgaaaaccacctaggaacctaaagtgaacggttttataagttgagggatatgatatatctgattttgcggttgggggacgattttgtaactcgatgacaagttgagggaccttcggcgtactttttcctccacaaaatggtttcaaaatgctttgctatgcataagcttatttgaacagttgtttttttttataaaaaaaaaacgaaactgtgccttcctctctcccctacttagagcaagtttaatagtataaccaactactagcttcaaatcatttatagctaatataatagttaattcatacaatagttgcttactatactattaatacctggtcctacctgtcatacacacattacgtttttgagtctgtgctgtagctggctatagatctgtagcccgctgctcttctatctctttaaaatatgtttatagctggcttatagcctgctattgtacctgctcttatgacaactaggctgtgttcgctggattgtgttcccaaccggaacagtacacatggaaaacagaacggtctattagcacatgattaattaaatatttgctattttttttaaaaaatagatcaatatggttttttaaaagcaactttcgcatagaaaacaagaaagataagttaggaaatctgcgtaggaacacagcctaaacgtgtacggagtaatcagatagctcccttgatacttgaacgtgccctgcatgccgtacacgagcagaacctgcatagatcttgaacttgttgcgctcatcaaagaggtcagaatgccacgcatctctgatcaaaacacacatgttcgatcggcttccacgcatagtgcaggtgtcacctgttgttcagcatcgtcagcccaattgcagccgacaggagtattctccagaaaccgcacgtggtggacagattttgtgatgacagaatgaaccctgcctgagctgcacgatggtctgttcgaacgctgaatttgcaggatagccttcgaaaacgtgtgaagattttacttcaaattcccgggtcatccacgaagcgcgcatctggaatacgtaaaacggtggtgttttgtgacgataagtcgtccgtgcaaacgaacttgctggaatttgaaacgcgtttacggaacggaagcctctcgattcaagataagatcagtgcagcacgagcacatcatttcgttgatgattcagtttattcagagatcactatcgattgatacaccaatgtctgttcttttttcagaatgataggagtatttacaagtttacgacttctactcatgactcgatcgcttcactcccaagtcccagtagcaacacaaacagataaggcagcctcagtcttctgccacctcactttcactcacgtcccagcattgcagccttgaacctcctcacaagctccttcctgaaatcaacaacaaatcacccaaattaatctcatcaattcatataattataaaatctgtcgcaaagatttgaatctttttggtataaaaaaacgatgggagattttgatttgtggattgcaattaccggagcagctgtctgtcgaaggaggaagacgagagcaatcccctgttctcctctgctcgtctgatgaggtacgggatgatctgctccactggaccgtacggcaggtacttgctcacctggaacccggcgttgcggaggccgagcgagaggccatccgccatgcccatcagctgcgcgaactgcaggccgcggtcgccgccgccgccgatgccgagctccagcgccctcgccgcggcgagctgcccggactcgacgttgtgcgtggcgagcgtcacggcggcggcgccgcggcggacgcggtcgaggaggaacgcggcgcagccgttgtagcagtcgtgggtgtcctggatgctgcggtggaccggcgacggcacgccgagggaggccgcgaggcgggcctcgcgcgccaggtacgcgccgcggaccagcttgagcgcgaggcacacgcgctcgccctgcgccgctcgcgccatggcctccagccggtcgcgcgcgtcgcggaggtaggcctggacggtgccgtgcacgatgggcctcccgccgccgttgaacgccagcgcgccggcgaacgtgaagtagtcgatcgccggctgcacggtggcgtactcggcgtccaccagcagcgggatgtcgtactccgcgcaccgctcgccgatcgccagcagccgcccgtgcgccatctcgagctccctctcctcctccgcctccagcgccggcggctccgccgccgtcaggtacagcgggctggagacgcacagcaccgggaacccgtgcactttccatggcagcttcgtcgccgggtgcttctgctgccaccgcagcagatcactcgccttctccagcaacgcgaccgggcacagcgccgtgatcttgatgcacacgctcgcctgcaacgaacacgcaaaaatcccaaagcaattcagcaaccacacaaatactgtcttagcttaatcactatgctaattatggtgtagtaatctcgttctgtagtgttgttgagtgtaattaagagtgattagagatgtctaaaaaaaggattagttgatggtattaggagggttttgatgagaaagcgggtggaatggaaacgagcggcggagagagcatgtcggaatcatgtggctagttttcagggcccacgaggcagtggcatccgtgcgattcactggcagtttactaccggaagattcccaaggaatccgcgggtccgctcgcgcaagattccgtcctacgtggcagcctcctggtcccacagccacgcacgccgacagcgaggagagagaaacaccggcgagggttaagcggcggcggcggcgactcaccgagccaggaggcagcgcggcggcgacgtcgatggcggcgaggaatccggcggcgttgcggtcgcaggcggggccgtcctcggcgtcctcgatgccgtagtcgaggatcccgcccatgccgccgcgccagaggcggcgcaccgccgcggcggcctcctcggcggtctccccggcgcagaagtgctggtacgcggtggccctcgccgcggcgcgccccgccgcgctcccggccaccgccggcgacctcagcgccgccgtcgccacgtccacgagcgggcccaccgacagcgcctgcagcacggcgagcgtgcgcaccagcgacgtcgacctctccccggcgaacagcctctcggtatccccaaactccaacacctgcgctccctgcgcctgcacctgctcctgcacggaagacgcgacctcctccaccgcctctgcggcgcctccggcggccgcgacggccgcctccgggagcttggctgcggcggcggcggcgaaggaggcaagcacgcgcttctggatgcgggaggcgatggccatggaaggtcggacttgtgcctgacacacccaagaaaacacaaaccaaagcaagaaatgctctcctcggaggaagaagagattcagaagaaggcaatgaatttttctccggtgcaaaactagcaagacgaggaggaagacgagcaccaggtcggggcttataaaggagaaggaggaggaagtaaattgatcaaaaggctgtaaattcgcgagctggttgaggttgaggtgaatccaagaatggaggagatattgcggggtttttttgtttctatatataaaaaaacgaaaaaaaaaaggagaagactcgcgacaattgacagggagaggatgaacgagaaatgggatggaaaacaaacggaaacacgaccagagtgaaggcgaggttaacgcgcgcgtgaggcaaaaaatatatatatatccatgcaacggcgtgtgagaagggacatgatgatgaaagcgagcggcgagcgagatcgccggaggatgctgctgactcggccctcccttggaatgcgttgactgactcggatcctgcgtgcctggatggattaatctttttgtttaatccctttccttccacgcctcgatctctttccttgcaagcatgtactccagtagacaaggttgtcaggatcgggataccagacagtatcgttttgcttaaagtaatatcatattatagaatcgtatcatagtatcgggatactatgatattttcttttttaagtttaattaatatttatattaattatatatagacattctatataaaaaaaatatagtaacgatatatgtcatgcaaatagagacctttatcaagagaaaccacattggttttgatatatttaactgatttttatataaatttgagcatatttatttacattattttcaaaccaagatattttaaataatattttgtagtatcgtagagatcgtagaatcgggataccacctaagatttcgtaggatcgtgtagtaatgaatagtaagatcgagatattatgaaaattaggatattaggtgggatcggtatcgtttcggcttggtaggatcgtagtatcgtaagatactaggatacaaatcgggatactgacaaccttggtagtaggagtagcactttccagtttccaggtctcttttaggtgtttctcaaaaggaaaaaaaaagtcatttaggaactgaaaaaacgtgctggaatccgtttctcttaaaaaaatgtgctgattttgaaaagaaaagatagaggataatttacaatatatagacggggtctacagaaagaatataaatatgtttatgataaagacatttgagactatgccctttttttttagtattgtgctctaatttaccccctttttgtttactctctggttttacgactttaatttttaccacttaaatctctctggttcatttgagatttttggttgtgctaaatagctctgctgcaaaatgggatagtttatcacgacatgattaattaaatattaatcattataaattttgaaaatggtttattttattttaaaacaaacctgtatatataaaaagttttttttaaaaggtaatacgaaaaataagtggtcaagacagtaagttttattaatccatgagacatttttttttaagaattacacaatacaacacagacacccataaagcacacgcactcacctctgtgaacacacgcatgtaaaccctacccctataagtatcttcgaagactgggccggtaaattctagagagattgacgaagtcaccacagacgtctcgctgtcgacgggtacgtcatctaccactgaaatcacaacgccgttaaaatcctgaaaagtttgctcccatggggagtcgaacctaggacctcaggtgatactgaggctcttgtaaccactagcttgtaggccctttcgcgagacgttttaaaattctaatgacagcactagcaatctgtaccattcttcttgatgccgacggttcctttttcttaaggtgatagttatggtttttactcacctatagttgttgccttgctgatggctggataatcagcaaatttcaaaagtcattttctgacttgacagcatgaaaatatataaccttgctatccctttatagtttgaatttggattagtcattactagaaaatagaaatgttactctgacttactttttttttctcacgcgatttaacttgtaacacatatatccgactattttaaatctaaacatgtgttttgtttggagagcttaaaattctgagaaccagctagttggtagccagcttcgaatgtggaaaagctgggttttccagtttctggcttctagttcattttctgtattatacaactacagcttcttaaaatctgaatcggaagctaactgtttgggtgagcttctaattttggatgttacataggattgggaattcaggatcctctgctttgccaactgcagagtcatcagtatcctccttgccttccaggttaatttcagctctcacgaaatgccagatcaagctgggaatctgggatacgacgagcaggatatgaatccctacagcaaattaaaaattctcataactattaaagaaaatataagctttggtaaaaatgtaaaatgcctgacctgagttctctgtcgtattgtgtctcctcggagggcgaccggtgcagccagccaacggcggcagccggccgggaccgcggccagtgcagcgcgcgccccacgcgcacgcactcgataccgacggctgtgccgacagcgacgcggacggccgtggctcgccggcggtcgacgtcgccggagacagccgctgcaaattatgacggcgcgcccacacacccacacacacgtgaggctgcctgcctgcccagcctgggctttgctcatcagcatcagacaggatcagatcacagtcttaattagctgctgctgctgctgtactaattaatggagtaggagtacttaccatagatgcataagctgacactcgcctgagctggacctgcatcagcgtctactgtaccatgatcttgatgacttgatgaatcatcgatgcgtcgacctcccggttagctggcgcgccgacttatcgatccgtgcgtgttaattaatggcaagggctcccacataaccgtgaaacttctgctctaaaccctgcgattataatacgttatcatctctgatggttcagccatgtgagctattgctaataaagaattgaattgcaagttgctgctgtgtgtatcgtcgtcatggcgattttgacagttctgctccctccatgtccaaatatatttttcaaacacgtcaaacgattgcacattagtatattagaataaaaattcattcttaatatatttggatggaatcattcagtctactcggcgaaaaaaaagtatattacaagaaaataaagttttacttacacaacgcgataggtcgtaccggccatttctgaattacaaggaaagaactgcagggagagaaataaggaaaaaaataaaaactaaaagctgccgctcctaaaaagagggagagaggaggtgaaggaatcacatatcgggccccaagctccgcgcccaaatactttttactattggctgtcactgtttcaatttttatcggttaatggttttcttaaactcttttcttctaatatattgacgtgcaatctttttgcgtgtttatttttttttctttttctttaagatggttagactatgatgagtgggatattgaattattgatacttatgtttaggacgtaactactttgataataccaaactatttcttaagatttttttttgttgtaaaaaaaagacgtacaatcaaaattgaaatttgagtagttcagtcttcacccgataagtattccatggaaacggagggatcggagtaccatatttttgttagctacacggctctttgtgtgtgacggtcggcatgtatatatggtggtagatgccagcaacctacgcggcctttgccgcgccgttgcttagctacttcatctctaattatcttccttttggctagtggttgaggcagcggttgttatctgtctccgttatcatgtcgccttcctgttcttactcttgattttgctgtcgatttcctcagctcacaagggtcacagtcgcatgcatctctgaattgaattttgctgtcgattcttgcagttcagttggatgccgtgatcaaccactgtactcagccgcggttaattctctgaatctcttttgtcccacacggcgagagagagaaattatcaaatgaaaatgaatctgacgaagcttcgtaagccgctttcatcttacgacgataaaatcaagtcaaatcaggccaaattacccgtcggcctagctttgcgtgggatgcgtttggtctcgtctgcatcatcatcgctgccggtgaagtggtaagcccgccgccgccgccgaccaccgccttgaggcttccttgggccaggctctatgcgttctgggcttcacctatgcactgggccgtcgtgacttgggccgttctcagctttgacttgggccggcctcagctactttacggggcctggttgcttcttctggacttggttttccagtggaataagttcatctaaggtcccttaacttgtcaacgaatccgatttccgtccttcaaccgcaaaaccagatacaacgagtccctcaactatcaaaacctatgcagattagatccctcggcggtttttatggcggttttgactgacgtggcgcctatgtggctaatttgactcggtctcgatctgatgtggcactgacgtggcaatttgatccggaaaaataataaaaccagtgggacccacatgtcagtttcacacacaaaataataaaaaaattgtgggacccacgtgggccccatatgtcatcctctttctcccctctcatctctatcctctctctgtctcaccggtgggagaggaccacgtgaggtccaccgtgccgaggctcgggaaggccgatggcgtgcaggaggcggacctcgccgtcgacgccgccgcctgctccgtgcactgccacacctacgtcgccaaggacacatccaagttaagcagagcaccaccgttgccacgaacaccatttgatgacaacacttcttgaagaaatcgattggatcaagcaggtgctgcggatgtgcggcttccaatgaaacctcgtctacacgcgcgcgtgcatgtgcctcaacatcatccctctctcccggccgtgcgcgatcaggtgagacgccgccgtgcggcgacgccaccatcaccaccagtccaccaccaccaccacctcatcaccatctcgtcgtctctaaccgttcgacgcattaatctttcacgtacctatcgatacagtgaggcatcgacctatccaaggtggcggtgctcgtcggcgagaagggcgatatcgacagggagcgcctcctcccggggctgcacaggacggtgatcctgccggggatggtcgccgccggcagcgaagagctcctctgcgacgaggacgggtttaccacggaggacgtcgtggccatagagtcccccaacatcgtcaccctcgctgacggccaggacatcgccgccgccgccgacctcctcaaggccatctgagcgagctggatgctctgctctgctctgctcagcttcacttcacttttgcaaattaagcttgcttccatagaatattggaatggaagtataattaatcgagtcggctcaacggcggcacgcggctgcagcggcaaccggcgaggggaagaggaaggggcctcccgcagcgcctccttcttcgcaaggagggcgacgatggcggcctccatctcccccgtcgtcatctccataggcaggccgtgcagccccggcgtgccgcccggagatcctcggtgtcgaggtggctgcggcggagacggtctcccgctcctgctgccgcccgccacggcctcccacggcggagacgaccgttgagaggcaagaggggagctaggaggcgaagcggcggcgagggatgtggcggtggcaggagcggcggcggagtcggtggtggtgttgctggacagagaagagagaggaaaggggatagagatgaagagaaggagacgagagagaggaggaagaagggaggggtgagaatgacatgtgggttccaccatttttttatttttttctgtgaaactgacatgtgagtccccgtattttattatttttcggatcaaattgccacgtaagcaccacgtcagtgccacatcagatcgagactgagtcaaattagccacgtaggcgtcacgtgagccaaaactgccatcgaaaccgccgagggacctagtctgcacctgttttgatagttgagggacccgttgtatctagttttgcagttgaaggacgaaaatcggattcgttgacaagttaagtgaccttagatgaacttattccttttccagtagagagaactatagggccataaggtccaaggaccaccggcccggaccaaggcacgatcatttggccaggcccaagcacgacatggcccgactagtgtcgggcccgtgctgacacggcccgacagttgccttggcacgatgggctggcccgtcacagtacggtcgaagaaaaatagtagagggatacaaaatatacttaatcaaccatataaggcaaggcccaaagaaagaggaatacaaaatagattatttccagccatataagacacatcccaaagagttgagggggaaaaatagacttattctatggagaagcacaatggactgtcgtgccttcgggccaacccagcatgacccgagtcttattgggccatgtctgggccatgtgtgtagcccatgggctagcacggcatgccccgacgtgtaggtcgggccatgctggcctgactgaccttggcccagcccggccgtgccaggcagcccatttggccattatagagagaacagtatctgtagaaaatataaataattgagaatctgacaggaaaaaaaacattcagaaacctgttctttcagaatctgatagtaggaaaaatcatccaggaacatgttcattcagaaatctggtagggagaaaaaaccattcagaaaacatgtacattcagaatctgatagaaaccctgttcattctgattccagtaggcagccaagtagccaacgcagtgacgcacggacagccaccgtatggaaatggagtcaattcatgaagctagcaattgagtactgtagtaccatctggaaatggagtcaattcatttcatggagctatcaatcactgttgtacgagtataccatatgaaaatggagtcattcatttcatagtagtagtaattactgtactacagtagaaacaggtagctccatgttggttggaaaggaagtataaatggagatgcagccttgcaactgcagggagcagcaaaggcaaaggcaggagtgcaggaggacacagtggcatggggctcaatatcatcatcagagtcaggccaaacctgggtcaaggctcaagatggtccaacctgttgtttgtcagctgatacccatctctacctgcttgtcttccctcgcgtattctcgtgggtgggatcaccaaacaaaccaaactagtggtagcagctcattttgcagatccaacctcaccagatccacaaattacctggcccaattatgttcttcaggatcaggatcaggctcagggctactaaagtcagaagcagatgaaccaagccaacaacaaccagtgcagtaattgaagcagacactgcaccaaatggcgcggtttcttgccaaattccaactcccgcctctggttcaaaacttctggagcaaagcagtgcatattcaggtcagtacaaagcagaacaaagcaaatttgtgttcaacatattggtgttagcagaatagcagttagaaccttcttcaagccgaatgaaaaatgcaaccactggtgctaaaaaaaatcttacagaactctcacaaacaaagccatttgatttaactagatgggagttacaggaaatctagattgactcacagcatgccacatctgcgtttgtaagagttccgtaagaaaaaaaaaattggtacgcagggccagttcaatttgccaggctccaaaaagaacttgaagcaatggagagcaaaagagtgatgtcctgtacaaaaaaaaagggcaatggccatattctgtctcttgtaattggttctactaagaaccgtgtttgcttcaggactcatacagatttataaacctggcaaaaatctaatggctactgctataaactgaagaaggttacctccatccttatgaacaggtcaaaaggatatttttcccttttatcgcacatccaaatgatcatgatcatagtcagatcatgaccgacaatgttgtacataatgacacaattctgacttgtatttttgttccaccggggttactggtccgttgattatactcttcccatgggtgaaaacggtgggtcaaggacgatggatggaggtgttttttcttttcgcctctttgttttcttcttcttgttctcttttgtggttaccgattcaattagctgcttgacttcatccttcaggagcatcttcagtgagctggagtacagcttatgcttgaatttctcaataccaatggcagaagaaacttcagaacagtgaagcaaacaaatgcagactgaaaatgcctgcaatgctgacaaccgtgcgtggaaatccaccgaaaaatgtccattcccaactgccttcatcgaaatggcagggagagcctctttgttaccctgtttcaatgtttggagagcactaatcagtaacgtttgttactaaagcatgtaaactgccgtgtctataagtaaagatgtagtatatttctccagtacttttaagggaggatttaacaacatgatcttcaactacatctataaaaaatattatggcactgctaattcatgaatattcagacatactaaggtcatgatctgaatgcaggaacttaccgccttaattgtgtttgcagtaaaagtataacaaggagaaaaattataaggcgtacctgaaaaggtagttccataggatgcttgctttcagtcatcactgaatcaacccaatgactatcatatgcattgtcaaggacaacaattgggcaagacatatcccatccaccacaatcgcaacctccaccagtcttcaggcggtcaagtagaggtgatgggctgctttcatcatccctcggtaaaccatgtgccccgcctgctgcagccactttaatggtaccggatgatgagccgtctttcaattctttggattgggttttgtggaacggcacttggattacaatagcagcaacctccaaatgaggatggagatcttctcgggaccaaagactagatgttgatgcatccgagttattccttgtattattttgccgctccatcagattattcctctctagagaacccctagatatcgaattatttacagcactgcagaattttggtttgctggaatctgtacattgaattctttcaacagcagaacttcgtctcgcatgagcaatatcgtacaagacaaactcactgatggctgagttattcagaacaccattttgtccaacttcagagtacaaataggaagacacatgcatttggcctacaattggaggcaaacatccccgtctatcctttggggtctttccaacagtacttgttcgcttccctgtgctatggaaagtgtaaatccaattcaattcgtttccggctttccaaatgttagcataaatggattcttctgggcccttggtacagaactcaaaaccaaaagaatcattagtgggatccagtttaagaaccgcatgaagatgagttggtgatgaagtaaccgtcaaaacttgagcttccttactttgctggcaattaggtgtgaggctttgttcagtccttgagataccgctcaacaaagatttccgcaatacacggccttttccttcaaccagcaggctactatgtttggcatcttccttttccataagagacggattcctaagagacttggacttcatgataggatccagaattttcttgaatggactagatcgagcttttgtggtgctgttagcaccatgagtactctctggtggacatgtagcatcaaaaacaccaacctttgttgacaaggacttgggcagtttatttactaggtcaccttcaccatgcttactcccatcagaataaacatcaaccgaatgttggcaattcgatcttgcatctttgctacaggttccttctatctgtctcgtgtggacacttttgctggtgtcttcatcaagagatatctccaggaaatcatctcctgcacaatctttcagcagattgcagtccttgcgtggcctcccaagtcttgaatgttcatcaggaagctcacgcaatgaaagactaaggaactccctggtagcctgttgaactttactacttgcatctatggaagaactcggtttgcacgaacggctctgttgccgcgataagtaaggtccacttgtgctaggctgagaggatgagtccacaatctcaaaggacataaatgaatctctactgagtgcagaatctattttcctccttccttcttggagtttcctcagtctgctaacatcactagaactctggtacatagagccgcgcttgtgcatgatgctatcatcttggtatgcctcacgtcggcttgaaggcaaacttttgcaatggaaatttggaatctgctcgaggtgcagttctggttttccatctgggcatttcaacatgtggtgtctgcccggttgcacttccctgctaggactgtctgcctcctcattgatagattgcattgcttccttagctactcgttgtcgagaacgatttcccatagataaaacctgcatgtcatcaaaccattatacattattagatgtttaggtccgtagcactattcaaagaatcattttttttttttgctgcaggaaaggattaccgccttcttttgttttgccaccaagcaaataatttctactagtacactgcaatgaaaaaggtggatcaatcttaagatccacccacccttctgtatcttataaaggtagaaatctacagtcatacacaagcatacaagcagtttgagcagggaatgatactaaaataactaaccaagagaaattggggtaacaaactggatgctgggatgcaaaacgagatagacaatagaagaaatgttgaaatgatgccctcatcagtaaaggaaaaggtgggcgcagtggcgtcatccctaatcttagaaccataaaaggcaactactataaactccatattagtagcctagtaggcaagacaagtttaagaggaagaacacaatatgcctaactaaaaaaaagatctacttaatctactgaatatccaccctatattatcaggaaggattaaaaaaactgttcttttttttttccttttttaagcgcaaactgtttcttttctcatataaatacagtgcaatgcatttcttgcatccaaggaaacctcgaatctgttaaacaaaatctgagagaaagatgaacatgtccacatgaatgccagtcaaatccctccaccaaacagccaaaactcttcctgtccaaaaactccacagcactctcgcatctgcagcaaatccagccaatacaagtcccactgggagctcttgaggaaacacataaacagcttcctccaaagaagagttgtccctctccagactccacccgcaaaaccaatccaatctcaatcaccccaacccaaatccccaaccaaccacctcaagaacacagccagccaagaacaacatctcccatgaactgaaaaaccttctgaagaatgaatcaagaaacgcccattacctttgcaaggcgaaaaccagatcaacgctgaagaagagctaagattcctcgagctcctctctcactcactctccctcttgagcgagtggagtgaggatgcaagaggcattgggggcagtcgccagcacactcttcttggtttcgcctctcctcttcctgagctgagcttgctgctggcggctggcgaaatattctgaaatctctttgcgcgtttactagctatactagccagatacggagatgaaatatcgtcctgacacgaaggactaaagtgcaagattgtgtaggaagtgaagtgagtggcctcggatatcacgagctcgagggggtgtcctcctccagctgttgattaggccacctaatgattaattagtgctcaattagtagcaaagggtattttaattggctctctgggagaacgtgtcattgctggggagtagtcactgctcacagtggagttctttcttgtttctgaactgcgttacgttgcagtttagcagtactgctgtaaaatacgcgtgaatattagagaataacctaatatcaaatataattagaaaatgtgaggcttctaatttagatcgtctagtctatcatcttatagagatagccgaaaattcctgggcgtttctctaccagtaccactatgatctgcattgccttcaaaatggtcttgtaaagcttcctttttttgtcgttaattcattaatctttgctggaacaatattcatattaatatatagagtaaataaaaaagcactgaccttggagtgatggaccagtgcggcgttgagaaaattttcagctcaagacacgagaagaaataatcgccatcctggtggttgcttgcaacctggacgatctgaaattctgaatgctgttcgtctacctcgagccggaagaaatcataacgccgctccacccactatagattgcgtgcacttgactggatcatatcagaagctctcctgcttctttctgcttacggccatggccccccacatcaccgtagtagcatatagcacggctgcacgacgagcaaggccatggatgtcgcgcaggagtgcggacgacgtcactgacacgtggcgagatctttgaggcagggagggtgtggggaccactttctgatcaccgtgggctccactcgccagtcgccactggtttctcttcttctgccccctatcatcatccacctccagaatctcctctccacctttgcctctctctccctttcagcttttgatgattcgatcacctggtaacatatgaacattctgattcaagttagctaaacaatgctcaaagtactctgtactcaccatttcatcaagtaggtaaattgatgttcagacacataatcatctgatcaaaccaccgacagtgatttcttcaggctggaacatattcggtaaaaaagagctaagtgttgaaaactcgtgaaaatcatacctaaaaattttgtaaattgatgaaaaaaatattagagataaatgtagatatgaaatacattttcaccaaatctcaactccaaactcaacttcgtttaagagatttggtgagaatatatttcatatctacacttatctttagtatttttatcatgaatttacgaaacttagctcgtttcgaacacttagctcgttttcaccggatatatcatcgttatataaatgttcagttgcaagaactactagctatagcagcataccttgattactgcccctgtgatcgatcttgagcttacattaggctgaacaacctaatgtatgtagctggacaaatatttctgatgcgttggtcgcattatacttagcttaggttaattagccatagcggctacacatctaaagatgcagtcacgttgtgttgccttccaaaagcatcaacagcaagcatgcaatgcatgatgcgtggcgcgtcccccacaaaaaaacacaatccgacgactaaacaaacaaaagcatcgtcatcaacatggggtgagaacctgtcgtcaaagattcttggcctgatccacaaaccaccagcttaattagttagcttgtctcctagcaattactactgctaattagtcagtcacacacttgctgctggtcctgagaggctgagatgccctgtgccttttacccacatcttttactaaagtcatcctagtgctaattgactatatatacttgctaagtattctcttttttaatccaacaattgaagaaaaaaacattggaattggtctatttgcaaggtgcaaaatagcagaaaaaagagagagaagaaattactcagggtgctgatgagtcatgacagagatgcatgtgctaacctgcagaaacctcaaccctgtagcctgtaactctctgcaataaccaaacaagcgcttggttcccttgctgacgagcaaaaaactggcctgaatgcgactatgaacagtgtggtatcctatgtggctaatgcagccgtgcttgcatttcagagtaatcaagtaattggtcagaactactagttacagaagcagaagcgatatatagtatttatcatgcaaaatcgaacctgctaatattcagagtttcagaggagggatgatcctgtttcagtagctacctgtgaactaacccgtgccgaatttgtacccccgaaaaatcacatcctgtcacagtgtcatatgttcgtagccggtcgcagcgatcaaggtgacaccaatccgaaagcctgaagctcttaactgtgtgagtgccgtagtagcagacagagggaaagacaaggtgactgtagaatgattaattggctcgctccatcatccactgttcatgcacacggccatgaaatcagacaaggcaaacattagagtacactagcgtatttaataatgtactgtgtagattggaaaaggctggagaagctagttttaccagagcatttcagaagttaccttgatcacgagaccgatttactgacgagcaaaacaatgtgccaacaattcgatgttttctacagggtttggcatggcctttgttgtgcttcttgatttgatctacagttctgtgcacttgatccatggatgcatagatgccaagtacaagaactggacacgggagggtactagcacttgattaagatcatagttaattagtaactaagaatatcgatgcatggacgattgctgctggatcccgtactgttgtctgcccaaggaacccctaaaattaatcgagtcaatggccctcttaacttcaggtcttcaaccctcgttagaactaattaagcatcgtggagaaattagggttggatgcatacctccatccatgaatctaggagtcacgcgctcgcaccggcgacggtggtcacggccaccggcgatcgccggcttcgccgcctcgccggatctcgtagccttgcctcattctgttcggccatcggcctgcatgctaagtgggctggcccataacatgggccaaccttttggtcctatgtgggccgtatccgttggcgaattgggtctacattttggtggacctttcatgggcctcctcgacagcccgaggaccagactgggacggcccaggatttagtgggcctgtttagcgatccaaacaagtatggactttaaagtcagataatcagaattgggaaaagtacatcagaggtccctcaacttgtcatcgagttacagaatcgtcccccaaccacaaaacagatatatgacaccccttaatttacaaaaccgttcaatttaggtcctcaggtggttttgaccctggtttatccgacgtggcggctgagtcagcgtgggaccacgtgtgccccacttgtcaggtgtacacgtcagcacctaatctttttcctctcctctctctgttctctctccttccttcctccctctcgctctttgctctcgctagggataagcacggcggcgcgcgcggcctgagggtggtgcggccggcgacgagcggcggggtggcgtggcgatgcggcggcggcgggccgggcgcaggcgggcgacgcgactgcgggcgcggaggtggaagcagatggatgcgacgccggcgagctcagggcagagagagagagagaggggggcgagtggaggggaacagcggtgccgcctgatgttccgctcgagctgcgccttctcgatctgatcccgctccatctcttcttcctcgctggcgtcgtcctcctcctcctcgtccgggctacaccgccgtcgtgctttccgtccggcatcgtgcatcacggtcacctcatcgtcttcgctctgcttcttggccatcgctgccgccgccgccgcggggcaccctccctatgcggcgggggtggggggggggagcggctggcgacggggcggagaaggtcgatgagcactcattggcgaaaaggctgcagcggcgggagcacgctcatcggcgaaaaggctgcagtcacggctggtggtggaaaggcggcagcggcgctcgccggcggctgccgcgtgtcgtctccgcaacactggcttccgtggacagtggccctacgcccctaccccctccttcccgctaaggaacctccgcgagctcgccttcatcaaccccaaggtatcgaccgccggcgagaccgcgagttccttaaggccatcctcggcaagctctagggcaaccccgacgtcttccaccgccgccgccttcttcgccccaccgtcaccactgcgccgcagctcggggggattcggcgtgcaccagggtgcatcgttgaacgaggaggcccctaccgctctctcgatggacgcctctccctgccagccgccaccacctcggggggattttgcttccaccttcgcctccgccatcgtcggagcttgtcggggtcacttcccccaaccctccgaggcgatgggcctaccgacacggacggcgatacgggcgccgtctccgcttggagcgttgccgctagcgaccaagcaatccccgccgcacaccggcgccgtcgtgcccctcctccgccgcacactggactccgacggggccgatggtggttagagcgagagagactttttttttctgtgtgttatgacacgtgggtgctgactcagcattgttgactgaagtcaactcgccacgtcagctaaaaccggtggcaatactgccttaggacataacctggttttgtaagttgagggatgttatatatctgtttttgtggttgggggacgattttgtaactcgaagttgatggacctctgatgtactttttccatcagaatttgtcggaccaaactttggtgggccagcggcagcgtcttatctgtataacttgggggaaaaagtacaccggaggtccttcaacttgtcatcgagttacaaaatcgtccaaccgcaaaaccggatacaacgcatcccccaacttacaaaactaatacaaactaaatcccttgacggttttgaccccggttttatccgacgtggcggctaagtcagcgtgggacccacgtgggcaccacatgtcaggatgccaagtcatctctttcccctcttctctctcagttttctcatctaggtgggcaggccggccggcgggttggggagaaagccgacagggtgaaacgggagaggaggaggtttggcgaccggtggcaggcgggtcggcggcggcctcccccacgccatggacgacgacggtgatggcggcctcactctccccatcccgttccacatcggcgccatccgcctcagctctcccctctccccgctcttctcctctctccgccctccagat

SEQ ID NO: 7398 - DNA, 14076 bp, Oryza sativa
catgttgtcatcttttgcaaaatacattctctaaatattaactaagattatcttcttcttttaatctcagtgggagttcagtttcatgttagtaacgtgagtccggagcaagtaagcttgttcagaagaactgagcgtgaaagggtgaataagcttttagacgaatacgtccatcaatgctggaaaatgaaggtgctatccattttccccatcttcctccatttctcctgcagtttcatgcacctggcatcagatttttgtgcagtagttatcattaagatgaccttttggttggttgctgccacattagtagtagtacttttttttttcgcgaacacgcaaaggattgcacgtcaatatattaaaagaatagagtttttgttacacgacgcactcagccagaccggcctatgccaaggaaggaagaaaacaaagataaaaaacaaggaggaaaaggaaaaaaaactcgatacgacggtaactctactccaaacagcgggagggagcagaagtagtagtactaattacattaaccgttgaaactttgcacagaatcaaaatgttttcgaaggtgaagattcatgcttaaccttgatttacaatggttcgtatatttcaggtcaaatgtgagaaactagtcattgagaaagaagatgttgtagctggtcttcttgaacttattgcctctcatggcatcaccaagttagtaattgcagctgctgcagacaagcactactcaaggtacatctagcattacaaaattgtttcggtgtaaagattcaattgtgctatgtatttggtagaattaggaagttcagattatatttatccttctcggtttcagaaagatggacaaaccaaagtccaagatagcaacagaaatcatgcagagagctgacgcatcatgccagatttggtttgtgtgtaaggaacagctaatctgtaccaggtataatctgatgtgttgcacacttttcgatttctgatgactattgaacatcgaaccctcagaatctctgattcagttctccatgacagggacaagaaagtagaaaccacacaatcagttacacctctcagccaacttttcaagattgatactcctcccagccctgatattggtcagaccattctgcaaccgtcagctgaacaggaacaggtttcatcagattatgcagtagatattctgatttttaaaattgtatcttcaaagcatgagtataacatgatagcggtgcttttgttttcagaatgacaatgagatggaattggggttttctgatgagctcaatgatgcacgcgtagcagctgagaacttgatggagagagctttaagcgaatctttgaggcgccagagagcagatgaacaagtggtttcatctcttcagaaagtaattatgctacccatttgactgatttcttcataaatgctaaactaaaagttggcaatactatttattttaaaagattttgataataactctgaacctcccaggtcaaacaattcgaggagttgtacttggaggaggtgaaaaggaggaaagaattggaaggagctcttgtcaaagcaaacttagaacttacacggttaaaacaagaaatggacatacctaggaatcaccagagcacaatcttgggggatcgacaagaagtgattaccgataaatttatcttgagacaacaaactgtcgacatgaagagtgatttcggagccacaggacaactaatcaagccacagcaggagtatcttcagttacatcctgaccatgacaatggtgtcagacaaccggaaacgttgctacaccgaaggagcctgactgcattttctccagcatcaactgtaccatcacagtttgataaagactccattccttcccacttcatctgcccgatttctcaggttttcatatcctcagacaaacaaaatctcaaaattctgtacttttctttacagtaatataaatacttttgacaaattatgttgcttcagaagagacgtttgagttgaccatgttttgatttgcatgtaattgcaggagatcatgagggaaccctgcattgcagcagacgggttcacctatgaagctgaagcgatcatcaattggtttgatgaagggcacgaagtgtctcccatgaccaagcagcctcttgtgcaccgcgacctgatcccaaactttgctcttcgttctgtaatccaagattatacaaggagaaaacagtattcattttcctgatgctatttgctccttttccccttctctgactcactcaattttttttgtgaatattgttgtgggtgacatcgcactgacaaatggattcagctgaaagcaacagcatttttaaacagttgtcatgtgttgtttgttttgagctgtcagctagtgcagcaacagagatgctgtgttgatgacctttttttgcctctttgatttataaccaatcaggtcagacaagattatgtgctggcataaatcataatatccctgaatgtcacattttgcacgatgaagcctaaacaatcacatgaaaacatgatggaaatgcagcccatcgttgatggcaaatatagtggaaagctgatactttctctccatcgttgccagagcacaggaagatatttgaaataataataataataataataataattaaaaatcagattgagaattgtagaatcagttgatggttcagaaaggaacacaacaatttcaaggcagcgaaacaactctgttagcatacgtggcacctcattagccaagaaatacagctcttaatgctgaacctagaaggtcaatttccatgtttgttgacaaacttaatacccaaattgttgtatctgagacgctaatttatatcagaattattcaaccaaatcagagtactctcacaagcatttcagcgcactaaattaagggcctgtttgattcagcttaagattattataatctggattattatgagcaagctgaaacaaacaaataacttattataatagattattataatctataagccagattactataatctggtaatccactctaaagatgttttttttaattattgggtggctaacaactaataatccagagaatcaaacaggtaacagcttattttttattggcttattataattcagtttatagtaatctaatttaataatttatattatataattatcttaagctgaaacaaatagatcgtaaggtctctacgggaagaaatggaggaaacgaatttttgggaagaccaaacatgtgttcctccctacatggccatgatcatgagactccaatacaagttctcttcctcttcgttgctccctcttttctgcttacacgtaggccgtgtcattgagttatgtgcttgcgatcacctcgattgaaggagaggaatggatgggtgctttgttctgtactccatgcctcagcctcttcttttcctccttgttgttttctccttttgctttggttcttcttttgttcctttctctttttctctcatgtaaatcttgatgacaggtatcagaggatgcctttgtgtcgtttctcttaatttatttcgtgtaaaccttctgctggtttaccttctgattttctgaatgagaaaatacacccactgaaatagtgagtgatttcatgcactgaataagcttatcacttaaaagaaaactttaattttggaacctaactgtggagtttctttttgtcatactctgtttttcagctttagcttttaaaccgtaaataatatagatataaaagatttacttataagctatttttattatttcatttatgttttcatgacttatcaactaaagctcaaacgatcaaagcctaaaggcacaacaaatcacttcagcttggccgcgttcttttcagtggttgggtttggacgattagccaaatgtaaaacgagaaacacgaataacatataattagttaagtattaattattaaaaaaattaaaaaataagtttatttgttctttaaaacatcttttataaaaaaagtttcgcacaaaatacaccgtttagtaatttgaaaaacgtgctaacgaaaaacgagaaatatctaagcggaactagctgtttagaatgtggaccctttttatatcacgtgtcgtttgtcaatggcacgtatttctcatgtgattacacagctccaacctttcacagcgatgatataaaactttcactcactgacagcatatatatttgtagtcattgtttttttgagcggtatatttttagtcattagccaataagaaaaacaacttttatcctggagtaaatagtaattagctggtaatcacatgggcaaagttgtaaaattacctaacagcgggccccataggtcaggccccatcccatcaggggtttaatccagccgaaacggcgagtagttctcgttcccctgaggcctgatcaccaccctctctcctcccctttccctgaccccgcgaccgcgccgcgcgaggcgaactcgccactccgatctctctctccggcgacgccgccgccgccgcacaggttggtagtcaccggagccctcccttccgatcaacccttgcgcgcaatctacccatgcatgttcatggacatgacctgctgcgtttgtttttcactgttcattctgatgtctctctctttttttttaatttaattttatttatgttgtttgatccgtttttgtttgtgatggttggggagttagggttttgctctctctcgcgcggaatggagagcggcggggtcgacggcgagaggcccctgctgcgcgaggcgggggatttgggtggcgaggacggcggcgcaggcggagtccccgaggagggggatgcgaagggcgatgtgatggcggcggcggcggcgcaggggggcgatggcgatgagggtgtggaggcggtagatggggacgggagtaacgaggaggaggaggttgtgcagacgcccgatgtgaagcagacgcccggcgccgcggccgcggcggcctggcgggaggcggcgtgggaggaggctgacggcgaggagttcgtggatgtcttggaaggggacgtggatgagaagcgtgaggatggatcggccttggagaatggggaggatttgttggcctcccgttctctcgctgtcgagggtgacgaagaagggtatggttcttgtgctgatattggtatagaagaagacgctgagggtgatgcgagtcgggagcgcttggaggaggaagccatgacggaatcaatcagggagtatgtgacagaagctgttttggctgaccatatccaggagcaaccggacaaatcgaagagtgaatctgaacatgtgaaggttgctcagcacaagtcgcagattgcgaagagcagggaagagggacccaaacaatctggaggcgaaccgtccgttgttgtcgaggaattgaatggatcaagctcgtctgatgatgagagtaaagctacctccgctcctcctgcacgatccattagtggtgctgcaggtcgttctaatggcccctctttgccatctcgtcctgctgggcttggagcatcgacttccttgtcgcagccctcagctcgacctgttcagcagacccgcgctaatggtccagtcgctgtggacagagaaactcggcaggatgttgaatctcctgaggatggagacgaaaatgatgaaatccgtgagaaactccagatgatccgggttaagtttctgcgtcttgctaacaggtttgggcaaacacctaataatatggtggtttctcaggttctttaccgacttgggctggcagaacagcttagaagaaatacaggccagggtgtttttagttttgaccgggcacaagatatggcagaacgtcttgaagctgctggaaacgagccccttgatttttcttgcaccatcttggttcttggtaaaactggggttggcaagagtgctaccatcaattctatttttgatgatgtccggttggaaacaaatgcttttgataccagcactagaaaggttcaagaagtagttggtgcagttgagggaatcaaagtaaaagttatcgatactcctggcctgtcatgctcatcttcagaccagcaccacaaccagaagattctcaattctgtcaagcgacttatcagcagaaaccctcctgatattgttctttattttgatagactggatatgcagaccagggactatggtgatgtgcctcttctgcaaaccattacaagagtctttggagcatcaatctggttcaatgccatagttgtgctaactcatgctgcatctgcaccacctgatggtctgaatggaattcccctgagctatgagatgtttgtaacccaaaggtctcatgtagtccagcaagctataaggcaagccgctggtgatgtccgtcttatgaatccagtgtccctggttgaaaaccactcagcgtgcaggaccaatagggcaggccagagggtgttgccaaatgggcatgtctggaaaccacagttgctattgctttgttttgcctcaaaggttttagcagaggccaacgcgcttctcaagctgcaggacaatcctgctggtaaacctcgtatgaggattcctccacttcctttcctattgtcttcgcttcttcagtctcgagccccactgaagttaccagaggagcagtttggtgatgatgatgatattgaagacgatttggctgatgattcggattcagatgatggttcagactatgatgacttgcctccttttaaacgcctcacaaaagctcagcttgcaaagctaaaccatgctcagaggaaggcatatcttgaggagctggattacagagagaagttattctacaaaaaacagctaaaggaggaaaggatgcgccgtaaaataatgaagaaaatggcagcagaggccagtgcaagaacagatgacttcagtaacagcaatcttgaagatgatggcagtgctccaacaaatgttgcagtgcctatgcccgacatggtattgccctcatcgtttgattctgaccatcctagccatcgctatcgtttcctggacacaccaagtgaatggcttgtcaggccagtgctggagacccagggatgggatcatgatgttggttatgaaggtctaaatgttgaaaggttgtttgctgtgaaaggtaaagttcctttatcagtgtctggtcaactttcaaaagacaagaaggattgctccctccaaatggaggtcgcaagttcacttaagcacggtgaggggaaaaccacttcactggggcttgatttgcagtctgttggcaaggacatggcatacactcttcgtggcgagtcgaggtttaaaaacttcaggcgcaataacacggctgctgggatatccgccacactccttggagattctgtatccgctggtgtgaaggttgaagacaagcttgttgtgaacaagcagctcagggttctggttagtggaggcgctatgagcgggaggggagatgtggcttacggagggcggcttgaagcaacattgaaagacaaagattacccaattggccgcatgctttctaccatagcgctctctgttgttgattggcatggggatcttgctgttggctgcaacatccagtctcagattcctgctggaagagctagcaatttgattggtcatgcgaatctaagcaacaagggaactggtcaagttggcattcgcctcaacagctcggagcatcttgagatcgcccttattgccctcgtgccaatataccaaaacatcaagaagttattgcagagttaatccgtatcaaccagtatttatgtaagcgagaaaaggcagcaagataaatccattagagttaatgcaagcataaattagaactagagttaatgcaagcataaattagaactatctatttattttcttcttcccttacctacacgtaatagtgttttcttccaagtttttttttttttgatgaagttggatttgcagaacacatccttttcaggatttttgttgttatccttgtactctcaatagctgataagaaaaaaaaatgcactgctgttttgaaggctgcaaccgccgagtatcagatcgttttgctatatttgttaagatcgttttgctatatttgttactcatattaaattgtataaccatatattcttgtcccaatcgacttggaaaatactaatactccacattctattgtgtatagatattgtttggtcttatgattcttgtgttgtcattattgcctctagtggaatggttttcaagagtgatgtgataagttacaagaataatttgtcttcagtcagcttgactgcttcaagtgtgaaagcaatgaattagccccatcatttagcagtttggttgtttgaaggcaaaggcaaaacaacatatttacaataaaaaataatttataaataaaacttttatatacgtgttctcgacgatctagaaataaagattaaaaaacaaacaacaatgaaaaaaactctaaaattaactctaaattaatattaaaaatttaaattttagctgataaatataaacgaaaagagatggtgccaaatatgtatattttcacaagtcttcccatacaaaaccaattaacgtctcaattgggtcccactgccttaggcagttgactacttgactttgattcccgccaagtcttcgagggccccacctgtcagccgtggacccgcgcttctcccccgaacaaaatgaaaacgactaatctttataacgagcagagtagcatcatatctccagtttgttagacaagttaggatccttaaataacgtcctaaactaacccaatctgcgacataatctcgtttagttcgtggacttaatccgcgtctccgttggttaatatagttacagctctagctctggatcatcgcgagggagttagtttagttagttaatcagttgggaacacacacgtcggccgtctcgtctcgcgccattttttttgatgggctcgaggggcggcgacgccgacgcgtgggagacggcgagcgcgcggagcggcgtctcctcctcctcctccggccgcgcgacggccgcggcggcggcgccggcgccggagaacaaggtgttcgtggctctcccggcgcagcacaagagcggcaggtccacgctcgcgtgggcgctccggcacgtcgccgaactggctccggcggcgatcggcggcggcggcgaggtggtggtggtggcggcgcacgtccactcgccggcgcagatgattccgatgagcagtacgtgtgtcctcccgcttcttcgccttctctcgtcgtcgctctgcaaacccccacgccacaagctgcagggcttatatcagccgttcgattagctatgtacggtcaggattcagacggccctgattggctgatgcattttttgtgaggaagcccctgtagtttttacgtattccattctgatgcatttttgtgaggaagcccctgtatttttttcgtattctattctgaactcctttttagttcactactgagtcccagtcctgaatcccccaatgcggcgccccctgcctcgccggggacggcggcgaggggtgtcgcgacgggagctcactccggcgacggcgagcatcttcgcgcgcacaattatcccgaggatgtggctgggctaggatcgtgcagagattcccgcttccttttggtccaaatgcgactgggttttagccttttagggcaaaggggaagtattatttcctactgagttgttcatcgattcgcttgtctgaattgccaaaattgtttagtgtctaggtgattgtattcggttttttttttcaaactcttaatgcgaactgataatttctagtattggtgcccatggatgcacgctgagtcagttcagaatagaactgaagtagtggtcagtctcagtccacagttcacagtaaatattcattttagaagaacaaatcgcgtgaaggttgattagatgttgacctcatgtgttaaatttcagctaaatctgctattgcaacttcaaatgacatactttgttcgcgtggtgtactaattactaaacaactcatctaattacatggtagtgggaggcaagttccatgcaagtaaattgagaccggaacaggtcagtacttacagaaaatatgaaagggagcaggtggagaagaatttggatgaatacctcgagcaatgcacaaaaatgaaggttcaggcaatcttctcattcattcttagtaatgaagtctgaattgctatggggaacaagttaagtgtattatatttttcaggtcaaatgtgagaaaattgttattgagaatgaagacattgctaatgggattacagagcttattttgctgcatggggtaagtaaactcgtcatgggagcagctgctgacaagcaatactccaggtgtgtcttcatttctgctaccgatttgtacttttgttgcatcatatatctagctaagtgatgcctcaaaactctaatttcaggaaaatgaaattgcccaagtccaaaacagcactctcagtcacggttaaagcaaatccttcatgcaagatttggtttgtttgcaaggagcatctgatatacactaggtattaagaatatgatcatgagcagtatgcatgccatacctctggaccgaccagtcatctgtatattcatttcataccgacttcatatattgtttcctagatactagccattctgttagtgttctcccttttccaaaatcattttgagtaattctctctttaaactgtgttcagagattttgttgctcctatttctccaaattcacaatcacctgacactatcagaggctcaatatccaatctagctgcacggggaggaactacaaaccaatatgcaaacaatgcagttaacggttacgtacagaggtccatgtctgaaatggttgtccctgcatctagcagggtatcattgcaactgcattctcgatcatcgttacaggagtcccttagcaggctaaacatggagggcacctctgttgattcctgggatagcttccgcagaggaagctttccaagttcataccgagcttcttctactgtgactgaagaagtgttgagcgattctagttcatctggaatacctagagatggcatctcaacacttgcaggttgtgactttccaaactcagcactgcaccatgaacaggtaagctctaataccaaatttaagctttggatgattagctaggaatcttattccattacatggtgctgtatccagggtgacgcaggttcaaatgctaacctatttgataaacttgaagaagccttcgcagaggctgagaagtataggaagcaagcatatgatgagtcactgagaagacaaaagacagaagaagaattgatttcatatcaccaaaaggtaaacccttcactaagttagcataaaaaattgcaggtttttttacacaaagatctaatggacctggttacaggccaggaaatctgaggatttgttcttaaatgaggccaagcaaaggaaagaggttgaggaaaccctagcaaaggcaaatgtggagatacaattattgaaggaagaaatggatgcactgaaacacaaccgagatgacctcagcagtaagctttccgacgtgagtgaacagaaagtgacactagagcaacaggccgtggaatatggaagcattatcattgatctcaaggatacagttgcagcaagccaagccctcattgattcaatgcaaatggagtttgaacaattgaagcatgaaagagacaatgcactcaaacatgcagaagagctgcacagagagaaacaaaacatggtatcgagctcagacttggaatggagcactgaattctctttgttggagctgcagcaggcaacacaaaatttcagtgatgcaatgaaaattggagaaggtgggtttgggtgtgtctacaggggtcagcttcgtaacaccactgttgcaattaagatgcttcgctctcagaacttgcaagggcagtcacagtttcagcaagaggtaatagattaatagcaactctgaaaccataattgcaaattgattttgtattgctttagttgtactaaactaatgttactgggcaggttgctgttcttagtagagtaaggcatccaaaccttgtaactcttgtaggttattgctcagaagcttcaggtcttgtgtatgaattcttaccaaatggaagccttgaagaccatctagcctgtgaaagcaacacgtctccgcttacatggcagatccgtacacggatcatcggtgagatatgttcggcgctcatcttccttcactctgacaagcctcacgcagtcatccatggtgatctcaagccagcaaacattcttcttgatgcaaatttggtcagtaagcttggtgactttggaatctctcgcctcctaaataggtctagcacagtgtccacgagcttctaccaaacaacaaatccaaggggaacttttgcttacatggaccctgaatttcttacaactggggaactaacagcacggtctgacatatactcatttggcattatcatactgcgactggtgactgggaagccagctttaggcattgcaagggaggtggaggttgcacttgataagggtgagttggagttgcttgttgaccgatctgctggagactggccgtttgtgcaggctgagaagctgatgcttcttggcctgcagtgtgcagagcttagcagaaggaagcgccctgatcgtatgaatcatgtgtggagcgtggtcgaaccccttgtaaagtctgcttcgctgccagtagaaccagaatccattggacattgggtgaataagaaccgcacgccattctacttcatatgcccaatttctcaggtatgcatgtccaacctctccgcggtgcagtaaataacatgtcatagactcatagttgcattcacgataactgggattacaaatgtggtaagcaaaagctgtggatgttttgcttctttattgcaatcgagtatgatggaagcacaacaccatccatgtttctcagtacttggctgtgaacatccgtttggatgtagaggccggtttaatccattatctaaaagcaaatgtttctcagaactatccaaaagttattgtgttggcggttctgtgtatagtacgactgaatttaactttgatatttttagacttatggcatgttagtttagaaatacagcatctcgtgcttaaaaatcacccatgttcaaggcttaaagatactaggagctatctctgttctaaaacaagttctggttttaccgagagttgcttccttgagaactgttgccacacttaatgagggacagagatcggaacttctttctgagggaaaatatgaatgttaacaagtgtgcatgctttgatctctcagattttattgttgttctggaactattttttttttctgatataactttctgaataattatattatgcttgctgaagtagaatattaaagttccttgcagcattttttggtggggaataataatatgctactaacagtctaacagctgctgagcttggttgaaacaatattgtaggaggtcatgagggatcctcacattgcagcagatgggttcagttacgaagaggaggccatcaaaggatggctcggcagcgggcacaacacctccccgatgacaaaatcaactctggaacatcttcagctgatcccgaatctcgctcttcgttctgccattgaggaatttatgcagcagaagcagcagcagattccatcatagtaattagttcagtgaacttgattattcttagcttcataagttgtaaagttgatagctcattctttgttcagaagtctgctcgtgtagtgtagctgttttgttttgtgagcagcaacttacaataaatcgtgcatgctcatatgagcaggtgatgatcagctagcaaatgtttgatgtcagattgtgcttgaacataattgtttcaggccacttagaatcatgggacttatcagtttactgttgttggaaattggtaaaaatgaatatggagatgattttttccccctcgaggtgatgtctcctagtgggaag

SEQ ID NO: 7399 - DNA, 11102 bp, Oryza sativa
  unsure (1)..(11102): unsure at all n locations
aacctgtataaaaaaattctcgtctctcgtctcttttatcatattctcgtgtatgccttggtatcaacgatgcacatactatcaaataccgtaagtaggaatagcccatcaacaatatcgtacaacgtatttttagcatttggccaaaagatgagggcctacacaaatttggggtgagtgccctttttacctgacccacttgtgtacatcaccattaattctttcacgtcaaactagtttgctcgtgtcactgcactgatcattcagataattgttttacatatctagcttggggttaacccggcctttacatgagaactttccactagtagaagtaacatttatttattacaggaaagatcatgtataccagacatgaaactaacttctggagtgtggatgtttcaagagatgcatgcagtgccatgtaaagttagctagctaccctcaagttaaatagctttattgtggtgtagttagcatacatgtctagtgataaaaagtgagcatcaacagccaaagcccaaaagcattgcctagctagatggaaaatttgttgtcacaatgccattgtgcaaccaatggcaaaatgtcttgtcaggcaattaaaaaacggattgatggatggccattggactggccaatactatatcatcctcagcacatagtgcaagagaatgataattgaaaatgaaggggagaaccctacacatttgttttattcagaatatgatataaatctcgcttttctcaacacctttttccttaaagtacgacatgagatatatagggcatgtaatcaaagatatttcctttccttgctttttgttttaaaggaagatttttttttctttgttgagatcattggtaaattagctcaatgcacttatttttgtgtaaggaaaatcgagcaatttattaatttgttttgtggccgagttgccacaagttcagatgtatatctttcttttgagaaggttgacaaattgagttaaaagttagatactacttgactgaaaaataaggacaaatggattaaagcaagcacgatctttttttaagaacacaagaaagatcttatcaccggcatatatgcttgtagtcctcattgcacattctatactaagatacctgtgtatatgcatgctttttgtaaaggcttaaattgcccccagtagttactctaaaatgattacattatttcaagtagcagattccctacaattttcctatgatacatccgaatgcaatttttttttttttagaattcgtgaggtttagcttcccataggattggagtctatagctatttctattcctcctttttttctatttctatggatgaaattttcttcaaaatgaatagcccttagtatttagtatttgcaatttttgggaaaaaagatgaacggttaatgttttaaaatgaatagtgtccagcgtcagttatttgaaaaatggagggaatatttaagtttcagactggtcgagcttaccagctggaaccgatgcaattccaattaatcctctaattgattaagattcctacctaaatcctccatttcaacagcagagacttatcaatttatcactttctttatgtcacctcacacataccctgccatggttaagcaaaactacaaccgtacaaggtcaaaatatctagtctatatatcattactacctgactacatgaagatcattatatacattaacagcgatgtgtatactatggtttgacaagtacattgctaacaggacgaatgttggaccaacacactagctagatgatgatcttgacaagtttttttttctaaattaaagttgtttttcagttataagaaaaatgccaacttttttatcgtttcaacgcggttacattgatcaaagtagctagcagacaagtattgtcaatttgtcatggttagtgtaccgtacggctgtcaaaattccaccatcttgatctatctatccgactaggacaccaccaggcaccagccatggctgcaccagcaggataagtttttctgaactgtactgagtggccaagcgacttgttggacacacatatttgtaatgtttttatttctttcacttagcataagagtaattacacagtaaagctaagccacacagccacgcaatgtgccaagaacctaacatattttgcccaaacatataaatattcttcactgcatatacatcttagtttgttactcgaatgagtgttcttctccctttcctttcctttttccagggaatagattctaaactctccagagaagatgtgccctcgttttcttataccatccaaatagttatatttcttttttttttttgaaaaaaataacacaacagattctatctagattcgtagttctatgtggtgtctaattcagtactagattgttatattttaaaacagaggaatatgtaatatatcactccacaaacatataaatttaaatttgaccgctacaattaagttgtaaaaaaagaacaaactaaattattgctagtatgcgtatattcacatttatatttattttgttttttttacttgtagaaatcaaatttaagcttccatgcatgtttgtggagtgatgtatcatgtattaatctattttttaatttttttcataactatttagatgacatataagaaacaagaggacatcctcttaagggattaaaatagtatgccccttttttcaccaccttttgttttaatttcaatatataaggtgagtacttttgtactataaagagcagtaagtacatttacttttcaattccatataacatttgcttttcaatttcatatgctaattgtctagctagtgtgtatatataactacatggagaaatatatagggagtggaatcaagaggggaccaatgcacaacactctagctagatagtataagtcgccatctttgatatatctttcttattcgtacaagtggccagcataggaggtagagagctgttacgttggtgtgaccctgatttaatctgatcaatctatctccactgagtgcacgcatgcatcattaatctcactaagattaattaggagacgtaatatgcgaatgaattaacaaacgtacggtcggcagaggccgaagatgtaacccattttcgtaaccattgaaagaaaataatgttagagaacaacatgcctagctaacttaaatgtgcaatctagctacgtacgcactaggcaagatcggttaaacaaagagggagcaaattgacaagtgcacaaagccaaattaactttattaaaagttcaaaactgattgcaagtttggagcaatgaggtaatccggcatgcgtacttgagtcactagctcattcgctagtgctagctttgttgctatcaacttcattcaaacagagaccagctggcaacagggatacagtacatatatacatgcattctgctgttcatttgccttattaccatgcaccaatataatgcatcctcctctctagcttatcataagtactaattaactaattatcccagagcatggcaccaatataattgatccacttgagaccaagcatagtgtacacttgaacacatgcatgcattggcatgcacatagtacggcttgatcacaaacttaatcatcatactagcttccttggattaatatgatcatatcacatcccttgtaatttgcatgaattcttgcatgctcgatcattctgccttcttctgatcgttgtagatagtagctagccggattatattaattaattaatttaatgaatactagatgttgatcttgccgatgagagggatgccgatggcggtgacgacgagggtggatgggagtccgaagatgacgtggttccagaaggtgaggtcgtaggcgttgcgcgtcgcccgcctcgcctgctcgcacacgatcaggttcgccgccgaccccagcagcgacaggttccccgccaccgtgctcacccacgccagcagcagccacgaccgcgtcaccgccgccggtgatatcgtcgccgccgccgccgccacctcatcccccatcaacaacactacacccacatatataaattaatttacaattaccactcaaataacatgtaaaaaatgagttgttcttttttaattatgagagacaaaaaaaatttttttcttttaataatcattcatcttattaaaaaatataattacatttattttattttgacttgatttattgtctgatttaatctttttatatttacaaaagaaattgaataagatccattcatcgataaaaaaaagtcagatatcatgtattaaaagaaactgatgtactgtacagtacaaatgttagtgctgggtgagtcgggacacattgggtactagcaatagcatggtgcgagaaaggttgtgagtaagtacgtaccggtggggacgttggaggcgaggttggagaggaggaggatgatgacggagaggacggtgacgccggtgacgtggttgatctttgagtagggcgccatcacgttccagatggccccgggtagccccgtcttgttgaacccgctcaccgtcacgaacatccccgagaagaacaccagcagcgagtacgacacctgcatcatccattcacatccacgcacacgtggcacccagttcacatattgcttcttgtccgcatggccgccacgtgtacttgctcgtgtggcctagagttatagtgatttggacggatatgggttaccttgtcgaggcatggctcggcgtcgcggaagtcgacgacgacgagggcgatggcggtcgtgatggcggtccacgacatgttgaggccgagcatgtaggcgacgagcatgccgacggtgaccacgtacgcgaagctcttgaggaacagcttccgccggtgctccgagcactgcatgaaccaccggtgcttcgtcgagatgttctccgacatcatcgactcggcgtcgccgccgtcgtcgtcctccggcgatgcgggggtggcggcgtcgccgtcgtctttcttgttgttgttgagcgccgtgcggcggccctcctcgatggcctccatctgcttgccggcggcgacctcgtcggggctgcaggcgccgccgtcgagctccttccagtacatgcagagcagcatgagcatgttgatccccatgccggcgagcatggcggggaggatgccgaggaggaaggaaataaaggagatcttgctgttgaaggcgatgaccaggttctgcgggttgccgatgggcgtcgcgctggagccgatgttggcgctggtggcgagcgcgagcaggaacggcttcgccgggaggttgcgctcggcggcgagctcgagcacgaactcggtgaggacgacgcagcaggtgtcgttggtgaagagcgcgctggcgagcgcggtgacgacgcagacgcggcacatgaggtcgcgcccgccctggctccgccacgccagcagccggcccaggtgcctgaacatgccggcgttcttgaggtagccgccgacgaccatggtggcgaagaggaggcccaggatggggaggtcgatggaggcgtaggcgtcgtcggcgctgatcacgtggaacacgatcatcagcaccgcgcccagcagcgcccccgccgtccgcccgatcggcaggaacggcaccgacgggaacaccgccagcatccagaacacaccgaacgccaccgaccccatcaccaccttcggcagcgacgccagcgccatggccgcctctctctctcactacaatgcagctagcgtcttggagtgggaggtggtggtggcgattagagtgaggaagagaggcgactccccgtgggcttaagtactcccagccaggacgaacagctggcatcagttgcagctgatgtcagtgtccagctaggtaggcagatgattacgatccagaggcaagggcacgtacatttaagcacttaattacatgccattcttttgctaattttttcctttttatcttccagatggtaatcttgtaactttttctactatatctatataaacttctactccctccataaaaaaaaggcaaaccctaagttttcgtgtccaattttaactgtccgtcttatatgaaatttttttataattcgtatttttattgttgttagatgataaaacatgattaatattttatgcgtgacttatctttttaatttttttcataatttttttaaataagacggacggttaaatgttagacacgaaaaccaacgtttgtcttttttggtacgaagggagtagattgtaatcttataatttttttctgctatatctatataaacttcgcctgtatggtgcgagtagttagttttttacctaattgttataatgatgacattaattagtgataatgttaattattatctaanactgtattaagtaaactacaaancaacataatagtatgctgtttgactactactgctactccatactccttttaaaggaaatcgtcttgggaataagggagtacattcatgtgcagcagcaattccgtaacatttatgtgatactactagctactattccgtactacacatctacacagatgcatgtgtaacacatcatctatgtagggtggacacgtgtacgtgcaggattcatccttagccacgactggagctaagcatcgatatgggtccatgggtcaacgtgtcagtgtcatcaaatgttcctgtccggttcgtgtctgcgaagagaatgtactgtacgaaaaatggcggagcacatgcacgcagtgatctctctcttacccgttgcgagtgctaatttcaggttaagccttatctaaataataaacaatactgccgtataaattaattagttaaaagtattaaccaacttgctaagcaaattgtcctttattttactttatataggagagcatatcaacgtcgtcagacaagttttagagggatttatttacccgactatatgtatttaaataaggagaagaagataaatttatggcttaagaaaatacctcaagctatttgctccgttcattttaattataagtcgatttgactcttgtcaaagtcaaactataagtttgactaattttgtagacaaatataataatatttacaacaccaaattaagtttattaaatctataattaaatatattttcataatatatttgtcttaagataaaatataactattttttttataaatttggtcaaatttaaaacagcttaactttgactaaagtcaaaacgacttctaatctgaaacggatggggtagtaaccaaggtttacataaaaaaatatacctcctaatactttcttaaatatgataaaattaaagtagaatgcatggagaaaaaagccgttgctagcttaagcgtgcaccgccatgaggccattaggatgaacaagtgatgatcatctgatcaaaaggtggcaaatgcttattacattttaattactagggatatgtcataaagcatgattaattagctagctagcttcctgttcgattaaacatgaaagccatacacctatatgctttcgtagcggcgacctggttggatcgatggatctagccttcacgactagaaaaagcattttcgccgatgttgggtattaattttcacaagtggatatgatccttagaatcaaatagccacctacaaaaatataaattagggtgaagttcactgtctattttcgcaaacggaccacttaagccgtgcctgcaaaaatgattttcgcaggcggaccacatgagatgtgcctgtgaaaattagcgtggtatatatacagtgacacatcggctgatatttttctaagtgtcatttctcccctcactcacctctcctctcccctccccttcacctccccgaccgccggcggaaggggcagacgtgcacgggacggccagcggctggcggcggctcccctcccccctccctcccagatctagccagaggagggacgggggaggccggcgggggcaacggcggcgactacggcacggggcggcggcggcgacgacggcgcagggcggtggcggctcccctctccccctccctcctagatctatccagaggagggaggggggaggccagcgggggcagtggcggcgactacggcgcggggcagcggtgactatggcgcggggcggcggcggctacgacgacgtgcggggccacggcggcagctcccctccccccttcctccagatctggccggaggagggaggggggaggccggcgggggcaacggcggcaactacggcgcggggcggcggcggcaacgacggcgcagggcagcggcggcggctcccctcctccatccctcccagatctggccggaggagggaggggagaggctagcgagggcgcgacggtgactacggcgcgaggcagcggcggtgacgacgacgacggcgcggggcagcggcgacggcgacgcccggcgcggctcccctcccctcccctcccagatccggtcgggggagggcggcggcggcggcaaggcgcggccgcgttttttttttttcgttcaatggattttcgtaggcgggccattatcccgactgcgaaaatcgttggactgcagacggtccaacccccgcgtaaaaaaatcacttttggtcgcctgaaaaaaaatactttttctactattgcttatggccagatccggtgacctcgcgtagtaagcaagacggtaacggcgcgcgcaaaacaacgtcaggcttgttgccggtgccgaagatcatgaggcgcgacgttggatctaaggtctaagagcctcttattttcttttgttattcctcggttaagtctaagtgtttgctacaacctttagctgttttatatccacatatagatctagacgctggatttctatccatttctttttataaaatacacctgtgcgctgctgggacagcttcagaccatagctaccattccatgatcaacacgtatatataagagcaggataaattaggtcacagccctgtaaattaattaattaatctgctcattttgcagccctgtaaattaattaattaatttgctcattttgcaggatgctttgctttgtgataagtatattattatgtaaaaaataagttgtccaagagatcttgtggttacacgttcctttctcgcggccttttgacttaatgaaattaaatttctaagatcttctggtcgatcaccgtttcgttcgtgtatgcatagcttaagcaaaatttccacttcagttttacagtctgttagttcttgatggcaacttgcattgtcattgttaatttacactgctggaagaccagcaggtaagtgtgttggttcaaataaagtctggtggaaaatgaacttaaaactgtatattattcatatctattactccctctattttaaaatgtacgacgccgtttgatttttttataacgtttgatcaaaggtctgattaagaaaaaaattaatatcatttaacatgtttatattataaatttttaataagatgaatgatcaaatgttatagaaaaacaataacattttcaaaaggaggttagtactaataattaacttgatatatgtatatcagctatgtcttagatggtgccgcgagatcgtgagactcaccacggtctcgcggaccgagggtgcaaggccgcgacttcacatccgaactagtgcgattaatcattaatagattaattagcatcattagcaattaattaatttattgttatttctttaattagcattattagtaatcaattattcactaatcatgataacgaattacaatcattaatcatttccaaaggggtgtcactgtcatcgtttgaccctgttgaggtcttgttcggttacacaaggattcgttctgggtcagaaatgatatgtataacaagaaatttataataggtacaacaagagaccgagatttattccaggttaggaatcaatttaatcgtattaggtataacaaaacatccggattagttccacacttcttgactagtggattgattcccggtctcttattctccctatcatgaataaattggttcctggcctggaataaatcccagtctcttctcgttgtatctatcataaatttcttactatacttgtcattcctagcccagatcgaatccttgtgtaaccgaacaaggcctgagactgctcgaaccgcaacacgtcgtcgtttttcttaacggttcagtgatatcgggtcaattttacactcccatacagcgacggcagtatatttgtgaaaaaaaaatgtatcccggatatttctgagaaaaaataaacagtatatttttaaatttaattcttttcttggcgggtattactatgatcacaaccaatgtacgtgctattatagttgatagatatagattgatcgtagtggtttcgcgttgttacttgaggtaggcaccgctaatggatgtcaatttgctcttgaaaatctggatgctagtatcgatcaaatcttttcattgagctgatcatatatactgatccaatcatatctcggctaagaaatataatgcatgcttggtcatccctaaggttggagatattttatacaagtcggcacacatcaagctagtcacttcggaaatgaacacaaaggcttcgttccgaacatgagaattccatcatatacgatgagaggattataattgtagagcatgattcaaaaagacgctagacgctaattagacgactagctaggtgacacctaggccagaccaacaagttaaatttaagatattaagaaccatatcacatatataataacaactaaactatatatatagcacgaaaatagcaacgaaatatcaacaaaggcagtttagccgtctaatgcatcatctaatgcctaattgtgtggctacccgatgcctagctagcaccaacttttaaaacattgttgtagagagcttgtttcaagatctacaaaataatccatgatttttttatgggcacaaaccaccaaggatatagcatcaaagccatcaagtaatatattttgtcagccaaccgagtaatacccgccaagtctaaagagcaaggaaaattttattttcttgacggctaacca

SEQ ID NO: 7400 - DNA, 9340 bp, Oryza sativa
ccacctactcactgtcatgtgggcccatgacgatcctactttcaaaatttaagcaacttcttcagagttggtcaatacccaatatacttctccatgactcccaaattgtacaaggttctccagtgtagcaagtgaccattccctctacaatgaatgaggtctctaaaaaagtgaagagttttctccttttagataaaatgaagttccccattatgatgtctatacttactatgcctagactcgaattaaaacagtcgggtatatgtatcaactatcaattctaacatgtcctgttgaaactcctatagtttattattatttcttcaaaatccattacaacgcatgggcactctgctagtaaaagtaaaagagtacatggagtacgatggacctcattccctttattggacgatcacttggtttaagtgtgcaaaatgttcaacaaggcataagctaatgttgtttcgtgattttcggaaaaccctctcatgattacattagtttgtcatgattcatgacctgaagagtgcaatttaataaacgaatttcagattcctgtcaatctgcaatgtatctgagcttttgtatcctccacttctttgttttcttccctgcagatttcctaatgatttgtgcaacaattgtaagcgtccaggacattttgctagagattgtccaaatgtggctctttgccatgcatgtgggcttccagggtaaggactatttgttattctgttttgcagatatttcatgttcttatagcctttaaagaagtcttccattattcagtatctatttgtggtgtacttgtgtttattttctcttatattgttttgccatgcttttaaaattctgtattctcaatagcactgcttgtttatgtcattgtgtatttagaaccatatccatctagattacaaatgtgcagtgaatgagacgtgatctcaataattgtgacagttcaaccgtaatgaagttgatgttaggtgaacatgatagatggctacattgatttgctaatatttaacagttttgaggtaccccatgctcctttcgtgatggatgagacttagtgttggcatcaccaattatttgagatttgttcccaaaacacgaaacatggttcattgtcttttaacagttcaatttatagtatgcatctaatatttttttattagcttattcatatttatgacaaatcagcaaaaggtagctaaagaaactgaaatgttgaagcttaagccatgcataaagttgccagaagatggttagtaacagttaagcaataacttgtggaattaaataattgtaatttaagtcacagattatagtttcatgtgatcaagaatgcttacatgcttcaccttcttatctgtgagctagcattacttactctaatgcttactttggcaggcacattgcagcagagtgttcttccaaagatctctgctggaactgcaaagaacctggccacatggctaacagctgcccaaatgaagggatatgccgcaactgtggcaagtcgggtcacattgcaagagaatgcagtgctccaccaatgctgccaggtgaaatgaggctttgcagcaactgctacaaaccagggcaccttgctgcggaatgcaccaatgagaaggcctgcaacaactgtaggaagagtggccatcttgctcgtaactgccctaacgagcccgtctgcaacctatgcaacgtgtcaggacatttggcccgagagtgccccaaatctgatgctatcaatgagaggggtgggcctcctcccttccgtggtggatacagtgatgtggtctgccgtgcttgcaatcaggttggtcatatgagccgtgattgcatggccggtgcgttcatgatctgccacaactgcggtggtcgtggtcacatggcttatgagtgcccatctgggaggcttatggatcggtttccccctcgccgtttttgagtgattttccaagtgctcaatcagatgactcttcgttgggaccggcattatgaataatcatatctcgtgctttatgccttaagaatgttagtgtatttcagatacttcagttttcatagtttgtcagcttacttgtatttgtcggttctgctgtttaactgcgatactcgttgatcggtgaggatgaattccagatgggatacttgttttaattcctacaaacttgaagttagtcttatatgccttgcagttgcatctgtgtgtttttataccccaaactgtagtctgtacttccaatccggtactgaagcgcccttttgaactggcacacaagctcggcattgctccgttgcaagctttttttctaccccctaattttggtgtgtgaacgtaattcgggtaattcgggaagagtatgctgctgattttctcctgtttattgcatatctgagccaagtaatatttctggaatggacgttaacatgcctcgatagtatcaaaaggcataacttgttatccttgcctacgataaagtctcgattagtagtcgatttggcatcaaaacaccagagaaatgcagatcatttgcttctacagcgcatatttcacccaaaaaaaaaacatatacagcaattggttctgactctttcaagttgagcgcaaaccacataaagactacccgagtcacaatgttattggtcagcgtaacaagttccatggatgctcacaagtcacagccacaaaaacaaaaggcacagcagcacgacactactacagaaatcgaaacaaaatcaaaacactacacaagccgtaacgaacaaaatgaccagggaggcattccagattttggctatatataggacagtttaatccaacttcgcgtagctcaatccattgctatctgctttctcgccttccgtttgccccagagccttcatctgtttcatccaaggaaacaggaagagagaacgaaaaaaaaaaaaggtcagctactctgtcaactgagttgcccatttgacacataacaattgtacaaactgaaaattctctggaattgaagcatagaaaatgaccggagatagcaacagtgcaaaaagaaaactacctttgcttggtacgccttatggtatctgtaaccctgaaaaaacaagagcacaacataaatatgtcgttcttgtgtgttgggggtgggtgggtttaaacagttgcattgtgtaaaagcagatacttactttgtcggttccatatagataatcacaatacgtgaaaacagaagcgaaattgctctgactctggcgtccaacatagtgatgataatcatggtattctgcgcctccatagaatggaatatactttgtcaggttgaacgggaaatcaaagctgcaaaaataacaagataattttgttatgccatgtaaacactacacgagtgcaacagcaatgtgatgggcgatatcatttggtcagtgcaatagcaaagtgatggggaatacggcaaaaagtatggtcatgatactcaagttttatgagttgacactgacacaatattgatatgaccaaagcatatacatgtctttttatttattttagaaaaggggttggcggctttccatccttttaagttaaagttcaagcaacttaattgcttctatatcatccatggtcacatactacaattttatgagtgaacacttgcagaaaaacaatggatcagacccaaaacagtctagtaatcttgcattgttgctagttctccatgtctagcatagtatcatatacactagtaaatatgcatatctatttaaatttgacaagctgcttaaaaaaaactaatatcaatcattacactccagattgcttagagttgtataattttgtaattaaaatcacaaatgcacttttttctcaaattaattagtctaatcaactttaatgaattgaaagtgtagttgcaaaattgaacaaggttactcatttgctacttaaatttctttctactaaaaagctgcagcgaatgctgaaccatggtctgtagtctattctagcattattctggaaatagtagataaaagcatcctatttctaggtaaaccttttctgttcaataactccaaatgcatcaacataggtacctgtatcctatgttccaagcttccaattggaaacaaaccctctgtccaaaaatccatttatcactaacaaatcaaaatgccatgcagctagatttgcaatcacccactaaatctatccacaacatatccatccatcactagcaacaaatccaaatacttgccaagtcaacacaatgctgtgcacatcgttagacttatattacgtgataaattatgcatcctccaaacaatccaaagaaggggggaagtacaaagtttccttacccgctgtgtgtctctatggcctccatctggcggagtacaatccagagccagaaggtgatcatgtgaccaggtgcaagcgctggcccgacaaaggaggggatgccgaggatgagcacctcagcccagtgtgcatatggcgcggcgaatccaatgggtgccgtgaactcatggtggacacggtggatcttctcatagccccactccccatgtagcaaccgatggatccagtagttgaggtagtcctcaaccaggaagtacaccagcagctgcgccgccatctcccccagcgacggcagtggcagccctgtgtggattcccaccatctgcaatgttcaaaaacgacctatcttctttatttgatctctagaactactataataatgcaccacatataaataatagtaaatgatataaaaggaacaatcttcttttacttaagagtattaaaatatcatcaagacgaccttagatcatgtgattgcatctcacaagggttcccggatcacaaatcccttcaaatctcgcaatctcgaactgatggatcacccaccatcttacaaatccaaattctaagcgccgcatacgcgtagtaaccaaatgtcgcgttcttccttcgaatctaatccccgcggcacagcattgcgcggattcatcgacgagagccgcagaaaaaaaaagaagaggaaacgcaccttgacggtagggtaggacacgagctggagcgggccgatgacgaggaagaagaggcgcatgacgtccctgtagcagcggaagaactcctcccgggagagccgcaccttgggctgcagcttgaacggccccacggcggccggcgcgcggagctcgaggagcgcgacggggagcggcgcgagcgtgaagacgacgaagaggaagaggatgttgtgccagaagaggacgtagtccgggatccccgccgagtacctgaaccacagcgactccgccgccgtcatcgccctccccagcgccgcctccgcctccgccgccgtcgcgtagggcagcatctctccccgcctccgccgccgccggcgagccactcgagatggccccctctttgcgattcccgataactctagggggttaggtgcaaaatgccgcttcgagtggcctcgcgtcgtcgtccacagctggacagtgctgtcctctgctttttatgatggcatgtttgtctcactgacatgtggggcccacgtaaggcgcggtgtgcggtgggctccacctggcagtgagtggggcccgctgctcctttgttgtttttgctaatgctgtgtggctggatctcgcatgcatatatggtatggagaattggagatggagattggagagagcatctgttgctctttgactttctgtggccatgaatccactccaaaaactacaaatactcgaaaattcgattgtttgttcaatgctgtggagtaatcagatgttcgatctggagattaagaaacaaattagctgcaatttgtgttacaagttggtggcagatcaaattaatcaaaccaccaaatcatatttttacagctgaagcgttggatactcctccaaatttcagcacaaatgcgtgcctagccagtgcattcatgatagagagaaaaagatatccagtgctacaggtcatagacaagatggatttcatttattatgggggtttttttatatataatttacatcttagaacagctattaaaatactggaaactattgagatggcaatagttttatcagagaataaaagagctatagtagcaataagtgatcaggggacaacaatgtgagtatataggatttaatttgttcgatcgcccatacaaatatgttcgtgcttttaaagcagcacacgtacgtacgtacgtcgaatcgtcgatgcatgcattgtttggtcatccgtatttatagccaatgcaaatttcttacgtgcgaaatgcaactacacatatgccacctatgcatccacgttcccaagagtccaaccaccagcagccatagatgtcgatgtcataagagcactacggctagggaaaagaacaaattcaaaatgttgccatcaatgtgcattttgtcacgttatattttgttttcccgattacccagcagaaatatacgtacaataccactacacgtaacatcacacttgcacgcccgtcaaaataaacacacactaaacaaaatgaaaaccaacaatgcttatataaatttattattattttattgaaagttcatttacgtatactcgtagcttaattttcatacacgcgaggatttaaatccggtaggtaaaattatatatcgatgactccaccattattccgtatcatttctcatttcaattcaatgctataaaaatactacaatgcacttgcttttcctcaacaacctacccgtcaacctctttcctagagagcgacgtgtcgggcatatactctctctgttttaaaatgtttgacaccgttgacttttcagtacgtgtttgaccattcgtcttattcaaaaaatttaagtaattatttattcttttcatatcatttgattcattgttaaatatacttgtatgtacacatatagttttacatatttcacaaatttttttaataagacgaacggtcaaacatgtgctaaaaagtcaacggtgttaaatattttgaaacggagggaatacattcataacaaaatgtcgtacatttttatacttcgatcttaccaaagttaattggattagctatctattatcgtttttttgctggtccatttcggaaagtagctagctagatgcatttttctatggctagctaggtacgatgtcgagctagctatgtgtcatcgcctcaatttcggcagtttttcttcctctcctctcgtgacttcttctgtcgacaaagtggcatggtttccacgtccaaattcaggtatgccaggccgccgcctatgcatacatgtatactcaagcaaaattgttaggaaatgataagcgaacaaacgataaaaaaataatagatcagtcacagaagacacgagatttaacgtggaaaaccctctcaatacaggagagaaaaaaccacgggcgccagccagcaaaatatcttcactatatctggggtgaggttacatcgccgcacggcggtttacaagaggtatatatatggtggaaccctaaaaaggatgacgatccgttttgcgggggctccggcccaagcctcccggtgacgggcctccgctctgctacggcagaagctggcctttattaagtgcaaatgaatttgtatcacaactcaacaaaaatgaacatgttttgttatgataaaataaaatatataataatatatcatatatgtaatatatttttaaataaaaatgctagtatgatttgttgcttatttgattatattttatttacttgatgcaaacaaatattagactattatgtgatattagaaactaatttaaaaagtccaaaagtagcggtatatctttcatagtagtagtttagataaacaggtatgcaataccacgcacatttcagacctctcaacttcatcaagcaattaaatttctgagtcccctcatgtactgtgttagatactttggacttgagtttgcttaatttgtcccatgtatagccccataaaatttatttttaaatataagtggtttgcatttagtttcaggcctccatccttaaacacacaagataccatcacaattgtatatttctatgagagtatgaatactacttatatagctttattttttataactattaggtacaaactttttaacagttcatagtataattatattataactcatatatattatatatgtatttaactaattagaagtagtctcgccgaggagcacttttgctcacgaggtagtgcggcttttttctcttgggcctgttcagctgcacttaactttattgttgtgcagtcaacacaaatagtaagttgagtttgcagctgcagcaacaacggctgcgtacaatggctgtaccagctagccgaacaggcctcttgtagacacgaatctcaagacgacccgacggtccacaaatcaactgtttggcaaaacaaatttatcaacaattgtatagcaattcagatcctttaatccacgaacagaggatagtttctttttccggcaggtacagtaaaacacaccaaaaacacatctataaatccaaggatagttatcgtccttggccctgtttggtggagtttaagattctaagaaacaactggtgagaatttggagaagctgggaaacccagcttctgacttctagtttattttctgtattctacaactacagtttctcataatctaagtgaaaatttggattgtttggggagcttctagcaatagcagcttctagaaaaatctccagctaccagaagctcacccaaacaagtcccttattaggtgcatcaccaaacatgtacatcctctcgtactcgatcctcctcggattgacgacgaagcggtgactgaaaataacacaaacacgtgataccgagccagcatgcacggtaaggatgtaagtggatcgatccgtaaactcacttatagtacacaaatgaatgggtaaccgccgccggcggactgtacagaggcgtcgtcaaacgggcggcgcacatagtttccctggggcgtgcagacaccgaacgctccgacgacttgcacgctccatgcatcgccgggaaacctgtctctctctgacggctcacgagcaattcgcctgacaagtgaccacccctcatgctcaatgttctgcatcacaaactgacacggcaatacaacaattaatactggtgcttaagtttaaactgcttgcttgtgtccatcttgtattcattgtttgctggctaatttggccgatctcactttgtatatctccagtggttgagcacgtgagtcgtcaaacatccactacaggcggcaattttacagcaaggatgagcaaatcttca

SEQ ID NO: 7401 - DNA, 8541 bp, Oryza sativa
catgcaagcttccatgcatgtttgtggagtgatgtatcatgtattaatctattttttaatttttttcataactatttagatgacatataagaaacaagaggacatcctcttaagggattaaaatagtatgccccttttttcaccaccttttgttttaatttcaatatataaggtgagtacttttgtactataaagagcagtaagtacatttacttttcaattccatataacatttgcttttcaatttcatatgctaattgtctagctagtgtgtatatataactacatggagaaatatatagggagtggaatcaagaggggaccaatgcacaacactctagctagatagtataagtcgccatctttgatatatctttcttattcgtacaagtggccagcataggaggtagagagctgttacgttggtgtgaccctgatttaatctgatcaatctatctccactgagtgcacgcatgcatcattaatctcactaagattaattaggagacgtaatatgcgaatgaattaacaaacgtacggtcggcagaggccgaagatgtaacccattttcgtaaccattgaaagaaaataatgttagagaacaacatgcctagctaacttaaatgtgcaatctagctacgtacgcactaggcaagatcggttaaacaaagagggagcaaattgacaagtgcacaaagccaaattaactttattaaaagttcaaaactgattgcaagtttggagcaatgaggtaatccggcatgcgtacttgagtcactagctcattcgctagtgctagctttgttgctatcaacttcattcaaacagagaccagctggcaacagggatacagtacatatatacatgcattctgctgttcatttgccttattaccatgcaccaatataatgcatcctcctctctagcttatcataagtactaattaactaattatcccagagcatggcaccaatataattgatccacttgagaccaagcatagtgtacacttgaacacatgcatgcattggcatgcacatagtacggcttgatcacaaacttaatcatcatactagcttccttggattaatatgatcatatcacatcccttgtaatttgcatgaattcttgcatgctcgatcattctgccttcttctgatcgttgtagatagtagctagccggattatattaattaattaatttaatgaatactagatgttgatcttgccgatgagagggatgccgatggcggtgacgacgagggtggatgggagtccgaagatgacgtggttccagaaggtgaggtcgtaggcgttgcgcgtcgcccgcctcgcctgctcgcacacgatcaggttcgccgccgaccccagcagcgacaggttccccgccaccgtgctcacccacgccagcagcagccacgaccgcgtcaccgccgccggtgatatcgtcgccgccgccgccgccacctcatcccccatcaacaacactacacccacatatataaattaatttacaattaccactcaaataacatgtaaaaaatgagttgttcttttttaattatgagagacaaaaaaaatttttttcttttaataatcattcatcttattaaaaaatataattacatttattttattttgacttgatttattgtctgatttaatctttttatatttacaaaagaaattgaataagatccattcatcgataaaaaaaagtcagatatcatgtattaaaagaaactgatgtactgtacagtacaaatgttagtgctgggtgagtcgggacacattgggtactagcaatagcatggtgcgagaaaggttgtgagtaagtacgtaccggtggggacgttggaggcgaggttggagaggaggaggatgatgacggagaggacggtgacgccggtgacgtggttgatctttgagtagggcgccatcacgttccagatggccccgggtagccccgtcttgttgaacccgctcaccgtcacgaacatccccgagaagaacaccagcagcgagtacgacacctgcatcatccattcacatccacgcacacgtggcacccagttcacatattgcttcttgtccgcatggccgccacgtgtacttgctcgtgtggcctagagttatagtgatttggacggatatgggttaccttgtcgaggcatggctcggcgtcgcggaagtcgacgacgacgagggcgatggcggtcgtgatggcggtccacgacatgttgaggccgagcatgtaggcgacgagcatgccgacggtgaccacgtacgcgaagctcttgaggaacagcttccgccggtgctccgagcactgcatgaaccaccggtgcttcgtcgagatgttctccgacatcatcgactcggcgtcgccgccgtcgtcgtcctccggcgatgcgggggtggcggcgtcgccgtcgtctttcttgttgttgttgagcgccgtgcggcggccctcctcgatggcctccatctgcttgccggcggcgacctcgtcggggctgcaggcgccgccgtcgagctccttccagtacatgcagagcagcatgagcatgttgatccccatgccggcgagcatggcggggaggatgccgaggaggaaggaaataaaggagatcttgctgttgaaggcgatgaccaggttctgcgggttgccgatgggcgtcgcgctggagccgatgttggcgctggtggcgagcgcgagcaggaacggcttcgccgggaggttgcgctcggcggcgagctcgagcacgaactcggtgaggacgacgcagcaggtgtcgttggtgaagagcgcgctggcgagcgcggtgacgacgcagacgcggcacatgaggtcgcgcccgccctggctccgccacgccagcagccggcccaggtgcctgaacatgccggcgttcttgaggtagccgccgacgaccatggtggcgaagaggaggcccaggatggggaggtcgatggaggcgtaggcgtcgtcggcgctgatcacgtggaacacgatcatcagcaccgcgcccagcagcgcccccgccgtccgcccgatcggcaggaacggcaccgacgggaacaccgccagcatccagaacacaccgaacgccaccgaccccatcaccaccttcggcagcgacgccagcgccatggccgcctctctctctcactacaatgcagctagcgtcttggagtgggaggtggtggtggcgatgagagtgaggaagagaggcgactccccgtgggcttaagtactcccagccaggacgaacagctggcatcagttgcagctgatgtcagtgtccagctaggtaggcagatgattacgatccagaggcaagggcacgtacatctaagcacttaatttacatgccattcttttgctaattttttcctttttatcttccagatggtaatcttgtaactttttctactatatctatataaacttctactccctccataaaaaaaaggcaaaccctaagttttcgtgtccaattttaactgtccgtcttatatgaaatttttttataattcgtatttttattgttgttagatgataaaacatgattaatattttatgcgtgacttatctttttaatttttttcataatttttttaaataagacggacggttaaatgttagacacgaaaaccaacgtttgtcttttttggtacgaagggagtagattgtaatcttataatttttttctgctatatctatataaacttcgcctgtatggtgcgagtagttagttttttacctaattgttataatgatgacattaattagtgataatgttaattattatctaatactgtattaagtaaactacaaaacaacataatagtatgctgtttgactactactgctactccatactccttttaaaggaaatcgtcttgggaataagggagtacattcatgtgcagcagcaattccgtaacatttatgtgatactactagctactattccgtactacacatctacacagatgcatgtgtaacacatcatctatgtagggtggacacgtgtacgtgcaggattcatccttagccacgactggagctaagcatcgatatgggtccatgggtcaacgtgtcagtgtcatcaaatgttcctgtccggttcgtgtctgcgaagagaatgtactgtacgaaaaatggcggagcacatgcacgcagtgatctctctcttacccgttgcgagtgctaatttcaggttaagccttatctaaataataaacaatactgccgtataaattaattagttaaaagtattaaccaacttgctaagcaaattgtcctttattttactttatataggagagcatatcaacgtcgtcagacaagttttagagggatttatttacccgactatatgtatttaaataaggagaagaagataaatttatggcttaagaaaatacctcaagctatttgctccgttcattttaattataagtcgatttgactcttgtcaaagtcaaactataagtttgactaattttgtagacaaatataataatatttacaacaccaaattaagtttattaaatctataattaaatatattttcataatatatttgtcttaagataaaatataactattttttttataaatttggtcaaatttaaaacagcttaactttgactaaagtcaaaacgacttctaatctgaaacggatggggtagtaaccaaggtttacataaaaaaatatacctcctaatactttcttaaatatgataaaattaaagtagaatgcatggagaaaaaagccgttgctagcttaagcgtgcaccgccatgaggccattaggatgaacaagtgatgatcatctgatcaaaaggtggcaaatgcttattacattttaattactagggatatgtcataaagcatgattaattagctagctagcttcctgttcgattaaacatgaaagccatacacctatatgctttcgtagcggcgacctggttggatcgatggatctagccttcacgactagaaaaagcattttcgccgatgttgggtattaattttcacaagtggatatgatccttagaatcaaatagccacctacaaaaatataaattagggtgaagttcactgtctattttcgcaaacggaccacttaagccgtgcctgcaaaaatgattttcgcaggcggaccacatgagatgtgcctgtgaaaattagcgtggtatatatacagtgacacatcggctgatatttttctaagtgtcatttctcccctcactcacctctcctctcccctccccttcacctccccgaccgccggcggaaggggcagacgtgcacgggacggccagcggctggcggcggctcccctcccccctccctcccagatctagccagaggagggacgggggaggccggcgggggcaacggcggcgactacggcacggggcggcggcggcgacgacggcgcagggcggtggcggctcccctctccccctccctcctagatctagccagaggagggaggggggaggctagcgggggcagcgacggtgactacggcgcgaggcagcggcggtgacgacgacgacggcgcggggcagcggcgacggcgacgcccggcgcggctcccctcccctcccctcccagatccggtcgggggagggcggcggcggcggcaaggcgcggccgcgttttttttttttcgttcaatggattttcgtaggcgggccattatcccgactgcgaaaatcgttggactgcagacggtccaacccccgcgtaaaaaaatcacttttggtcgcctgaaaaaaaatactttttctactattgcttatggccagatccggtgacctcgcgtagtaagcaagacggtaacggcgcgcgcaaaacaacgtcaggcttgttgccggtgccgaagatcatgaggcgcgacgttggatctaaggtctaagagcctcttattttcttttgttattcctcggttaagtctaagtgtttgctacaacctttagctgttttatatccacatatagatctagacgctggatttctatccatttctttttataaaatacacctgtgcgctgctgggacagcttcagaccatagctaccattccatgatcaacacgtatatataagagcaggataaattaggtcacagccctgtaaattaattaattaatctgctcattttgcagccctgtaaattaattaattaatttgctcattttgcaggatgctttgctttgtgataagtatattattatgtaaaaaataagttgtccaagagatcttgtggttacacgttcctttctcgcggccttttgacttaatgaaattaaatttctaagatcttctggtcgatcaccgtttcgttcgtgtatgcatagcttaagcaaaatttccacttcagttttacagtctgttagttcttgatggcaacttgcattgtcattgttaatttacactgctggaagaccagcaggtaagtgtgttggttcaaataaagtctggtggaaaatgaacttaaaactgtatattattcatatctattactccctctattttaaaatgtacgacgccgtttgatttttttataacgtttgatcaaaggtctgattaagaaaaaaattaatatcatttaacatgtttatattataaatttttaataagatgaatgatcaaatgttatagaaaaacaataacattttcaaaaggaggttagtactaataattaacttgatatatgtatatcagctatgtcttagatggtgccgcgagatcgtgagactcaccacggtctcgcggaccgagggtgcaaggccgcgacttcacatccgaactagtgcgattaatcattaatagattaattagcatcattagcaattaattaatttattgttatttctttaattagcattattagtaatcaattattcactaatcatgataacgaattacaatcattaatcatttccaaaggggtgtcactgtcatcgtttgaccctgttgaggtcttgttcggttacacaaggattcgttctgggtcagaaatgatatgtataacaagaaatttataataggtacaacaagagaccgagatttattccaggttaggaatcaatttaatcgtattaggtataacaaaacatccggattagttccacacttcttgactagtggattgattcccggtctcttattctccctatcatgaataaattggttcctggcctggaataaatcccagtctcttctcgttgtatctatcataaatttcttactatacttgtcattcctagcccagatcgaatccttgtgtaaccgaacaaggcctgagactgctcgaaccgcaacacgtcgtcgtttttcttaacggttcagtgatatcgggtcaattttacactcccatacagcgacggcagtatatttgtgaaaaaaaaatgtatcccggatatttctgagaaaaaataaacagtatatttttaaatttaattcttttcttggcgggtattactatgatcacaaccaatgtacgtgctattatagttgatagatatagattgatcgtagtggtttcgcgttgttacttgaggtaggcaccgctaatggatgtcaatttgctcttgaaaatctggatgctagtatcgatcaaatcttttcattgagctgatcatatatactgatccaatcatatctcggctaagaaatataatgcatgcttggtcatccctaaggttggagatattttatacaagtcggcacacatcaagctagtcacttcggaaatgaacacaaaggcttcgttccgaacatgagaattccatcatatacgatgagaggattataattgtagagcatgattcaaaaagacgctagacgctaattagacgactagctaggtgacacctaggccagaccaacaagttaaatttaagatattaagaaccatatcacatatataataacaactaaactatatatatagcacgaaaatagcaacgaaatatcaacaaaggcagtttagccgtctaatgcatcatctaatgcctaattgtgtggctacccgatgcctagctagcaccaacttttaaaacattgttgtagagagcttgtttcaagatctacaaaataatccatgatttttttatgggcacaaaccaccaaggatatagcatcaaagccatcaagtaatatattttgtcagccaaccgagtaatacccgccaagtctaaagagcaaggaaaattttattttcttgacggctaaccattatttatgcccaactcttatagatgtcatgtgtcgatctacgaaaaatggttaaacttgtgcaagcatgtataatagtccttgtcccataatatagttatctttatgtttttatattgggactaagaaagtgtttggaataaggagaactatgtaaaaaaataaatgagatgatcgtgatttatcgaaatgatcgagagagtatacaaagaagtaactgttgtattttgaaacgaaagaagtaggtgataactagccttccaatttccaacataa
